United States Patent Application Publication US 2019/0348154 A1 - sequence listing, part 127

SEQ ID NO: 482983 - DNA, 747 bp, Shigella sonnei
atgaagtctgtattaaaagtttcactggctgcactgaccctggcttttgcggtttcttctcatgccgcggataaaaaattagttgtcgcgacggataccgccttcgttccgtttgaatttaaacagggcgataaatatgtgggctttgacgttgatctgtgggctgccatcgctaaagagctgaagctggattacgaactgaagccgatggatttcagtgggatcattccggcactgcaaaccaaaaacgtcgatctggcgctggcgggcattaccatcaccgacgagcgtaaaaaagcgatcgatttctctgacggctactacaaaagcggcctgttagtgatggtgaaagctaacaataacgatgtgaaaagcgtgaaagatctcgacgggaaagtggttgctgttaagagcggtactggctccgttgattacgcgaaagcaaacatcaaaactaaagatctgcgtcagttcccgaacatcgataacgcctatatggaactgggcaccaaccgcgcagacgccgttctgcacgatacgccaaacattctgtacttcatcaaaaccgccggtaacggtcagttcaaagcggtaggtgactctctggaagcgcagcaatacggtattgcgttcccgaaaggtagcgacgagctgcgtgacaaagtcaacggcgcgttgaaaaccctgcgcgagaacggaacttacaacgaaatctacaaaaaatggttcggtactgaaccgaaataa

SEQ ID NO: 482984 - DNA, 660 bp, Shigella sonnei
atgcagtttgactggagtgccatctggcctgccattccgcttctgattgaaggtgccaaaatgaccctgtggatttcggtcctcggtctggctggcggtctggtaatcggattgctggcaggttttgcacgcaccttcggtggttggatagccaaccacgtcgcgctggtctttattgaggtgatccgcggcacacctatcgtcgtccaggtgatgtttatttatttcgccctgccgatggcgtttaacgacttacgcatcgacccatttactgcggcggtggtcaccatcatgatcaactccggcgcgtacattgcggaaatcacgcgtggtgcggtgctgtctattcacaaaggttttcgtgaagcaggactggcgctcggtctttcacgttgggaaaccattcgctacgtcattttaccgctggcactgcgtcgtatgctgccgccgctgggtaaccagtggatcatcagcattaaagacacctcgctgtttattgtgatcggcgtggcggaactgacccgtcaggggcaagaaattattgccggtaacttccgcgcccttgagatctggagcgccgtggcggtgttctatctgattattaccctggtgctaagctttattttgcgtcgtctggaaagaaggatgaaaatcctgtga

SEQ ID NO: 482985 - DNA, 723 bp, Shigella sonnei
gtgattgaatttaaaaacgtctccaagcactttggcccaacccaggtgcttcacaatatcgatttgaacattgcccagggcgaagtcgtggtgattatcgggccgtccggttccggtaaatcgaccctgctgcgctgcatcaacaaactggaagaaatcacctccggcgatctgattgtcgatggcctgaaggttaacgatccgaaagttgacgagcgcctgattcgccaggaagcaggtatggtgttccagcagttttacctcttcccgcatctgacggcgctggaaaacgtcatgtttggtccgctacgcgtgcgtggcgcgaacaaagaagaggcggaaaaactggcgcgtgagctgctggcgaaagtcggtctggcagaacgtgcacatcactacccttccgaactttctggtggtcaacagcagcgtgtggcgattgcccgcgcgctggcggtgaagccgaaaatgatgctgtttgatgaaccgacttccgctcttgacccggaactgcgccatgaagtgctgaaggttatgcaggatctggctgaagaagggatgacgatggtgatcgtgacccacgaaatcggttttgccgagaaagtagcttcgcggctgatctttatcgacaaaggccggattgcggaagatggcgatccgcaggtattgatcaagaacccgccgagccagcgcttgcaggaatttttgcagcacgtctcttaa

SEQ ID NO: 482986 - DNA, 2226 bp, Shigella sonnei
atgcggtggatcctgttcatcctcttctgcctgctgggcgcacctgcccacgcggtatccatacccggcgttacaaccacaacgacaacggactcaacgactgaaccggccccggaaccggatatcgaacaaaaaaaagcggcctatggcgcactggcggatgtgctggataacgacacctcgcgtaaagaattgatcgaccagttgcgtactgtcgccgcgacgccccctgcggaaccggtcccgaagatcgtgccgccgacgctggttgaagagcaaaccgtgctgcaaaaggtcaccgaagtcagccgccattatggtgaagccctttccgcccgcttcgggcaactttatcgcaatatcaccggctccccgcataagccatttaatccacaaaccttcagcaatgcgctgagccatttttcaatgttagcggtattagtgtttggtttttactggctgattcgcctgtgcgcactgccgctgtatcgcaaaatgggtcagtgggcgaggcaaaaaaatcgtgagcgcagcaactggttgcagcttccggcgatgattatcggggcgtttattatcgacctgctgttactggccctgacattatttgtcggccaggtattaagcgacaacctgaatgcaggcagtcgcaccatcgctttccaacaaagtttgtttctcaacgcctttgccctgattgaatttttcaaagccgtactacgcctgattttttgcccaaacgtggcggagctgcgcccgttcacgattcaggacgagagcgcccgttactggagtcgtcgcctgagctggttaagcagtttgataggttatggcctgattgtggccgtgccgattatctctaatcaggtgaatgtacagataggtgcgctggcgaacgtcatcattatgctgtgcatgaccgtctgggcgttgtacctgatctttcgtaataaaaaagagattacccagcatttgctcaactttgcggagcattcgctggcctttttcagcctgtttatccgcgcctttgcgctggtgtggcactggctggcaagcgcctattttatcgtgctgtttttcttttcgttgttcgatccgggcaacagcctgaaatttatgatgggtgcaacggtgcgcagcctggcgattattggtatcgcagcgtttgtttccggtatgttttcccgctggctggcaaaaaccatcactctctcgccacatactcagcgtaactatccagagttgcaaaaacggctgaatggctggctttcggcggcgctgaaaacggcgcgtattctgaccgtctgcgtggcggtaatgttgctgttgagcgcatggggattgttcgatttctggaactggctgcaaaacggcgcggggcagaaaaccgtagatatcctgatccgtatcgcacttattctttttttctcggcggttggctggacggtgctcgccagtttgatcgaaaaccggctggcttcggatattcatggccgcccgctacccagcgcccgtacgcgtaccctgctgacgctgttccgtaacgcgctggcggtgattatcagtaccatcaccatcatgattgtgttgtcggaaatcggcgtcaatatcgcgccattgctggcaggtgccggggcattaggtctggctatctcgtttggttcgcaaacgctggtgaaagatatcattaccggggtgtttattcagtttgaaaacggcatgaacactggagatttggtgactatcgggccgttgaccggcacagtggaacggatgtcgattcgctccgtgggcgtgcgccaggataccggggcgtatcacatcattccgtggtcttcgataaccacctttgctaacttcgtccgcggtattggttcggtagtggcaaactacgatgttgatcgccatgaagatgctgataaagccaatcaggcactgaaagatgcggtagcggaattaatggaaaacgaagaaattcgcgggctgattattggtgaaccgaattttgccgggattgtcggcttaagcaataccgcgtttacactgcgtgtttcgttcaccacgctgccactcaaacagtggacggtacgctttgccctcgacagccaggtgaaaaaacatttcgacctggcgggcgttcgcgcgccagtgcagacttatcaggtgctgcctactccgggcgcgaccccggctgaaccgttaccgccgggggagccaacgctttaa

SEQ ID NO: 482987 - DNA, 927 bp, Shigella sonnei
atgtccgcccagaaaccggggttgcatccgcgcaaccgtcatcacagccgctacgatctcgccacgctttgtcaggtcaatcctgaactcaggcaattcctcacgcttacacccgccggggagcaaagcgtagactttgccaatccgctggcggtgaaggcgctcaataaggcgttgctggcccatttttacgccgtagcgaactgggatatccccgacggttttctctgcccaccagtaccgggccgggcggattatattcatcaccttgccgatttactggctgaagcaagcggaacaattccagcgaatgccagcattctggatatcggcgttggtgcgaactgtatttatccgctgattggcgtacatgaatatggctggcgttttaccggtagtgaaaccagcagccaggcgttaagcagtgcgcaggcgattatcagtgctaatccggggcttaaccgcgccattcgtctgcgtcggcaaaaagagagtggggcaatttttaacggcatcatccataaaaacgagcaatacgacgcgaccttgtgtaacccgccattccacgattccgccgctgcagcgcgggcaggtagtgagcgtaaacgccgtaacctggggctgaacaaagacgatgcactgaactttggtggtcagcaacaggagttgtggtgtgaaggtggtgaagtcgcctttatcaaaaagatgattgaagagagcaaaggcttcgcgaagcaggtgatgtggtttacctcgctggtatctcgtggtgaaaacttaccgccgttgtatcgtgctctgaccgacgtgggcgcggtgaaggtggtaaaaaaagagatggcccaggggcaaaagcagagtcgctttattgcctggacctttatgaacgacgagcagcgccgccgttttgtcaatcgccagcgttaa

SEQ ID NO: 482988 - DNA, 261 bp, Shigella sonnei; identical to SEQ ID NO: 457910

SEQ ID NO: 482989 - DNA, 333 bp, Shigella sonnei
atggaaaacaatcgcaatttccctgccagacaatttcattcgctcacgttctttgccggtctttgtattggcatcacgcctgtggctcaggcactcgccgccgaagggcaaactaacgcggatgacacgctggttgtcgaagcatcaacgccttcgctttatgcgccacaacaatctgccgatccgaaattctcgcgtccggtagcggatactacccgcacgatgacggtgatttctgaacaagtgattaaagatcagggcgcaaccaaccttaccgacgcgctcaaaaacgcccccggcgtgggtaatgccgatcagttaaggatcagttga

SEQ ID NO: 482990 - DNA, 1449 bp, Shigella sonnei
atgagcgccatagattcccaacttccctcatcttctgggcaagaccgcccaactgatgaggttgaccgcatattatcaccaggaaagctgatcatactcggtctgcaacacgtccttgtcatgtacgcaggtgcagtcgctgttcctcttatgattggtgaccgactgggcctctcaaaagatgctattgcgatgctcattagctcggatctcttttgctgcgggatcgtcacattattgcaatgtatcggtatcggccgctttatggggatccgcctgccggtgattatgtcggtgacctttgctgctgtaacaccaatgatagccattgggatgaacccggatatcggcctgctggggatatttggtgccactatcgccgcgggttttatcaccacattattagcgccatttattggtcgcttgatgcctttattcccgccactggttaccggtgtggttattacttctattgggcttagcatcattcaggtgggtattgactgggccgccggaggtaaagggaatccgcaatatggtaatcccgtttatttaggtatctcctttgctgtcttaatttttatcttgctcattattcgctatgcgaaaggatttatgtccaacgtcgccgtattactggggattgtatttggctttttactttcgtggatgatgaatgaagtcaatttatccgggctacatgatgcttcatggtttgcgattgtcacgccgatgtcatttggtatgccgattttcgatcccgtttccattctgaccatgactgccgtgttaatcatcgtgtttatcgagtcgatggggatgttcctggcactgggtgaaatagtcggtcgtaaactctcttcacacgatattattcgcgggctgcgtgtcgatggcgtagggacaatgataggcggaacgtttaacagcttcctccacacgtcattttcacaaaacgttggcctggttagcgtgacgcgcgttcatagccgctgggtgtgtatttcttcgggaattatattaatcctgtttggcatggtgccaaaaatggcggtgctggtcgcctccattccgcaatttgtgctgggcggtgctgggctggtgatgttcggcatggtactggcgacagggattcgaattctgtcgcgctgtaactacaccaccaaccgttacaacctctatattgtggcgatcagtctcggcgttggcatgactccgacgctctctcacgatttcttttctaagttaccggccgtactgcaaccgttgctgcatagcggcattatgctcgcaacccttagcgccgttgtgctgaatgtcttctttaatggctaccagcatcatgctgacctggtgaaggaatccgtctctgataaagatttaaaagtcaggacagtacgtatgtggcttctgatgcgcaagctgaagaaaaatgagcatggagaataa

SEQ ID NO: 482991 - DNA, 126 bp, Shigella sonnei
atgaattttttaatgcgcgttatattcagtctgctgttgctttttactctctctattcctgtcatttctgactgtgttgcaatggccattgaaagtcgcttcaaatatatgatgctacttttttaa

SEQ ID NO: 482992 - DNA, 549 bp, Shigella sonnei
atgcaaacggaacacgtcattttattgaatgcacagggagttcccacgggtacgctggaaaagtatgccgcacacacggcagacacccgcttacatctcgcgttctccagttggctgtttaatgccaaaggacaattattagttacccgccgcgcactgagcaaaaaagcgtggcctggcgtgtggactaactcggtttgtgggcacccacaactgggagaaagcaacgaagacgcggtgatccgccgttgccgttatgagcttggcgtggaaattacgcctcctgaatctatctatcctgactttcgctatcgcgccaccgatccgaatggcattgtggaaaatgaagtgtgtccggtatttgccgcacgcaccaccagtgcgttacagatcaacgatgatgaagtgatggattatcaatggtgtgatttagcagatgtattacacggtattgatgccacaccgtgggcgttcagtccgtggatggtgatgcaggcagccaatagtgaagcaagaaaattgttgtctgctttcgcgcagcacaattaa

SEQ ID NO: 482993 - DNA, 1518 bp, Shigella sonnei
atgtctgaacaacacgcacagggcgctgacgcggtagtcgatcttaacaatgaactgaaaacgcgtcgtgagaagctggcgaacctgcgcgagcaggggattgccttcccgaacgatttccgtcgcgatcatacctctgaccaattgcacgcagaattcgacggtaaagagaacgaagaactggaagcgctgaacatcgaagtcgccgttgctggccgcatgatgacccgccgtattatgggtaaagcgtctttcgttaccctgcaggatgtgggtggccgcattcagctgtacgttgcccgtgacgatctgccggaaggcgtttacaacgagcagttcaaaaaatgggacctcggcgacatcctcggcgcgaaaggtaaactgttcaaaaccaaaaccggcgaactgtctatccactgtaccgagctgcgtctgctgaccaaagcactgcgtccgctgccggataaattccacggcttgcaggatcaggaagcgcgctatcgtcagcgttatctggatctcatctctaacgatgaatcccgtaacacctttaaagtacgctcgcagatcctctctggtattcgccagttcatggtgaaccgcggctttatggaagttgaaacgccgatgatgcaggtgatcccaggcggtgccgctgcgcgtccgtttatcacccaccataacgcgctggatctcgacatgtacctgcgtatcgcgccggaactgtacctcaagcgtctggtggtcggtggcttcgagcgtgtattcgaaatcaaccgtaacttccgtaacgaaggtatttccgtacgtcataacccagagttcaccatgatggaactctacatggcttacgcagattacaaagatctgatcgagctgaccgaatcgctgttccgtactctggcacaggatattctcggtaagacggaagtgacctacggcgacgtgacgctggacttcggtaaaccgttcgaaaaactgaccatgcgtgaagcgatcaagaaatatcgcccggaaaccgacatggcggatctggataacttcgactctgcgaaagcgattgctgaatctatcggtatccacgttgagaagagctggggtctgggccgtatcgttaccgagatcttcgaagaagtggcagaagcacatctgattcagccgaccttcattactgaatatccggcagaagtttctccgctggcgcgtcgtaacgacattaacccggaaatcacagaccgctttgagttcttcatcggtggtcgtgaaatcggtaacggctttagcgagctgaatgacgcggaagatcaggcgcaacgcttcctggatcaggttgccgcgaaagacgcaggtgacgacgaagcgatgttctacgatgaagattacgttaccgcactggaacatggcttaccgccgacagcaggtctggggattggcatcgaccgtatggtaatgctgttcaccaacagccataccatccgcgacgttattctgttcccggcgatgcgtccggtaaaataa

SEQ ID NO: 482994 - DNA, 882 bp, Shigella sonnei
atgaaacaggggctggaagatgtttctggtctgctggaactggctgtagaagctgacgacgaagaaacctttaacgaagccgttgctgaactcgacgccctggaagaaaaactggcgcagcttgagttccgccgtatgttctctggcgaatatgacagcgccgactgctacctcgatattcaggcggggtctggcggtacggaagcacaggactgggcgagcatgcttgagcgtatgtatctgcgctgggcagaatcgcgtggtttcaaaactgaaatcatcgaagagtcggaaggtgaagtggcgggtattaaatccgtgacgatcaaaatctccggcgattacgcttacggctggctgcgtacagaaactggcgttcaccgcctggtgcgtaagagcccgtttgactccggcggtcgtcgccacacgtcgttcagctctgcgtttgtttatccggaagttgatgatgatattgatatcgaaatcaacccggcggatctgcgcattgacgtttatcgcgcgtccggcgcgggcggtcagcacgttaaccgtaccgaatctgcggtgcgtattacccacatcccgaccgggatcgtgacccagtgccagaacgaccgttcccagcacaagaacaaagatcaggccatgaagcagatgaaagcgaagctttatgaactggagatgcagaagaaaaatgccgagaaacaggcgatggaagataacaaatctgacatcggctggggcagccagattcgttcttatgtccttgatgactcccgcattaaagatctgcgtaccggggtagaaactcgcaacacgcaggccgtgctggacggcagcctggatcaatttatcgaagcaagtttgaaagcagggttatga

SEQ ID NO: 482995 - DNA, 1734 bp, Shigella sonnei
gtgaaacaacagatacaacttcgtcgccgtgcagtcgatgaaacggcagacttgcccgctgaattgcctcccttgctgcgccgtttatacgccagccggggcgtgcgcagtgcgcaagaactggaacgcagtgttaaagggatgctgccctggcagcaactgagcggcgtcgaaaaggccgttgagatcctttacaacgcctttcgcgaaggaacgcggattattgtggtcggtgatttcgacgccgacggtgccaccagcacggctctaagcgtgctggcgatgcgctcgcttggttgcagcaatatcgactacctggttccaaaccgtttcgaagacggttacggcttaagcccggaagtggtcgatcaggcccatgcccgtggtgcgcagttaattgtcacggtggataacggtatttcctcccatgcgggggttgaacacgctcgctcgttgggcattccggttattgttaccgatcaccatttgccgggcgaaacattacccgcggcggaagcgatcattaaccctaacttgcgcgactgtaatttcccgtcgaaatcactggcaggcgtgggtgtggcgttttatctgatgctggcgctgcgcacctttttgcgcgatcagggctggtttgatgagcgcggcatcgcaattcctaacctggcagaactgctggatctggtagcgctggggacagtggcggacgtcgtaccgctggacgctaataatcgcattctgacctggcaggggatgagtcgcatccgtgccggaaagtgccgtccggggattaaagcgctgcttgaagtggcaaaccgtgatgcacaaaaactcgccgccagcgatttaggttttgcgctggggccacgtctcaatgctgccggacgactggacgatatgtccgtcggtgtggcgctcttgctgtgcgacaacatcggcgaagcgcgcgtgctggcaaatgaactcgatgcgctaaaccagacgcgaaaagagatcgaacaaggaatgcaggttgaagccctgaccctgtgcgagaaactggagcgcagccgtgacacgctacccggcgggctggcaatgtatcaccccgaatggcatcagggggttgtcggtattctggcttcccgtattaaagagcgttttcaccgtccggttatcgcctttgcgcccgcgggtgatggtacgctgaaaggttctggtcgctccattcaggggctgcatatgcgtgatgcgctggagcgattagacacactctaccctggcatgatgctgaagtttggcggtcatgcgatggcggcgggtttgtcgctggaagcggataaattcgaactctttcaacaacggtttggcgaactggttactgagtggctggacccttcgctattgcaaggcgaagtggtgtcagacggtccgttaagcccggccgaaatgaccatggaagtggcgcagctgctgcgcgatgctggcccgtgggggcagatgttcccggagccgctgtttgacggtcatttccggctgctgcaacagcggctggtgggcgaacgtcatttgaaagtcatggtcgaaccggtcggcggcggtccgctgctggatggtattgcttttaatgtcgataccgccctctggccggataacggcgtgcgcgaagtgcaactggcttacaagctcgatatcaacgagtttcgcggcaaccgcagcctgcaaattatcatcgacaatatctggccaatttag

SEQ ID NO: 482996 - DNA, 711 bp, Shigella sonnei
atgaagaaaggttttatgttgtttactttgttagcggcgttttcaggttttgctcaggctgatgacgcggcaattcaacaaacgttagccaaaatgggcatcaaaagcagcgatattcagcccgcgcccgtagctggcatgaagacagttctgactaacagcggcgtgttgtacatcaccgatgatggtaaacatatcattcaggggccaatgtatgacgttagcggcacggctccggtcaatgtcaccaataagatgctgttaaagcagttgaatgcgcttgaaaaagagatgatcgtttataaagcgctgcaggaaaaacacgtcatcaccgtgtttactgatattacctgtggttactgccacaaacagcatgagcaaatggcagactataacgcgctggggatcaccgtgcgttatcttgctttcccgcgccaggggctggacagcgatgcagagaaagaaatgaaagctatctggtgtgcgaaagataaaaacaaagcgtttgatgatgtgatggcaggtaaaagcgtcgcaccagccagctgcgacgtggatattgccgaccattacgcacttggcgtccagcttggcgttagcggtactccggcagttgtgctgagcaatggcacacttgttccgggttaccagccgccgaaagagatgaaagaattcctcgacgaacaccaaaaaatgaccagcggtaaataa

SEQ ID NO: 482997 - DNA, 897 bp, Shigella sonnei
gtgaaacaggatctggcacgcatcgagcagtttcttgatgctctgtggctggaaaaaaatctggctgaaaatacgttgaacgcttaccgtcgcgatctgtcaatgatggtggagtggttgcatcaccgcgggttgacgctggcgacggcgcaaagtgacgatttgcaggcattactggcagaacggctggagggcgggtataaagccaccagctcagcgcgtttgctgagtgcagtgcgccgattgttccagtatctttatcgcgaaaagtttcgtgaagacgatcccagtgcgcatctcgcttcaccgaaattgccccagcgtttgccaaaagatttaagcgaagcgcaggtcgaacgtttattacaggcgccattaattgatcagccactggagctacgcgataaagccatgcttgaagtgttgtatgctaccgggctgcgtgtctctgaactggtcgggctgacaatgagtgatatcagcctgcgtcagggcgtagtgcgggtcattggtaaaggcaacaaagagcgcctggtaccgttaggtgaagaggcggtttactggctggaaacctatctggaacatgggcgtccgtggctgctgaatggtgtgtcaattgacgtgttgtttcccagccagcgtgcgcagcagatgacgcgacagaccttctggcaccgcattaaacattatgccgtgctggcgggtatcgacagcgaaaagctgtcaccgcatgtgttgcgtcacgcttttgccactcatttattaaatcatggtgcggatttacgcgtggtgcagatgctactgggccacagcgatctttccaccacgcaaatttatacgcatgtcgctaccgagcgtctgcggcaacttcatcaacagcatcacccgcgggcgtga

SEQ ID NO: 482998 - DNA, 522 bp, Shigella sonnei
atgaatatgggtcttttttacggttccagcacctgttacaccgaaatggcggcagaaaaaatccgcgatattatcggcccagaactggtgaccttacataacctcaaggacgactccccgaaattaatggagcagtacgatgtgctcattctgggtatcccgacctgggattttggtgaaatccaggaagactgggaagccgtctgggatcagctcgacgacctgaaccttgaaggtaaaattgttgcgctgtatgggcttggcgatcaactgggatacggcgagtggttcctcgatgcgctcggtatgctgcatgacaaactctcgaccaaaggcgtgaagttcgtcggctactggccaacggaaggatatgaatttaccagcccgaaaccggtgattgctgacgggcaactgttcgtgggtctggcgctggatgaaactaaccagtatgaccttagcgacgagcgtattcagagctggtgcgagcaaatcctcaacgaaatggcagagcattacgcctga

SEQ ID NO: 482999 - DNA, 408 bp, Shigella sonnei
gtggtcctgtggcaatctgatttgcgcgtctcctggcgcgcacagtggctttccttgctgattcatgggctggttgccgctgttattttactcatgccctggccactcagttacaccccgttatggatggtgttactttcgctggtggtgtttgattgcgttcgcagccagcggcgtattaatgctcgccagggggaaattcgcttgttgatggacgggcgtttgcgttggcaagggcaggagtggagcatcgtcaaagcaccgtggatgattaagagcggcatgatgctgcgtttacgttctgatggcggtaaacggcaacatttatggctggcagccgacagcatggacgaagccgaatggcgggatttacggcggattttgttgcaacaagagacgcaaagataa

SEQ ID NO: 483000 - DNA, 267 bp, Shigella sonnei; identical to SEQ ID NO: 458426

SEQ ID NO: 483001 - DNA, 981 bp, Shigella sonnei
atggcttttacaccttttcctccccgtcagcctacggcttctgcccgtttaccgctgacgctgatgacgcttgatgactgggcgcttgccaccattactggcgcggacagcgaaaaatatatgcagggtcaggtgacagcagatgtcagccagatggcagaagatcagcacctgctcgccgcccattgcgacgccaaaggcaaaatgtggagcaatttacgtctgttccgcgacggcgatggctttgcgtggattgaacggcgcagcgtgcgtgaaccgcagctgactgaactgaaaaaatatgcggtgttctctaaagtgaccatcgcgccagacgacgagcatgtgctgcttggtgttgccggttttcaggcgcgcgccgcgctggcaaatatctttagtgaactgccttcgaaagaaaaacaggtagttaaagaaggcgcgaccactttgctatggtttgaatacccggcagaacgtttcctgatcgtaaccgatgaagctactgctaatatgctgaccgataaactgcgcggtgaagcggaactgaacaatagccaacagtggctggcattaaacattgaagcgggtttcccggtgattgatgccgccaacagcgggcagtttatcccacaggcgaccaatctccaggcgctgggcggtatcagctttaagaaaggctgttataccggacaagagatggtggcgcgagcaaaattccgtggtgccaataaacgtgcgctctggttgctggcaggtagcgccagccgactgccggaagctggtgaagacttagagctgaaaatgggcgagaactggcgtcgtaccggtacggtgctggctgcggtaaaactggaagatggtcaggtcgtggtacaggtcgtcatgaataacgatatggaaccggatagcatcttccgcgtacgcgacgatgcgaatacattgcatattgagccgctgccgtattcgctcgaagagtaa

SEQ ID NO: 483002 - DNA, 660 bp, Shigella sonnei
atggttcagaagcccctcattaagcagggatattcgctggcagaggaaattgccaacagcgtcagtcacggcattgggttggtgtttggtatcgttgggctggtgttgctactggttcaggcggtggatctcaatgccagcgccacagcgataaccagttacagcctctatggcggcagtatgatcctgctgttcctcgcttcgacgctctatcacgccattcctcatcaacgggcaaaaatgtggctgaagaaatttgaccattgcgctatttacctgttgattgccggaacctacacgccgtttttgctggtggggctggattctccgttagcgcgcgggttgatgattgttatctggagcctggcattgctgggtattctgtttaaactgaccatcgcgcaccgattcaaaattttatctctggtgacctatctggcgatgggctggctgtcgctggtggtaatttatgaaatggcagttaagctcgcggcgggcagcgttaccttattggcggtaggcggcgtggtttattcgctcggagtgattttctatgtctgcaaacgcattccctacaatcatgccatctggcacggcttcgtgctcggcggcagtgtgtgccactttctggcgatctatttgtatattgggcaggcgtaa

SEQ ID NO: 483003 - DNA, 312 bp, Shigella sonnei
atgcagccaaacgacatcactttttttcaacgtttccaggatgacattctggctgggcgtaaaaccatcaccatccgcgacgagtctgaatcgcacttcaaaacgggtgatgtgcttcgtgtcgggcgttttgaagatgacggttatttttgcacgattgaagtcaccgcaacctcaaccgtaacgctggatacgctgacggaaaaacatgcagagcaggaaaatatgaccctgactgaactgataaaggtcattgccgacatctatcccggtcagacacagttttatgtgattgaatttaaatgtctttaa

SEQ ID NO: 483004 - DNA, 1434 bp, Shigella sonnei
gtgaaaaaactcaccttacagaaagatttcttatggggcggcgcagttgccgctcatcaggtcgaaggcggctggaacaaaggcggcaaagggccgagcatttgtgacgttctgaccggtggcgcacacggcgtgccgcgcgaaatcaccaaagaagtcttgccaggcaaatactatccaaaccatgaagccgttgatttttatggtcactacaaggaagacatcaagctatttgccgaaatgggcttcaaatgttttcggacttccatagcctggacgcgcatttttccaaaaggcgatgaagctcagccaaacgaagaagggctgaagttctacgatgatatgttcgatgaactgctgaaatacaacatcgaaccggtgatcaccctctcccactttgaaatgccgctgcatctggtgcagcaatacggtagctggaccaaccgtaaagtggttgatttctttgtccgtttcgcggaagtggtgtttgaacgctataagcataaagtcaaatactggatgaccttcaacgaaattaacaaccagcgtaactggcgtgcaccgctgttcggttactgctgctccggcgtggtttataccgagcatgagaacccggaagagacgatgtatcaggtgctgcatcaccagtttgtcgccagcgccctggcggtgaaagctgcgcgtcgcattaacccggagatgaaagtcggctgtatgctggcgatggtgccgctctatccctactgctgtaacccggacgatgtgatgttcgctcaggagtcgatgcgcgaacgctacgtctttaccgatgtgcagctacgcggctattacccgtcctatgtgttgaacgagtgggagcgtcgcggatttaacatcaaaatggaagacggcgatctcgatgtactgcgcgaaggcacctgcgattatcttggtttcagctattacatgaccaacgcagtgaaggccgaaggcggcaccggcgatgcgatctctggtttcgaaggcagcgtaccgaacccgtatgttaaagcgtctgactggggctggcagattgatccagtaggtctgcgctatgccctttgcgaactgtatgagcgttatcagaggccgctgtttattgtcgaaaacggttttggcgcttacgacaaagtggaagaagatggcagcatcaacgacgactaccgcattgactacctgcgcgcccatatcgaagagatgaaaaaagcggtgacttacgatggcgtggatctgatgggctacacaccgtggggctgcatcgactgcgtatcgttcaccaccgggcagtacagcaaacgctacggctttatctatgtgaataaacatgacgacggtactggcgatatgtcgcgttcacgtaagaagagctttaactggtacaaagaggtgattaccagcaacggcgagaagctttaa

SEQ ID NO: 483005 - DNA, 744 bp, Shigella sonnei
atggctatagcacttgtgaccgatggcagtcgcggcatcgggcgggcaactgcattactgttggcgaaagaagagtatacggtggcggttaattatcaacaaaacctccatgcggcgcaggaagtggtgaacttaatcacgcaagccggtggcaaggcattcgtgctccaggcggatatcagcgacgaaaatcaggtcatcgcaatgtttacagcaatcgatcagcacgatgaaccgctagcagcgctggtcaataacgccgggatcttgtttacccagtgcaccgttgaaaaccttaccgcagagcgaatcaaccgagtactttccaccaacatgacgggatattttctctgctgccgcgaggcggtaaaacgcatggcgcttaaaaatggtggcagtggcggcgctatcgtcaatgtctcttcggtggcctcacggttgggttcgccaggggaatatgttgattacgcggcatcgaaaggggcgattgatacgttaaccaccggactatcgctggaagtcgccgcgcagggggtccgcgttaactgcgtgcggccagggtttatttttaccgaaatgcacgccagcggcggcgagcctggacgcgtcgatcgcgttaagtcgaacatccccatgcagcgtggtggacaggcagaagaggtcgcgcaggccattgtctggctactaagtgataaagcctcttacgtcacgggaagttttatcgatttggcgggcgggaaataa

SEQ ID NO: 483006 - DNA, 2874 bp, Shigella sonnei
atgacacagacgttaagccagcttgaaaacagcggcgcttttattgaacgccatatcggaccggacgccgcgcaacagcaagaaatgctgaatgccgttggcgcacaatcgttaaacgcgctgaccggccagattgtaccgaaagatattcagcttgcgaccccgccgcaggttggcgcaccggcgaccgaatacgccgcactggcagaactcaaggctattgccagtcgcaataaacgcttcacgtcttacatcggcatgggttacaccgccgtgcagctaccgccggttatcctgcgtaacatgctggaaaatccgggctggtataccgcgtacactccgtatcaacctgaagtctcccagggccgccttgaagcactgctcaacttccagcaggtaacgctggatttgactggactggatatggcctctgcttctcttctggacgaggccaccgctgccgccgaagcaatggcgatggcgaaacgcgtcagcaaactgaaaaatgccaaccgcttcttcgtggcttccgatgtgcatccgcaaacgctggatgtggtccgtactcgtgccgaaacctttggttttgaagtgattgtcgatgacgcgcaaaaagtgctcgaccatcaggacgtcttcggcgtgctgttacagcaggtaggcactaccggtgaaattcacgactacactgcgcttattagcgaactgaaatcacgcaaaattgtggtcagcgttgccgccgatattatggcgctggtgctgttaactgcgccgggtaaacagggcgcggatattgtttttggttcggcgcaacgcttcggcgtgccgatgggctacggtggcccacacgcggcattctttgcggcgaaagatgaatacaaacgctcaatgccgggccgtattatcggtgtatcgaaagatgcagctggcaataccgcgctgcgcatggcgatgcagactcgcgagcaacatattcgtcgtgagaaagcgaactccaacatttgtacttcccaggtactgctggcaaacatcgccagcctgtatgccgtttatcacggcccggttggcctgaaacgtatcgctaaccgcattcaccgtctgaccgatattctggcggcgggcctgcaacaaaaaggtctgaaactgcgccatgcgcactatttcgacaccttgtgtgtggaagtggccgacaaagcgggcgtactgacgcgtgccgaagcggctgaaatcaacctgcgtagcgatatcctgaacgccgtggggatcacccttgatgaaaccaccacgcgtgaaaacgtaatgcagcttttcagcgtgctgctgggcgataaccacgggctggagatcgacacgctggacaaagacgtggctcacgacagccgctctatccagcctgcgatgctgcgcgacgacgaaatcctcacccatccggtgtttaatcgctaccacagcgaaaccgaaatgatgcgctatatgcactcgctggagcgtaaagatctggcgctgaatcaggcgatgatcccgctgggttcctgcaccatgaaactgaacgccgccgccgagatgatcccaatcacctggccggaatttgccgaactgcacccgttttgcccgccggaacaggctgaaggttatcagcagatgattgcgcagctggctgactggctggtgaaactgaccggttacgacgccgtttgtatgcagccgaactccggcgcacagggcgaatacgcgggcctgctggcgattcgtcattatcatgaaagccgcaacgaagggcatcgcgatatctgcctgatcccggcttctgcgcacggaactaaccccgcttctgcacatatggcaggaatgcaggtggtggttgtggcgtgtgataaaaacggcaacatcgatctgactgatctgcgcgcgaaagcggaacaggcgggcgataacctctcctgtatcatggtgacttatccttctacccacggcgtgtatgaagaaacgatccgtgaagtgtgtgaagtcgtgcatcagttcggcggtcaggtttaccttgatggcgcgaacatgaacgcccaggttggcatcacctcgccgggctttattggcgcggacgtttcgcacctcaacctgcataaaactttctgcattccgcacggcggtggtggtccgggtatgggaccgatcggtgtgaaagcgcatctggcaccgtttgtaccgggtcatagcgtggtgcaaatcgaaggcatgttaacccgtcagggcgcagtttctgcggcaccgttcggtagcgcctctatcctgccaatcagctggatgtacatccgcatgatgggcgcagaagggctgaaaaaagcaagccaggtggcaatcctcaacgccaactatattgccagccgcctgcaggatgccttcccggtgctgtataccggtcgcgacggtcgcgtggcgcacgaatgtattctcgatattcgcccgctgaaagaagaaaccggcatcagcgagctggatattgccaagcgcctgatcgactacggtttccacgcgccgacgatgtcgttcccggtggcgggtacgctgatggttgaaccgactgaatctgaaagcaaagtggaactggatcgctttatcgacgcgatgctggctatccgcgcagaaattgaccaggtgaaagccgctgtctggccgctggaagataacccgctggtgaacgcgccgcacattcagagcgaactggtcgccgagtgggcgcatccgtacagccgtgaagttgcggtattcccggcaggcgtggcagacaaatactggccgacggtgaaacgtctggatgatgtttacggcgaccgtaacctgttctgctcctgcgtaccgattagcgaataccagtaa

SEQ ID NO: 483007 - DNA, 390 bp, Shigella sonnei; identical to SEQ ID NO: 458419

SEQ ID NO: 483008 - DNA, 1095 bp, Shigella sonnei
atggcacaacagactcctttgtacgaacaacacacgctttgcggcgctcgcatggtggatttccacggctggatgatgccgctgcattacggttcgcaaatcgacgaacatcatgcggtacgtaccgatgccggaatgtttgatgtgtcacatatgaccatcgtcgatctccgcggcagccgcacccgggagtttctgcgttatctgctggcgaacgatgtggcgaagctcaccaaaagcggcaaagccctttactcggggatgttgaatgcctctggcggtgtgatagatgacctcatcgtctactactttactgaagatttcttccgcctcgttgttaactccgccacccgcgaaaaagacctctcctggattacccaacacgctgaacctttcggcatcgaaattaccgttcgtgatgacctttccatgattgccgtgcaagggccgaatgcgcaggcaaaagctgccacactgtttaatgacgcccagcgtcaggcggtggaagggatgaaaccgttctttggcgtgcaggcgggcgatctgtttattgccaccactggttataccggtgaagcgggctatgaaattgcgctgcccaatgaaaaagcggccgatttctggcgtgcgctggtggaagcgggtgttaagccatgtggcttgggcgcgcgtgacacgctgcgtctggaagcgggcatgaatctttatggtcaggagatggacgaaactatttctcctttagccgccaacatgggctggactatcgcctgggaaccggcagatcgtgactttatcggtcgtgaagccctggaagtgcagcgtgagcatggtacagaaaaactggttggtctggtgatgaccgaaaaaggcgtgctgcgtaatgaactgccggtacgctttaccgatgcgcagggcaaccagcatgaaggcattatcaccagcggtactttctccccgacgctgggttacagcattgcgctggcgcgcgtgctggaaggtattggcgaaacggcgattgtgcaaattcgcaaccgtgaaatgtcggttaaagtgacaaaacctgtttttgtgcgtaacggcaaagccgtcgcgtga

SEQ ID NO: 483009 - DNA, 1203 bp, Shigella sonnei
atgcaaagtgttgatgtagccattgttggtggcggcatggtggggctggcggttgcctgcggcttacaggggagcggcttacgcgttgccgtactggagcagcgcgtaccggaacctctggcggcggatgcaccaccacaactgcgcgtttcggctatcaatgccgccagcgaaaaattactcacccgtcttggcgtctggcaggacattctctctcgtagggccagttgttatcacggtatggaagtgtgggacaaagacagttttggtcacatttcgtttgacgatcaaagcatgggctatagccatcttgggcatatcgttgaaaactcagtgattcactacgcgctgtggaacaaagcgcagcagtcgtcagatatcactctgttggcccccgcagaattacagcaggtcgcctggggagaaaatgaaactttcctgacgctgaaagatggcagcatgttaacggcgcgtctggtgattggcgcggacggtgctaattcctggttgcgcaacaaagcagatattccgctgactttctgggattatcagcatcacgcgctggtagcgaccattcgcacggaagaaccgcatgatgcggtggcgcggcaggttttccatggcgaaggcattctggcctttttaccgcttagcgatccgcatctttgctcaattgtctggtcactgtcgccagaggaagcgcagcggatgcagcaggcaagtgaagatgaatttaatcgcgcgttaaatatcgcttttgataatcgcctgggcttatgcaaggttgagagcgcgcgtcaggtgttcccactgacggggcgttatgcgcgccagtttgccgcgcaccgtctggtgctggtgggcgacgccgcgcataccattcacccgctggcggggcagggagtaaatcttggctttatggatgctgcagagctgattgctgaactgaaacggttgcatcgtcaggggaaagacatcgggcagtacatttacctgcgccggtatgagcgtagccgcaagcacagtgcggcgctgatgctggctggtatgcagggattccgcgatctgttttccggtaccaatccggcgaaaaaactgctgcgtgatattggtttgaaactggccgacacgcttcctggcgttaaaccacaacttatccgccaggcaatgggattaaacgatttgcctgaatggctgcgttaa

SEQ ID NO: 483010 - DNA, 1179 bp, Shigella sonnei
atgagcgtaatcatcgtcggtggcggcatggcgggcgcgacgctggcgctggctatttcccggttaagtcacggggcgctgccggtacatttgattgaagcgaccgcgccagagtcacatgctcatccgggctttgatggacgagctattgcgctggctgcggggacctgtcagcaactggcgcgcatcggcgtctggcaatctctggcggattacgcaaccgccatcactaccgtgcatgtcagcgatcgtggtcacgctggatttgtcaccctcgccgcagaagattaccaactggcggcgctgggacaggttgtcgaattgcacaatgtcgggcaacggctgtttgcattgctgcgtaaagcacctggcgtaacgctgcattgccctgatcgcgtggctaacgttgcccgtactcagagtcacgttgaagtgacgctggagagtggcgagacgctgacgggccgcgtgctggtagcagctgatggcacccattcagcgttagccaccgcgtgcggcgttgactggcagcaggagccttacgaacaactggccgtgattgccaacgttgcgacttccgttgcgcacgaaggccgcgcttttgaacgcttcacgcaacatggcccgctggcgatgttgccgatgtctgacggacgctgttcgctggtctggtgtcatccactggaacggcgcgaagaggtgctgtcgtggagcgacgagaagttttgccgtgaactccagtcggcctttggctggcgacttggaaaaattacccacgccggtaaacgcagtgcttatccgctggcgttaacccgcgccgccagagctattacccatcgtaccgtgctggtgggcaatgcggcgcaaactctgcacccgattgccgggcaagggtttaacctcggtatgcgagatgtcatgagccttgcggaaaccctgactcaggcgcatgagcgcggagaagacatcggtgattacggcatattgtgccgctatcagcagcgtcgacagagcgatcgcgaagcaaccatcggcgtcacggacagcctggtacatctttttgccaaccgttgggcaccgctggttgtcgggcgcaacatcggactgatgacgatggaattattcaccccggcacgcgatgtgctggcgcagcgcaccctcggttgggtggcgcgttga

SEQ ID NO: 483011 - DNA, 1326 bp, Shigella sonnei
atgagtgagatatcccggcaagagtttcagcgtcgccgtcaggccctggtggagcaaatgcaacccggcagcgccgcgctgatttttgctgcaccagaagtaacacgtagcgccgacagcgaatacccctatcgtcagaacagtgacttctggtacttcaccggctttaacgaattggaagcggtgctggtgctgattaaaagcgatgacactcataaccacagcgttctgtttaaccgcgttcgcgacctgacggcggagatctggtttggccgtcgcttaggccaggatgccgcgccagagaaactgggcgttgaccgcgcactggcattcagcgaaatcaatcagcaactttatcaactacttaacggcctggatgtggtttaccatgcccagggcgaatatgcatatgctgatgaaatcatgaacagtgcgctggaaaaactgcgtaaaggttcgcggcaaaatctcaccgcaccggcaacgatgatcgactggcgtcctgttgttcatgaaatgcgcctgttcaaatcgccagaagagattgccgtactccgccgcgcgggagaaatcaccgccatggcacatacacgggcgatggaaaaatgccgtccgggaatgttcgagtaccatctggaaggcgaaattcaccacgaatttaaccgccacggtgcgcgctatccgtcctataacaccattgtcggcagcggtgaaaacggctgcattctgcactacaccgaaaacgagagtgaactgcgcgacggtgacctggtgttgattgacgcgggttgtgaatacaaaggttacgcgggcgatattacccgcaccttcccggtcaacggcaaattcacccaggcccagcgtgaaatctacgacattgtgctggagtctctcgaaaccagcctgcgcctgtatcgtccgggaacttccattctggaagtcactggtgaagtggtgcgcatcatggttagcggcctggtaaaactcggcatcctgaaaggtgatgttgatgaactgatcgctcagaacgcccatcgtcctttctttatgcatggccttagccactggttaggactggatgtccatgacgttggcgtttatggtcaggatcgctcgcgcattctggaaccggggatggtactgaccgtagagcctggtctgtatatcgcgccggatgcggatgtgccagaacaatatcgcggtatcggcattcgtattgaagacgacattgtgattaccgaaaccggcaacgaaaacctcaccgccagcgtggtgaaaaagccggaagaaatcgaagcgttgatggcagctgcgagaaagcaatga

SEQ ID NO: 483012 - DNA, 579 bp, Shigella sonnei
atgtctatacagaacgaaatgcctggttacaacgaaatgaaccagtatctgaaccaacaagggacggggctgacccctgccgagatgcatggtttaatcagtgggatgatatgtggcggtaacgatgacagctcatggctgccgctacttcacgacctgacgaacgaaggcatggctttcggtcatgagctggcacaggcactgcgtaaaatgcactctgccaccagcgatgccctgcaggatgacggcttcctttttcagctttatctgcctgatggcgatgatgtcagcgttttcgatcgggctgatgcattggcaggttgggtcaatcacttcctgcttggtcttggcgttacgcaaccgaagctggataaagtgaccggcgaaaccggtgaagctatcgacgatctgcgtaacattgcgcaactgggttacgacgaagacgaagatcaggaagagcttgaaatgtcgcttgaagagatcatcgaatacgttcgtgttgccgcgctgttatgccacgacacctttactcatccgcaaccgaccgcgccagaagtacaaaaaccgactctacactaa

SEQ ID NO: 483013 - DNA, 330 bp, Shigella sonnei; identical to SEQ ID NO: 29270

SEQ ID NO: 483014 - DNA, 603 bp, Shigella sonnei
atgacgcaactaccagaactcccactgacattatcccgacaagaaatccgcaaaatgattcggcaacgtcgtcgtgcgttaacgccggaacaacagcaggaaatgggtcaacaagccgctacccggatgatgacttatcccccggtggtgatggcgcatacggtcgctgtattcctctcttttgatggtgaactcgacacccagccgctaatagaacaactctggcgcgccggtaagcgcgtatatcttccagttttgcatccctttagtgccggtaatttgctgttcctgaattaccatccgcaaagcgaactggtgatgaacaggttgaagatccatgagccaaaactggatgtgcgtgacgtgctacccctttcccgattagacgtgctgatcacaccgctggtcgcctttgatgagtacggtcagcgcctgggaatgggcggtggtttttatgatcggaccttacaaaactggcagcactataaaacgcaaccggtgggttatgcgcatgattgtcagttggtggaaaaactccccgttgaagagtgggatatccctcttcctgcggtggttacaccgtcgaaagtctgggagtggtaa

SEQ ID NO: 483015 - DNA, 1233 bp, Shigella sonnei
atggcaaaggtatcgctggagaaagacaagattaagtttctgctggtagaaggcgtgcaccaaaaggcgctggaaagccttcgtgcagctggttacaccaacatcgaatttcacaaaggcgcgctggatgatgaacaattaaaagaatccatccgcgatgcccacttcatcggcctgcgatcccgtacccatctgactgaagacgtgatcaacgccgcagaaaaactggtcgctattggctgtttctgtatcggaacaaaccaggttgatctggatgcggcggcaaagcgcgggatcccggtatttaacgcaccgttctcaaatacgcgctctgttgcggagctggtgattggcgaactgctgctgctattgcgcggcgtgccggaagccaatgctaaagcgcaccgtggcgtgtggaacaaactggcggcgggttcttttgaagcgcgcggcaaaaagctgggtatcatcggctacggtcatattggtacgcaattgggcattctggctgaatcgctgggaatgtatgtttacttttatgatattgaaaacaaactgccgctgggcaacgccactcaggtacagcatctttctgacctgctgaatatgagcgatgtggtgagtctgcatgtaccagagaatccgtccaccaaaaatatgatgggcgcgaaagagatttcgctaatgaagcccggctcgctgctgattaatgcctcgcgcggtactgtggtggatattccggcgctgtgtgatgcgctggcgagcaaacatctggcgggggcggcaatcgacgtattcccgacggaaccggcgaccaatagcgatccatttacctctccactgtgtgaattcgacaacgtccttctgacgccacacattggcggttcgactcaggaagcgcaggagaatatcggcctggaagttgcgggtaaattgatcaagtattctgacaatggctcaacgctctctgcggtgaacttcccggaagtctcgctgccactgcatggtggtcgtcgtctgatgcacatccacgaaaaccgtccgggcgtgctaactgcgctgaacaaaatcttcgccgagcagggcgtcaacatcgccgcgcaatatctacaaacttccgcccagatgggttatgtagttattgatattgaagctgacgaagacgttgccgaaaaagcgctgcaggcaatgaaagctattccgggtaccattcgcgcccgtctgctgtactaa

SEQ ID NO: 483016 - DNA, 660 bp, Shigella sonnei
atgacgcaggatgaattgaaaaaagcagtaggatgggcggcacttcagtatgttcagcccggcaccattgttggtgtaggtacaggttccaccgccgcacactttattgacgcgctcggtacaatgaaaggccagattgaaggggccgtttccagttcagatgcttccactgaaaaactgaaaagcctcggcattcacgtttttgatctcaacgaagtcgacagccttggcatctacgttgatggcgcagatgaaatcaacggccacatgcaaatgatcaaaggcggcggcgcggcgctgacccgtgaaaaaatcattgcttcggttgcggaaaaatttatctgtattgctgacgcttccaagcaggttgatattctgggcaaattcccgctgccagtagaagttatcccgatggcacgtagtgcagtggcgcgccagctggtgaaactgggcggtcgtccggaataccgtcagggcgtggtgaccgataacggcaacgtgatcctcgacgtccacggcatggaaatccttgacccgatagcgatggaaaacgccataaatgcgattcctggcgtggtgactgttggcttgtttgctaaccgtggcgcggacgttgcgctgattggcacacctgacggtgtcaaaaccattgtgaaatga

SEQ ID NO: 483017 - DNA, 894 bp, Shigella sonnei
atgaaacgcccggactacagaacattacaggcactggatgcggtgatacgtgaacgaggatttgagcgcgcggcacaaaagctgtgcattacacaatcagccgtctcacagcgcattaagcaactggaaaatatgttcgggcagccgctgttggtgcgtaccgtaccgccgcgcccgacggaacaagggcaaaaactgctggcactgctgcgccaggtggagttgctggaagaagagtggctgggcgatgaacaaaccggttcgactccgctgctgctttcactggcggtcaacgccgacagtctggcgacgtggttgcttccggcactggctcctgtgttggctgattcgcctatccgcctcaacttgcaggtagaagatgaaacccgtactcaggaacgtctgcgccgcggcgaagtggtcggcgcggtgagtattcaacatcaggcgctgccgagttgtcttgtcgataaacttggtgcgctcgactatctgttcgtcagctcaaaaccctttgccgaaaaatatttccctaacggcgtaacgcgttcggcattactgaaagcacctgtggtcgcctttgaccatcttgacgatatgcaccaggcctttttgcagcaaaacttcgatctgcctccaggcagcgtgccctgccatatcgttaattcttcagaagcgttcgtgcaacttgctcgccagggcaccacctgctgtatgatcccgcacctgcaaatcgagaaagaactagccagcggtgaactgattgacttaacgccagggctatttcaacgccggatgctctactggcaccgctttgctcctgaaagccgcatgatgcgtaaagtcactgatgcgttgctcgattatggtcacaaagtccttcgtcaggattaa

SEQ ID NO: 483018 - DNA, 2145 bp, Shigella sonnei
atgtctaacgagcaggagtggcaacagcttgccaacaaggaattgagccgtcgggagaaaactgtcgactcgctggttcagcaaaccgcggaagggatcgccatcaagcagctgtataccgaagccgatctcgataatctggaggtgacaggtacccttcctggtttgccgccctacgttcgtggcccgcgtgccactatgtataccgcccaaccgtggaccatccgtcagtatgctggtttttcaacagcaaaagagtccaacgctttttatcgccgtaacctggccgccgggcaaaaaggtctttccgttgcgtttgaccttgccacccaccgtggctacgactccgataacccacgcgtggcgggtgacgtcggcaaagcgggcgtcgctatcgacaccgtggaagatatgaaagtcctgttcgaccagatcccgctggataaaatgtcggtttcgatgaccatgaatggcgcagtgctaccagtactggcgttttatatcgtcgccgcagaagagcaaggtgttacacctgataaactgaccggcaccattcaaaacgatattctcaaagagtacctctgccgcaacacctatatttacccaccaaaaccgtcaatgcgcattatcgccgacatcatcgcctggtgttccggcaacatgccgcgatttaataccatcagtatcagcggttaccacatgggggaagcgggtgccaactgcgtgcagcaggtagcatttacgctcgccgatgggattgagtacatcaaagcagcaatctctgccggactgaaaattgatgacttcgctcctcgcctgtcgttcttcttcggtatcggcatggatctgtttatgaacgtcgccatgttgcgtgcggcacgttatttatggagcgaagcggtcagtggatttggcgcacaggatccgaaatcactggcgctgcgtacccactgccagacctcaggctggagcctgactgaacaggatccgtataacaacgttatccgcaccaccattgaagcactggctgcgacgctgggcggtactcagtcactgcataccaacgcctttgacgaagcgcttggtttgcctaccgatttctcagcacgcattgcccgcaacacccagatcatcatccaggaagaatcagaactctgccgcaccgtcgatccactggccggatcctattacattgagtcgctgaccgatcaaatcgtcaaacaagccagagctattatccaacagatcgacgaagccggtggcatggcgaaagcgatcgaagcaggtctgccaaaacgaatgatcgaagaggcctcagcgcgcgaacagtcgctgatcgaccaaggcaagcgtgtcatcgttggtgtcaacaagtacaaactggatcacgaagacgaaaccgatgtacttgagatcgacaacgtgatggtgcgtaacgagcaaattgcttcgctggaacgcattcgcgccacccgtgatgatgccgccgtaaccgccgcgttgaacgccctgactcacgccgcacagcataacgaaaacctgctggctgccgctgttaatgccgctcgcgttcgcgccaccctgggtgaaatttccgatgcgctggaagtcgctttcgaccgttatctggtgccaagccagtgtgttaccggcgtgattgcgcaaagctatcatcagtctgagaaatcggcctccgagttcgatgccattgttgcgcaaacggagcagttccttgccgacaatggtcgtcgcccgcgcattctgatcgctaagatgggccaggatggacacgatcgcggcgcgaaagtgatcgccagcgcctattccgatctcggtttcgacgtagatttaagcccgatgttctctacacctgaagagatcgcccgcctggccgtagaaaacgacgttcacgtagtgggcgcatcctcactggctgccgatcataaaacgctgatcccggaactggtcgaagcgctgaaaaaatggggacgcgaagatatctgcgtggtcgcgggtggcgtcattccgccgcaggattacgccttcctgcaagagcgcggcgtggcggcgatttatggtccaggtacacctatgctcgacagtgtgcgcgacgtactgaatctgataagccagcatcatgattaa

SEQ ID NO: 483019 - DNA, 996 bp, Shigella sonnei
atgattaatgaagccacgctggcagaaagtattcgccgcttacgtcagggtgagcgtgccacgctcgcccaggccatgacgctggtggaaagccgtcacccacgtcatcaggcgctaagtacacagctgcttgacgccattatgccgttctgtggtaacgccctgcgactgggcgttaccggcacacccggcgcggggaaaagtacctttcttgaagcctttggcatgttgttgattcgtgagggattaaaggttgctgttattgcggtcgatcccagcagcccggtcactggcggtagcattctcggggataaaacccgcatgaatgacctggcgcgtgccgaggcggcgtttattcgcccggtaccctcctccggtcatctgggcggtgccagtcagcgagcacgggaattaatgctgttatgcgaagcggcgggttatgacgtagtgattgtcgaaacggttggcgtcgggcagtcggaaacggaagtcgcccgcatggtggactgttttatctcgttgcaaattgccggtggcggcgatgatctgcagggcattaaaaaagggctgatggaagtggctgatctgctcgttatcaacaaagacgatggcgataaccataccaatgtcgccattgcccggcatatgtacgagagtgccctgcatattctgcgacgtaaatacgacgaatggcagccacgggttctgacttgtagcgcactggaaaaacgtggaatcgatgagatctggcacgccatcatcgacttcaaaaccgcgctaactgccagtggtcgtttacaacaagtgcggcaacaacaatcggtggaatggctgcgtaagcagaccgaagaagaagtactgaatcacctgttcgcgaatgaagatttcgatcgctattaccgccagacgcttttagcggtcaaaaacaatacgctctcaccgcgcaccggcctgcggcagctcagtgaatttatccagacgcaatattttgattaa

SEQ ID NO: 483020 - DNA, 786 bp, Shigella sonnei
atgtcttatcagtatgtgaacgttgccactatcaacaaagtggcggtcattgagtttaactatggacgaaaacttaatgccttaagtaaagtctttattgatgatcttatgcaggcgttaagcgatctcaaccggccggaaattcgctgtatcattttgcgggcgccaagtggatccaaagtcttctccgcaggtcacgatattcacgaactgccgtctggcggtcgcgatccgctctcctatgatgatccattgcgtcaaatcacccgcatgatccaaaaattcccgaaaccgatcatttcgatggtggaaggtagtgtttggggtggcgcatttgaaatgatcatgagttccgatctgatcatcgccgccagtacctcaaccttctcaatgatgcctgtaaacctcggcgtcccgtataacctggtcggcattcacaacctgacccgcgacgcgggcttccacattgtcaaagagctgatttttaccgcttcgccaatcaccgcccagcgcgcgttggctgtcggcatcctcaaccatgttgtggaagtggaagaactggaagatttcaccttacaaatggcgcaccacatctctgagaaagcgccgttagccattgctgttatcaaagaagagctgcgtgtactgggcgaagcgcacaccatgaactccgatgaatttgaacgtattcaggggatgcgccgcgcggtttatgacagcgaagattaccaggaagggatgaacgctttcctcgaaaaacgtaaacctaatttcgttggtcattaa

SEQ ID NO: 483021 - DNA, 1479 bp, Shigella sonnei
atggaaactcagtggacaaggatgaccgccgatgaagcggcagaaattatccagcataacgacatggtggcatttagcggctttaccccagcgggttcgccgaaagccttaccgaccgcgattgcccgcagagctaacgaacagcatgaggccaaaaagccgtatcaaattcgcctgctgacgggggcgtcaatcagcgccgccgctgacgatgtactttctgacgccgatgctgtttcctggcgtgcgccatatcaaacatcgtccggtttacgtaaaaagatcaatcagggcgcggtgagtttcgttgacctgcatttgagcgaagtggcgcaaatggtcaattacggtttcttcggcgacattgatgttgccgtcatcgaagcatcggcactggcaccggatggtcgagtctggttaaccagcgggatcggtaatgcgccgacatggctgctgcgggcgaagaaagtgatcattgaacttaatcactatcacgatccgcgcgttgcagaactggcggatattgtgattcctggcgcaccaccgcggcgcaatagcgtgtcgatcttccatgcaatggatcgcgtcggtacccgctatgtgcaaatcgatccgaaaaagattgtcgccgtcgtggaaaccaacttgcccgacgccggtaatatgctggataagcaaaatcccatgtgccagcagattgccgataacgtggtcacgttcttattgcaggaaatggcgcatgggcgtattccgccggaatttctgccgctgcaaagtggcgtgggcaatatcaataatgcggtaatggcgcgtctgggggaaaacccggaaattcctccgttcatgatgtattcggaagtgctacaggaatcggtggtgcatttactggaaaccggcaaaatcagcggggccagcgcctccagcctgacaatctcggccgattccctgcgcaagatttacgacaatatggattactttgccagccgcattgtgttgcgtccgcaggagatttccaataacccggaaatcatccgtcgtctgggcgtcatcgctctgaacgtcggcctggagtttgatatttacgggcatgcaaattcaacgcacgtagccggggtcgatctgatgaacggcatcggcggcagcggtgattttgaacgcaacgcgtatctgtcgatctttatggctccgtcgattgctaaagaaggcaagatctcaaccgtcgtgccaatgtgcagccatgttgatcacagcgaacacagcgtcaaagtgatcatcaccgaacaagggatcgccgatctgcgcggtctttccccgcttcaacgcgcccgcactatcattgataattgtgcacatcctatgtatcgggattatctgcatcgctatctggaaaatgcgcccggcggacatattcaccacgatcttagccacgtcttcgacttacaccgtaatttaattgcaaccggctcgatgctgggttaa

SEQ ID NO: 483022 - DNA, 612 bp, Shigella sonnei
gtgattggcatagataatacttatccgacaattattttcgatcagttgattagtctcggagataagtatgaaggcgtgaccgcccagccagttgagttcagcgaaaacggcgttatcgataatctttttgaccgtcagttagattttattatctccccacagcatgtatctgcacgagttcaggaactggaaaacctgactatcagtgaattaccaccgctgcgattgggctttctcgtttctcgccgttatgaagagcgtcaagagcaagagctgcttcaggagctgccctggctacaaatgcgctttcaaaaccgggctaacttcgaagcaatgattgatgcgaatatgcgaccttgtgggatcaatcccaccattatttatcgtccctacagttttatggccaaaatcagcgccgtggagcgcggacattttctgacggtgatcccgcattttgcctggcgactggtgaatccggcaacgctgaaatattttgatgcgccgcacaggccgatgtatatgcaggaatatctttattcaatcagaaatcatcgttataccgccacgatgcttcagcatattgctgaagatcgtgacgggacaaaccattaa

SEQ ID NO: 483023 - DNA, 819 bp, Shigella sonnei
atggctcgtctggcagcatttgatatggatggcactttattgatgcctgaccatcatttaggtgagaaaaccctctctactttggcgcgactgcgtgaacgcgacattaccctcacttttgccacggggcgtcatgcgctggagatgcagcatattctcggggcgctatcgctggatgcatatttgattaccggcaacggaacgcgcgtgcattctctggaaggtgaacttttacatcgtgatgatttacctgcggatgtcgcggagctggtgctgtatcagcaatgggatacccgagccagcatgcatatcttcaatgacgacggttggtttaccgggaaagagatccctgcgttgttgcaggcatttgtctatagcggttttcgttatcagataatcgatgtcaaaaaaatgccactcggcagcgtcaccaagatctgcttctgtggcgatcacgacgatcttacacgcttgcagatccagctatacgaagcattaggcgagcgtgcacatttgtgtttttccgccacagattgcctcgaagtgctgccggtgggctgcaataaaggcgctgcattgacggtgctgacccaacatttaggtttatcgttgcgcgattgcatggcctttggtgatgcgatgaacgatcgcgaaatgttaggcagcgtcggtagcgggtttattatgggcaatgcgatgccgcaactgcgcgcggagctcccgcatttaccggtgattggacattgccgaaatcaggctgtctctcactatttgacgcactggctggactatccacatctaccttattcccccgaataa

SEQ ID NO: 483024 - DNA, 459 bp, Shigella sonnei; identical to SEQ ID NO: 458019

SEQ ID NO: 483025 - DNA, 1773 bp, Shigella sonnei
gtgcgattatttgctcaattaagctggtatttccgtcgggaatggcgtcgctatctcggggctgtcgccttgcttgtcattatcgcgatgctgcaactggttccgccaaaagtggttggtattgttgtcgatggcgtgacagaacaacactttactaccgggctgatcctgatgtggatcgccaccatggtgctgattgccgttgtggtttatctcctgcgttatgtctggcgcgtattgctgtttggcgcgtcttaccaactggctgttgaactgcgtgaagattattaccgtcagctaagccggcagcacccggagttttacctgcgtcatcgcacgggtgatctcatggctcgtgcgaccaatgacgtcgattgcgtcgtgtttgccgccggagaaggggtgctgacgctggtggattcactggtaatgggctgcgctgtgttgattatgatgtctacgcaaattagctggcagttgaccttatttgccctgttgccgatgccagtgatggcgatcatgattaagcgcaacggcgatgctttgcatgaacgctttaagctggcacaggcggcgttttccagtcttaatgaccgcacccaggaaagcctcaccagtatccgcatgatcaaagcctttggtctggaagatcgccagtcggcgttatttgccgcggatgccgaagataccggcaaaaaaaacatgcgggtggcgcgtattgatgctcgtttcgacccgaccatctatatcgcgattggtatggcgaacttgctggcgattggcggcggtagttggatggtggtgcagggcagtttaacgctgggccagctcaccagttttatgatgtatttaggtctgatgatttggccaatgctggcgctggcatggatgtttaacattgtggaacgtggtagtgctgcgtacagccgtattcgtgcgatgctggcggaagcgccggtggtgaacgatggtagcgaacccgtgccggaagggcgtggcgaacttgatgtaaatattcaccagttcacgtatccgcagactgaccatcctgcgctggaaaacgtcaatttcgccctgaaacccggtcagatgctgggtatctgcgggccgactggttccggcaaaagtaccctgttgtcgctcattcagcgtcatttcgacgttagcgagggggatattcgctttcatgatattcctctgacgaagttacaactcgatagctggcgtagccgcctggcggtggtcagccagacgccattccttttttctgacaccgtggcaaataacatcgcgctgggttgcccgaatgccacccagcaagagattgagcatgtcgcgcggttagccagcgtacatgacgatattttgcgtttaccgcaaggttacgatacagaggtgggcgagcgcggcgtgatgctttccggcgggcaaaaacagcgtatctctattgctcgtgcgttattagtcaacgcggaaatcctcatccttgatgatgcgctttcggcggtggacggacgcacagagcaccagatcctgcataacctgcgtcagtggggacagggaagaacggtaatcatcagtgcccatcgcctttcggcactgacggaagccagtgaaattattgtgatgcagcacggacatatcgcccagcgtggcaatcatgatgtgctggcgcaacaaagcggctggtatcgcgatatgtatcgctatcaacaactggaggcggcgctcgacgacgctccggaaaatcacgaggaggccgtcgatgcgtag

SEQ ID NO: 483026 - DNA, 1782 bp, Shigella sonnei
atgcgtagttttagccaactgtggccgactctcaagcgcctgttagcgtacggttcaccgtggcgtaaaccgctggggattgcggtcctgatgatgtgggttgcggcggcggcagaagtcagtgggccgctgcttatcagctattttatcgacaatatggtagcgaaaaataacctgccgttgaaagtggttgcagggctggctgcggcgtatgttgggctacaactgtttgccgccgggctacattacgcgcagtcgctgctgtttaatcgggcggcagtaggcgtagtgcaacagttgcgtaccgacgtgatggatgctgcgttacgccagccattaagcgagtttgatacccaacccgtcgggcaggtgatttcccgcgtcactaatgacactgaagtgatccgcgatctctacgttaccgtagtggcaactgtcctgcgcagtgccgcactggtgggcgcgatgctggtggcgatgttcagcctcgactggcgaatggcgctggtggcgataatgattttcccggtagtgctggtggtaatggtgatatatcaacgttacagcacgccgattgtccgtcgtgtgcgcgcctatctggcggatatcaacgacggctttaacgaaatcatcaatggcatgagcgtcatccagcagttccgtcagcaggcgcgatttggcgaacgtatgggtgaggccagtcgttcacactatatggcgaggatgcaaaccctgcgcctcgacggttttctgctgcgtccgctgctgagtctgttttcatcgctcattctttgtggattgttgatgctgtttggcttctccgccagcggcaccattgaagtgggcgtgctgtatgcctttatcagctatcttgggcgacttaacgaacccttaatcgaactgaccacgcaacaggcgatgctgcaacaggctgttgttgctggtgagcgcgtgtttgaactgatggacggaccgcgccagcaatatggcaatgatgattacccgttacagagtggcaccatcgaagtcgataacgtgtcatttgcttatcgcgatgacaatctggtgctaaagaacattaatctctctgtgccttcgagtaactttgtggcgctggtcgggcataccggcagtggtaaaagtaccctcgccagtttattgatgggctattacccgctaacggaaggtgagattcgccttgatggtcgtccattaagttcgctaagtcacagcgcgctgcgccagggcgtggcaatggtgcagcaagatccggtggtgctggcggataccttcctcgccaacgtgacgctggggcgggatatctccgaagaacgcgtctggcaggcgctggaaaccgtgcaactggcggagctggcgcgtagcatgagcgacggtatttacacgccgctgggcgagcaggggaataatctctcagttgggcaaaagcaactgctggcactggcgcgcgtgctggtcgagacgccgcaaatcctgatccttgatgaggcaaccgccagcattgactccgggactgaacaggcgattcaacatgctctggcggcggtgcgtgaacataccacgctggtggtgattgctcaccgcttatcgaccattgttgatgccgacaccattctggtgcttcatcgtgggcaagccgtggagcagggcactcaccagcaactgctggctgcccagggacgctactggcagatgtatcaactgcaacttgcgggcgaagagctggcagccagcgtgcgtgaagaggaatcattgagcgcctga

SEQ ID NO: 483027 - DNA, 339 bp, Shigella sonnei; identical to SEQ ID NO: 41052

SEQ ID NO: 483028 - DNA, 1287 bp, Shigella sonnei
atgaagatagcgacgataaaaactgggcttgcttcactggcgatgctgccgggactggtaatggctgcacctgcggtggccgataaagccgacaatgcgtttatgatgatttgtactgcgctggtgctgtttatgactattccggggattgccctgttttacggtgggttgattcgcggcaaaaacgtgctgtcgatgctgacgcaggtgacggtgacgtttgcactggtctgtattctctgggtggtttacggttactcgctggcgtttggtgagggcaacaacttcttcggcaacattaactggttgatgctaaaaaacatcgaactgacggcggtgatgggcagcatttatcagtatatccacgtggcgtttcagggctcgtttgcctgcattaccgtcggcttgatcgttggggcgctggcggaacgaatccgcttctcagctgtgttgattttcgtggtggtatggctgacgctctcttacattccgattgcgcatatggtgtggggcggtggtttgctggcttctcacggtgcgctggatttcgcgggtggcacggtggtgcatattaacgccgcaatcgccggtctggtgggcgcgtatctgataggcaaacgcgtgggcttcggcaaagaggcgtttaaaccgcacaacctgccaatggtcttcaccggtactgccattctctatattggttggtttggctttaacgccgggtcagcgggcacggcgaatgaaatcgcggcactggcatttgtgaatactgtggtcgcaacggcggcggcaattcttggctggatcttcggtgaatgggcgctgcgtggtaagccttctctgctgggagcgtgttctggcgcgattgccggtctggtcggcgtgacgccagcgtgtggctacattggggttggcggcgcgttgattatcggcgtggtagctggtctggcgggcttgtggggcgttactatgctcaaacgcttgctgcgggtggatgatccctgcgatgtcttcggtgtgcacggcgtttgtggcattgtcggctgtatcatgactgggatttttgccgccagttcgctgggtggcgtgggcttcgctgaaggtgtgacgatgggccatcagttgctggtacagctggaaagcatcgccattacgatcgtctggtccggtgtggtggcatttattggctacaaactggcggatctgacggttggtctgcgtgtgccggaagaacaggagcgagaagggctggacgtcaacagccacggcgagaatgcctataacgcgtaa

SEQ ID NO: 483029 - DNA, 861 bp, Shigella sonnei
atgagtcaggcgctaaaaaatttactgacattgttaaatctggaaaaaattgaggaaggactctttcgcggccagagtgaagatttaggtttacgccaggtgtttggcggccaggtcgtgggtcaggccttgtatgctgcaaaagagaccgtccctgaagagcggctggtacattcgtttcacagctactttcttcgccctggcgatagtaagaagccgattatttatgatgtcgaaacgctgcgtgacggtaacagcttcagcgcccgccgggttgctgctattcaaaacggcaaaccgattttttatatgacggcctctttccaggcacctgaagcgggtttcgaacatcaaaaaacaatgccgtccgcgccagcgcctgatggcctgccttcggaaacacaaatcgcccaatcgctggcgcacctgctgccgccagtgctgaaagataaattcatctgcgatcgtccgctggaagtccgtccggtggagtttcataacccactgaaaggtcacgtcgcagaaccacatcgtcaggtgtggatccgcgcaaatggtagcgtgccggatgacctgcgcgttcatcagtatctgctcggttacgcttctgatcttaacttcctgccggtagctctacagccgcacggcatcggttttctcgaaccggggattcagattgccaccattgaccattccatgtggtttcatcgcccgtttaatttgaatgaatggctgctgtatagcgtggagagcacctcggcgtccagcgcacgcggctttgtgcgcggtgagttttatactcaggacggcgtgctggttgcctcgaccgttcaggaaggggtgatgcgtaatcacaattaa

SEQ ID NO: 483030 - DNA, 573 bp, Shigella sonnei
atgaaactcgtgcacatggccagttgtttagcggttgcgattgcgttggcggcttgcgcagataaaagcgcggatattcagacgccagcaccggcggcaaatacgtctatttcagcaacacaacaacctgctatccagcaaccgaatgtctccggtaccgtttggatccgtcagaaagtcgcactgccgcctgatgctgtgctgaccgtgacactttctgacgcgtcgttagccgatgcgccgtcaaaagtgctggcgcagaaagcggtgcgtaccgaaggtaaacagtcaccattcagctttgttctgccttttaacccggcagatgttcagccgaacgcgcgtattctgttgagtgcggcgattaccgtgaatgacaaactggtatttattaccgataccgttcagccggtgatcaacaagggcggaactaaagccgacctgacattggtgccgatgcagcaaaccgccgtgccggttcaggccagcggtggtgcaacgactaccgtaccttcgacttcaccaactcaggtgaatccgtcttcggcagttccagctcctacgcaatattaa

SEQ ID NO: 483031 - DNA, 312 bp, Shigella sonnei; identical to SEQ ID NO: 461379

SEQ ID NO: 483032 - DNA, 354 bp, Shigella sonnei; identical to SEQ ID NO: 461378

SEQ ID NO: 483033 - DNA, 162 bp, Shigella sonnei
atggcaaaaacactgaaactgaaaatggtagcggagggaatcgaaaccagtaaacaagaagagtggctacgccagcatggcgtgcactacggtcagggctggctctacagcaaggcattaccgaaagaagatttcttacgctgggccgagcaacatttgtga

SEQ ID NO: 483034 - DNA, 1155 bp, Shigella sonnei
gtgagaacacgacatctggtcggccttatttcgggagtactgattctttcagtattgctgcctgtcggcttaagcatctggctggcccatcagcaggtagaaacatcgtttattgaagagctggatacctattcctcccgcgtcgctattcgggccaataaggtggcgacacaagggaaagatgcgctgcaagagctggaaagatggcaaggcgctgcctgtagcgaagcccatctcatggaaatgcgtcgggtatcttacagttatcgctatattcaggaagtggtttatatcgataacaacgttccccagtgttcgtctctggagcatgaaagtccgcccgataccttccccgagccaggtaaaatttcgaaagatggttatcgtgtctggttaacatcgcataacgatttaggcattatccgttacatggtcgccatgggaacggcacattatgtcgtcatgatcgaccccgcttcctttattgatgtcattccctatagctcatggcaaattgatgccgccattattggcaatgcccataacgttgtcataaccagcagcgatgaaattgctcagggaattattaccaggctacaaaaaacacccggtgagcatatcgaaaataatggaatcatttacgatatcctgcccttcccggagatgaatatttcgatcatcacctgggcttcaacgaaaatgttgcagaaaggctggcatcggcaagtctttatttggttaccgctcgggttggtgattggcctgctggcagcgatgtttgtgctgcgtattttgcgccgtatccagtcaccgcatcatcggctgcaggatgctatcgaaaatcgtgatatttgcgtgcactatcagccgattgtctccttagccaatggcaaaattgtcggtgctgaggcactggcgcgctggccgcagacagacggtagttggttgtcaccagatagttttattccgctggcacagcaaacgggcctttctgagccattgacgctactgattataagaagcgcctttgaagatatgggcgactggctgcgtcagcatccacagcagcatatttcgatcaatcttgaatccaccgtgctcacctcggaaaaaatcccgcaattgctgcgtgaaatgatcaatcaatcaggttaa

SEQ ID NO: 483035 - DNA, 471 bp, Shigella sonnei; identical to SEQ ID NO: 458773

SEQ ID NO: 483036 - DNA, 552 bp, Shigella sonnei
atgagcacagaaaaagaaaagatgattgctggtgagttgtatcgctcggcagatgagacgttatctcgcgatcgcctgcgcgctcgtcagcttattcaccgatacaatcattccctggcggaagagcacacattacgccagcaaattctcgctgatctattcggtcaggtgacagaggcttatattgagccaacgtttcgctgtgactatggctataacatttttctcggtaataattttttcgccaacttcgattgcgtgatgcttgatgtctgccctattcgcatcggtgataactgtatgttggcaccaggcgttcatatctacacggcaacacatcccatcgaccctgtagcacgtaatagcggtgctgaactggggaaacccgtcaccatcggtaataacgtctggattggcggacgcgcggtcattaaccctggtgtgaccattggtgataacgtcgtggtagcctcaggtgcagttgtcacaaaagatgtcccggacaacgttgtcgtgggcggtaatccagccagaataattaaaaaattgtaa

SEQ ID NO: 483037 - DNA, 219 bp, Shigella sonnei
atgtccgaaaaacctttaacgaaaaccgattatttaatgcgtttacgtcgttgccagacaattgacacgctggagcgtgttatcgagaaaaataaatacgaattatcagataatgaactggcggtattttactcagccgcagatcaccgcctcgccgaattgaccatgaataaactatacgacaagatcccttcctcagtatggaaatttattcgctaa

SEQ ID NO: 483038 - DNA, 375 bp, Shigella sonnei
atggatgaatactcacccaaaagacatgatatcgcacagcttaagtttctctgtgaaaccctgtatcatgactgccttgcaaaccttgaagaaagcaatcatggctgggttaacgacccaacctcggcgatcaacctccagttgaatgaactgattgagcatattgagaccttcgcacttaattacaaaattaagtataatgaagacaataagctcattgagcagatcgacgaatatctggatgacacctttatgttgttcagtagttatggtattaatatgcaggatcttcagaaatggcggaagtcaggtaatcgactattccgttgttttgtcaatgcgacgaaagagaatcctgcgagtttatcttgttag

SEQ ID NO: 483039 - DNA, 3150 bp, Shigella sonnei
atgcctaatttctttatcgatcgcccgatttttgcgtgggtgatcgccattatcatcatgttggcaggggggctggcgatcctcaaactgccggtggcgcaatatcctacgattgcaccgccggcagtaacgatctccgcctcctaccccggcgctgatgcgaaaacagtgcaggacacggtgacacaggttatcgaacagaatatgaacggtatcgataacctgatgtacatgtcctctaacagtgactccacgggtaccgtgcagatcaccctgacctttgagtctggtactgatgcggatatcgcgcaggttcaggtgcagaacaaactgcagctggcgatgccgttgctgccgcaagaagttcagcagcaaggggtgagcgttgagaaatcatccagcagcttcctgatggttgtcggcgttatcaacaccgatggcaccatgacgcaggaggatatctctgactacgtagcggcgaatatgaaagatgccatcagccgtacgtcgggcgtgggtgatgttcagttgttcggttcacagtacgcgatgcgtatctggatgaacccgaatgagctgaacaaattccagctaacgccggttgatgtcattaccgccatcaaagcgcagaacgcccaggttgcggcgggtcagctcggtggtacgccgccggtgaaaggccaacagcttaacgcctctattattgctcagacgcgtctgacctctactgaagagttcggcaaaatcctgctgaaagtgaatcaggatggttcccgcgtactgctgcgtgatgtggcgaagattgagctgggtggtgagaactacgacatcatcgcagagtttaacggccaaccggcttccggtctggggatcaagctggcgaccggtgcaaacgcgctggataccgctgcggcaatccgtgctgaactggcgaagatggaaccgttcttcccgtcgggtctgaaaattgtttacccgtacgacaccacgccgttcgtgaaaatctctattcacgaagtggttaaaacgctggtcgaagcgatcatcctcgtgttcctggttatgtatctgttcctgcagaacttccgcgcgacgttgattccgaccattgccgtaccggtggtattgctcgggacctttgccgtccttgccgcctttggcttctcgataaacacgctaacaatgttcgggatggtgctcgccatcggcttgttggtggatgacgctatcgttgtggtagaaaacgtggagcgtgttatggcggaagaaggtttgccgccaaaagaagctacccgtaagtcgatggggcagattcagggcgctctggtcggtatcgcgatggtactgtcggcggtattcgtaccgatggccttctttggcggttctactggtgctatctatcgtcagttctctattaccattgtttcagcaatggcgctgtcggtactggtagcgttgatcctgactccggctctttgtgccaccatgctgaaaccgattgccaaaggcgatcacggggaaggtaaaaaaggcttcttcggctggtttaaccgcatgttcgagaagagcacgcaccactacaccgacagcgtaggcggtattctgcgcagtacggggcgttacctggtgctgtatctgatcatcgtggtcggcatggcctatctgttcgtgcgtctgccaagctccttcttgccagatgaggaccagggcgtatttatgaccatggttcagctgccagcaggtgcaacgcaggaacgtacgcagaaagtgctcaatgaggtaacgcattactatctgaccaaagaaaagaacaacgttgagtcggtgttcgccgttaacggcttcggctttgcgggacgtggtcagaataccggtattgcgttcgtttccttgaaggactgggccgatcgtccgggcgaagaaaacaaagttgaagcgattaccatgcgtgcaacacgcgctttctcgcaaatcaaagatgcgatggttttcgcctttaacctgcccgcaatcgtggaactgggtactgcaaccggctttgactttgagctgattgaccaggctggccttggtcacgaaaaactgactcaggcgcgtaaccagctgcttgcagaagcagcgaagcaccctgatatgctgaccagcgtacgtccaaacggtctggaagataccccgcagtttaagattgatatcgaccaggaaaaagcgcaggcgctgggtgtttctatcaacgacattaacacctctctgggcgctgcatggggcggtagctatgtgaacgactttatcgaccgcggtcgtgtgaagaaagtttacgtcatgtcagaagcgaaataccgtatgctgccggatgatatcggcgactggtatgttcgtgctgctgatggtcagatggtgccattctcggcgttctcctcttctcgttgggagtacggttcgccgcgtctggaacgttacaacggcctgccatccatggaaatcttaggccaggcggcaccgggtaaaagtaccggtgaagcaatggagctgatggaacaactggcgagcaaactgcctaccggtgttggctatgactggacggggatgtcctatcaggaacgtctctccggcaaccaggcaccttcactgtacgcgatttcgttgattgtcgtattcctgtgtctggcggcgctgtacgagagctggtcgattccgttctccgttatgctggtcgttccgctgggggttatcggtgcgttgctggctgccaccttccgtggcctgaccaatgacgtttacttccaggtaggcctgctcacaaccattgggttgtcggcgaagaacgcgatacttatcgtcgaattcgccaaagacttgatggataaagaaggtaaaggtctgattgaagcgacgcttgatgcagtgcggatgcgtttacgtccgatcctgatgacctcgctggcgtttatcctcggcgttatgccgctggttatcagtactggtgctggttccggcgcgcagaacgcagtaggtaccggtgtaatgggcgggatggtgaccgcaacggtactggcaatcttcttcgttccggtattctttgtggtggttcgccgccgctttagccgcaagaatgaagatatcgagcacagccatactgtcgatcatcattga

SEQ ID NO: 483040 - DNA, 1194 bp, Shigella sonnei
atgaacaaaaacagagggtttacgcctctggcggtcgttctgatgctctcaggcagcttagccctaacaggatgtgacgacaaacaggcccaacaaggtggccagcagatgcccgccgttggcgtagtaacagtcaaaactgaacctctgcagatcacaaccgagcttccgggtcgcaccagtgcctaccggatcgcagaagttcgtcctcaagttagcgggattatcctgaagcgtaatttcaaagaaggtagcgacatcgaagctggtgtctctctctatcagattgatcctgcgacctatcaggcgacatacgacagtgcgaaaggtgatctggcgaaagcccaggctgcagccaatatcgcgcaattgacggtgaatcgttatcagaaactgctcggtactcagtacatcagtaagcaagagtacgatcaggctctggctgatgcgcaacaggcgaatgctgcggtaactgcggcgaaagctgccgttgaaactgcgcggatcaatctggcttacaccaaagtcacctctccgattagcggtcgcattggtaagtcgaacgtgacggaaggcgcattggtacagaacggtcaggcgactgcgctggcaaccgtgcagcaacttgatccgatctaccttgatgtgacccagtccagcaacgacttcctgcgcctgaaacaggaactggcgaatggcacgctgaaacaagagaacggcaaagccaaagtgtcgctgatcaccagtgacggcattaagttcccgcaggacggtacgctggaattctctgacgttaccgttgatcagaccactgggtctatcaccctacgcgctatcttcccgaacccggatcacactctgctgccgggtatgttcgtgcgcgcacgtctggaagaagggcttaatccaaacgctattttagtcccgcaacagggcgtaacccgtacgccgcgtggtgatgccaccgtactggtagttggcgcggatgacaaagtggaaacccgtccgatcgttgcaagccaggctattggcgataagtggctggtgacagaaggtctgaaagcaggcgatcgcgtagtaataagtgggctgcagaaagtgcgtcctggtgtccaggtaaaagcacaagaagttaccgctgataataaccagcaagccgcaagcggtgctcagcctgaacagtccaagtcttaa

SEQ ID NO: 483041 - DNA, 648 bp, Shigella sonnei; identical to SEQ ID NO: 471206

SEQ ID NO: 483042 - DNA, 3363 bp, Shigella sonnei
atgactatgttccagtattacaaacgatcacggcattttgttttttcagcatttattgcttttgtttttgtcttgttatgccagaacacggcgtttgcgcgggcgtcatcgaatggtgatctgccgacaaaagcggacctgcaggcgcaacttgactcactaaataaacaaaaagatctttctgctcaggacaaactggtgcagcaggatctgacagatacattagccaccctcgataaaatcgatcgcataaaagaagagacagttcagctacggcaaaaagtcgctgaagcgccggaaaaaatgcgccaggcgaccgcggcgttaacagcacttagcgatgtcgataacgacgaagaaacgcgcaaaattctgagtacgctttcgttgcgccagctggaaactcgcgttgcccaggcgctggacgatttgcaaaacgcacaaaacgatctggcgtcttataacagccagctggtttcgttacagacgcagcccgaacgcgtgcaaaatgcgatgtataacgcttcgcagcagctgcaacaaattcgcagtcgtctggatgggactgatgtcggcgagactgccttacgtcccagccagaaagtgttaatgcaggctcagcaggcgttgctgaatgcggagattgaccagcagcgtaaaagcctggaagggaacaccgtcttgcaggataccttgcaaaagcaacgtgattacgtgacggcgaacagcgcccgtctggagcaccagttgcagctgttgcaagaagcggtaaacagcaagcgcctgactttaactgaaaaaacggcgcaggaagccgtctccccggatgaagccgcgcgtattcaggctaatccgctggtgaaacaggaactggaaattaaccagcagttaagtcagcgtctgattaccgcgactgaaaacggtaatcagttgatgcagcaaaacattaaagtcaaaaactggctggagcgggcgctgcaatcggaacgcaatattaaagagcagattgccgtcctgaagggcagcctgctgttgtctcgtatcctttaccagcaacaacaaacgctgccctcggcggatgaactggaaaacatgaccaaccgcatcgcggatttgcgtctcgaacagtttgaagttaaccagcagcgtgatgcactcttccagagcgatgcgttcgtcaacaaactggaagaaggtcacaccaacgaagtcaacagcgaagttcacgatgcgttattgcaagtggttgatatgcgtcgcgaattgctggatcaactcaacaaacagttgggtaaccagctgatgatggccattaacctgcaaatcaaccagcagcagttaatgagcgtatcgaaaaacctgaaatccatcctgactcagcaaatcttttgggtgaacagtaaccgtccaatggactgggactggatcaaagcgttcccgcaaagcctgaaagatgaatttaagtcgatgaaaatcacggtgaactgggaaaaagcttggcctgccgtttttatcgctttcctcgccggtttgccgctgctgttgattgccgggctgatccactggcgtctgggctggctgaaagcgtatcaacagaaactggcttccgctgtgggttccctgcgtaacgatagccagctcaacacaccaaaagcgatccttatcgacctgatccgcgcgctgccggtgtgcctgattattctcgcggttggcctgattctgttgaccatgcagctcaacatcagcgaactgctatggtcgttcagtaaaaaactggcgattttctggctggtgtttggcctgtgctggaaggtactggagaaaaatggcgttgccgtgcgtcacttcggcatgccggagcagcagaccagccactggcgtcggcaaattgtccgcatcagtctcgcgttgctgcctatccatttctggtctgtggtggcagaactttccccgctgcatctgatggatgatgtgctggggcaggcgatgattttcttcaacctgctgctgattgccttcctggtatggccaatgtgccgcgaaagctggcgtgataaagagtcgcacaccatgcgactggtcaccattaccgtgctgtcgattatcccgattgcattgatggtgctgactgccacgggttatttctacaccacgctgcgcctctccgggcgttggattgaaaccgtttatctggtgatcatctggaacttgctctaccagacggtattgcgcggcttaagcgtagcggcgcggcgtatcgcctggcgtcgtgcgctggcgcgtcggcagaatctggtgaaagagggcgcagaaggtgccgaaccgccggaagaacccaccattgcactggaacaggttaaccagcagacgctgcgtattaccatgttgctgatgtttgcgctgttcggtgtcatgttctgggcaatttggtccgatttgatcaccgtgttcagctatctcgacagcatcacgctctggcattacaacggcactgaagctggcgctgcggtggtgaaaaacgtcaccatgggcagtctgttgtttgcgattatcgcctcaatggtggcctgggcgttgattcgcaacctgcctggtttactggaagtgctggtgctctcgcgactgaatatgcgtcagggcgcgtcgtatgccattactaccatccttaactacatcattattgccgttggtgcgatgacggtgttcggatcgctgggcgtctcttgggataaactccagtggctggccgcagcattatccgtaggtcttggttttggtttacaagaaattttcggtaacttcgtctccggtttgatcattctgttcgaacgtccggtgcgtattggcgatacggtaaccattggtagcttctcggggacggtaagtaagatccgtattcgtgcgacaacgattaccgatttcgatcgcaaagaagtgatcatcccgaacaaagcgtttgttaccgagcgtctgatcaactggtcgttgactgacactactacgcgtctggtgatccgtctcggcgtggcctatggctccgatctggaaaaagtgcgtaaagtgttactgaaggcggcgactgagcacccaagggtgatgcacgaaccaatgccggaagtcttctttacggcgtttggtgccagcacgttggatcatgagctgcgtctgtatgtgcgtgaactgcgtgaccgtagtcgtactgtcgatgagctgaaccgtactatcgatcagctgtgccgtgaaaacgacatcaacattgcctttaaccagcttgaagtgcatctgcacaacgagaagggcgatgaggtgacggaagtcaaacgcgactacaaaggcgatgacccgacgccagcggtagggtaa

SEQ ID NO: 483043 - DNA, 162 bp, Shigella sonnei
atgtcacttgaaaatgcccctgacgatgtcaaactggctgtcgatttgattgtgctgctggaagaaaatcagatcccagcccgcaccgtgctgcgcgcgctggatattgtaaaacgcgattatgaaaagaaattaacgcgcgatgatgaggcggaaaagtga

SEQ ID NO: 483044 - DNA, 528 bp, Shigella sonnei
gtgaaaaccgccctgctgctggaaaaactggaaggacagctcgctacgctgcgtcagcgttgtgccccggtgtcacagttcgccacgctaagtgctcgtttcgacaggcatctttttcagactcgtgcgacaacactacaggcttgtctcgacgaggcgggcgataatctggctgcgctttgtcatgcggttgagcagcaacagctgccgcaagtggcctggctggcggaacatctggcggcacaactggaagccatcgcgcgtgaagcctccgcctggtcattgcgcgagtgggacagtgcgccaccgaaaattgcccgctggcagcgtaaacgtattcagcatcaggattttgagcggcggctacgtgagatggttgccgaacgcagagcccgcctggcgcgggtgaccgatctcgtggaacagcaaacgctgcatcgtgaagtggaagcctatgaagcgcgcctggcacgctgccgccatgcgctggaaaaaatcgaaaacaggctagcgcgcttaacccgctag

SEQ ID NO: 483045 - DNA, 378 bp, Shigella sonnei; identical to SEQ ID NO: 462229

SEQ ID NO: 483046 - DNA, 552 bp, Shigella sonnei; identical to SEQ ID NO: 458783

SEQ ID NO: 483047 - DNA, 1926 bp, Shigella sonnei
atgagttatcaggtcttagcccgaaaatggcgcccacaaacctttgctgacgtcgtcggccaggaacatgtgctgaccgcactggcgaacggcttgtcgttagggcgtattcatcatgcttatcttttttccggcacccgtggcgtcggaaaaacctctatcgcccgactgctggcgaaggggctaaactgcgaaaccggcattaccgcgacgccgtgcggcgtgtgcgataactgtcgtgaaatcgagcaggggcgctttgtcgatctgattgaaatcgacgccgcctcgcgcaccaaagttgaagatacccgcgacctgctggataacgtccagtacgctccggcgcgtggtcgtttcaaagtttatctgatcgacgaagtgcatatgctgtcgcgccacagctttaacgcactgttaaaaacccttgaagagccgccggagcacgttaagtttctgctggcgacgaccgatccacagaaattgccggtgacgattttgtcgcgctgtttgcaatttcatctcaaggcgctggatgtcgagcaaattcgccatcaacttgagcacatcctcaacgaagaacatatcgctcacgagccgcgggcgttgcaattgctggcgcgcgccgctgaaggcagcctgcgagatgccttaagtctgaccgaccaggcgattgccagcggtgacggccaggtttcaacccaggcagtcagtgcgatgctgggtacgcttgatgacgatcaggcgctgtcgctggttgaagcgatggtcgaggccaacggcgagcgcgtaatggcgctgattaatgaagccgctgcccgtggtatcgagtgggaagcgttgctggtggaaatgctcggcctgttgcatcgtattgcgatggtacaactttcgcctgctgcacttggcaacgacatggccgccattgagctgcggatgcgtgaactggcgcgcaccataccgccgacggatattcagctttactatcagacgctgttgattggtcgcaaagaattaccgtatgcgccggaccgccgcatgggcgttgagatgacgctgctgcgcgcgctggcgttccatccgcgtatgccgctgcctgagccagaagtgccacgccagtcctttgcacccgtcgtgccaacggcagtaatgacgccaacccaggtgccgccgcaatcagcgccgcagcaggcaccgactgtaccgctcccggaaaccaccagccaggtgctggcggcgcgccagcagttgcagtgcgtgcagggagcaaccaaagcaaaaaagagtgaatcggcagccgctacccgcgcgcggccggtgaataacgctgcgctggaaagactggcttcggtcaccgatcgcgttcaggcgcgtccggtgccatcggcgctggaaaaagcgtcagccaaaaaagaagcgtatcgctggaaggcgaccactccggtgatgcagcaaaaagaagtggtcgccacgccgaaggcgctgaaaaaagcgctggaacatgaaaaaacgccggaactggcggcgaagctagcggcagaagccattgagcgcgacccgtgggcggcacaggtgagccaactttcgctaccaaaactggtcgaacaggtggcgttaaatgcctggaaagaggagagcgacaacgcagtatgtctgcatttgcgctcctctcagcggcatttgaacaaccgcggtgcacagcaaaaactggctgaagcgttgagcatgttaaaaggttcaacggttgaactgactatcgttgaagatgataatcccgcggtgcgtacgccgctggagtggcgtcaggcgatatacgaagaaaaacttgcgcaggcgcgcgagtccattattgcggataataatattcagaccctgcgtcggtttttcgatgcggagctggatgaagaaagtatccgccccatttga

SEQ ID NO: 483048 - DNA, 330 bp, Shigella sonnei; identical to SEQ ID NO: 458785

SEQ ID NO: 483049 - DNA, 606 bp, Shigella sonnei
atgcaaaccagcccgctgttaacacagcttatggaagcactgcgctgtctgccgggcgttggcccgaagtcggcgcagcgtatggcgttcacgctgcttcagcgcgatcgtagcggcgggatgcgtttggcgcaggcgctcacccgggcgatgtcggaaatcggccactgcgccgattgccgcactttcaccgaacaggaagtctgtaacatctgttcgaatccgcgtcgtcaggaaaacggtcaaatctgtgtggtggagagtccggcggacatctacgccattgagcagacggggcagttttctggtcgttattttgtgttgatggggcatctgtcaccgctggacggcatcggtccggatgatatcgggcttgatcgtctggaacagcgtctggcagaggaaaaaatcactgaagtgatcctcgccaccaatcccacggttgaaggtgaagctaccgctaactacattgccgagctttgcgcgcaatatgacgtggaagccagccgaatcgctcatggcgtaccggttggcggcgaactggaaatggtcgatggcaccacgctgtcacactcccttgccgggcgtcataagattcgtttttaa

SEQ ID NO: 483050 - DNA, 1875 bp, Shigella sonnei
atgaaaggacaagaaactcgtggttttcagtcagaagtgaaacagcttctgcacctgatgatccattctctctattccaataaagaaatcttcctgcgtgagcttatctctaacgcctccgatgcggcggacaagctgcgtttccgtgcgctatctaacccggacctgtacgaaggtgatggcgaactgcgcgttcgtgtctctttcgataaagacaagcgcacgctgaccatctctgataacggcgtggggatgacccgcgacgaagtgattgaccatctggggactatcgctaaatccggtaccaaatcattcctcgaatccctgggttctgaccaggcgaaagacagccagctgatcggtcagtttggtgttggtttctactctgcgtttatcgtggccgacaaagtgaccgtgcgtactcgcgcggcaggcgaaaaaccagaaaacggcgtcttctgggaatcggctggcgaaggtgaatataccgttgccgacatcaccaaagaagatcgtggtactgaaatcaccctgcatctgcgtgaaggcgaagacgagttcctcgatgactggcgcgtgcgttccatcatcagcaaatactccgaccatatcgcgctgccggtagagatcgaaaaacgcgaagagaaagacggcgaaaccgttatctcctgggagaaaatcaacaaagcgcaggcgctgtggactcgtaacaagtcggaaatcaccgatgaagagtacaaagagttctacaaacacatcgcccacgactttaatgatccgctgacctggagccacaaccgcgttgaaggtaagcaggagtacaccagcctgctgtacattccgtcccaggctccgtgggatatgtggaaccgtgatcataaacacggcctgaaactgtacgtccagcgtgtgttcatcatggacgacgcagaacagttcatgccgaactatctgcgcttcgtgcgtggtctgattgactccagcgatctgccgctgaacgtttcccgtgaaatcctccaggacagcacggtaacgcgtaacctgcgcaatgcgctgaccaagcgtgtgctgcaaatgctggaaaaactggcgaaagacgacgcggaaaaataccagaccttctggcaacagtttggcctggtactgaaagaaggtccggcggaagatttcgctaaccaggaagcgatcgccaaactgctgcgttttgcttctacccataccgattcttctgcgcagaccgtatctctggaagactacgtttcccgcatgaaagaagggcaggagaaaatctactacatcaccgcagacagctatgcggcagcgaagagcagcccgcacctggaactgctgcgtaagaaaggcatcgaagttctgctgctttccgaccgcatcgatgagtggatgatgaactatctgactgagttcgacggtaaaccgttccagtcggtgtctaaagttgacgagtcgctggaaaaactggctgacgaagttgatgagagcgcgaaagaagcggagaaagcactgactccgttcatcgaccgtgtgaaagccctgctcggcgagcgcgtgaaagatgtccgtctgactcaccgtctgaccgatacgccagcgatcgtttcgaccgacgcggacgaaatgagcactcagatggcgaaactgttcgctgcggcgggccagaaagtgccagaagtgaaatacatcttcgaactgaacccggatcacgtactggtgaaacgtgcggcagatactgaagatgaagcgaagttcagcgagtgggtagaactgctgctggatcaggcgctgctggcagaacgcggcacgctggaagatccgaacctgtttattcgtcgtatgaaccagctgctggtttcctga

SEQ ID NO: 483051 - DNA, 645 bp, Shigella sonnei
atgcgtatcattctgcttggcgctccgggcgcggggaaagggactcaggctcagttcatcatggagaaatatggtattccgcaaatctccactggcgatatgctgcgtgctgcggtcaaatctggctccgagctgggtaaacaagcaaaagacattatggatgctggcaaactggtcaccgacgaactggtgatcgcgctggttaaagagcgcattgctcaggaagactgccgtaatggtttcctgttggacggcttcccgcgtaccattccgcaggcagacgcgatgaaagaagcgggcatcaatgttgattacgttctggaattcgacgtaccggacgaactgattgttgatcgtatcgtaggccgccgcgttcatgcgccgtctggtcgtgtttatcacgttaaattcaatccgccgaaagtagaaggcaaagacgacgttaccggtgaagaactgactacccgtaaagacgatcaggaagaaaccgtgcgtaaacgtctggttgaataccatcagatgactgcaccgctgatcggctactacttcaaagaagcggaagcgggtaacaccaaatacgcgaaagttgacggcaccaagtcggttgctgaagttcgcgctgatctggaaaaaatcctcggctaa

SEQ ID NO: 483052 - DNA, 963 bp, Shigella sonnei
atgcgtcagactaaaatcggtatcctgctggcaaacctgggtacgcccgatgcccccacacctgaagcggtaaaacgctatctgaaacaatttttaagcgacagacgcgtggttgatacctcacggttgttatggtggccattgctgcgcggcgttattttgccgctgcgctcgccgcgtgtggcgaagctgtacgcctcggtctggatggaaggtggctcgccgctgatggtttacagccgccagcaacagcaggcgctggcacaacgtttaccggagacgcccgtagcgctgggaatgagctacggctcgccatcactggaaagcgccgtcgatgaactcctggcagagcatgtagatcatattgtggtgctgccgctttatccgcaattctcctgttctacggtcggtgcggtatgggatgaactggcacgcattctggcgcgcaaacgtagcattccggggatatcgtttattcgtgattacgccgataaccacgattacattaatgcactggcgaacagcgtacgcgcttcttttgccaaacatggcgaaccggatctgctgctgctctcttatcatggcattccccagcgttatgcagatgaaggcgatgattacccgcaacgttgccgcacaacgactcgcgaactggcttccgcactggggatggcaccggaaaaagtgatgatgacctttcagtcgcgctttggccgggaaccctggctgatgccttataccgacgaaacgctgaaaatgctcggagaaaaaggcgtaggtcatatacaggtgatgtgcccgggctttgctgcggattgtctggagacgctggaagagattgccgagcaaaaccgtgaggtcttcctcggtgcgggcgggaaaaaatatgaatatattccagcgcttaatgccacgccggaacatatcgaaatgatggctaatcttgttgccgcgtatcgctaa

SEQ ID NO: 483053 - DNA, 960 bp, Shigella sonnei
atgaagccggaaaacaaactacctgttctggaccttatttctgctgaaatgaagaccgttgtgaatactcttcagccggatttaccgtcctggcccgcaacgggaacgattgctgagcaacgacagtattacacgcttgagcgccgattctggaatgcgggcgctccagaaatggcaaccagagcttacatggttccaacaaaatatgggcaggtggaaacacgtctcttttgtccgcagccagatagcccggcgacgctattttatttgcatggaggcggttttattctcggcaatctcgatacccacgatcgcatcatgcgcctgctggcaagctacagccaatgtacggtgattggtattgattacaccctttcacctgaagcgcgttttccgcaagcgatagaggaaattgtggctgcttgttgttatttccaccagcaggcggaggattatcaaatcaatatgtcccgcattggctttgccggtgattccgcaggtgccatgctggcgctcgccagtgcgttgtggttgcgtgataaacagatcgattgcggtaaaattgcgggtgttttgctgtggtatgggctttacggattacgggattccgtgactcgtcgtctgttgggcggtgtctgggatggcttaacgcaacaggatttgcagatgtatgaagaggcgtatttaagcaacgacgcggaccgcgagtcaccgtattactgtctgtttaataatgatctcactcgcgaagttccgccctgttttattgccggggcggagttcgatccgctgctggatgacagccgtctgctttaccagacgttagcggcgcatcagcagccctgtgagttcaaactctacccaggtacgctgcatgcctttttgcattattcacggatgatgaaaaccgccgacgaggctcttcgcgacggcgctcagttctttaccgctcagctttag

SEQ ID NO: 483054 - DNA, 1305 bp, Shigella sonnei
atgaaatttcccggtaaacgtaaatccaaacattacttccctgtaaatgcacgcgatccgctgcttcagcaattccagccagaaaacgaaaccagcgccgcctgggtcgtaggtattgaccagacgctggtcgatattgaagcgaaagtggatgatgaattcattgagcgttatggattaagcgccgggcattcactggtgattgaggatgacgtagccgaagcgctttatcaggagctaaaacagaaaaacctgattacccatcagtttgcgggtggcaccattggtaacaccatgcacaactactcggtgctcgcggacgaccgttcggtgctgctgggcgtcatgtgcagcaatattgaaattggcagttatgcctatcgttacctgtgtaacacttccagccgtaccgatcttaactatctacaaggcgtggatggcccgattggtcgttgctttacgctgattggcgagtccggggaacgtacctttgctatcagtccaggccacatgaaccagctgcgggctgaaagcattccggaagatgtgattgccggagcctcggcactggttctcacctcttatctggtgcgttgcaaaccgggtgaacccatgccggaagcaaccatgaaagccattgagtacgcgaagaaatataacgtaccggtggtgctgacgctgggcaccaagtttgtcattgccgagaatccgcagtggtggcagcaattcctcaaagatcacgtctctatccttgcgatgaacgaagatgaagccgaagcgttgaccggagaaagcgatccgttgttggcatctgacaaggcgctggactgggtagatctggtgctgtgcaccgccgggccaatcggcttgtatatggcgggctttaccgaagacgaagcgaaacgtaaaacccagcatccgctgctgccgggcgctatagcggaattcaaccagtatgagtttagccgcgccatgcgccacaaggattgccagaatccgctgcgtgtctattcgcacattgcgccgtacatgggcgggccggaaaaaatcatgaacactaatggagcgggggatggcgcattggcagcgttgctgcatgacattaccgccaacagctaccatcgtagcaacgtaccaaactccagcaaacataaattcacctggttaacttattcatcgttagcgcaggtgtgtaaatatgctaaccgtgtgagctatcaggtactgaaccagcattcacctcgtttaacgcgcggcttgccggagcgtgaagacagcctggaagagtcttactgggatcgttaa

SEQ ID NO: 483055 - DNA, 1677 bp, Shigella sonnei
atgcatcacgccaccccgcttatcaccaccattgttggcggccttgtgctcgcctttatcctcggcatgctggccaataaactacgtatttctcctctggtgggatatctgttagcgggtgtgctggcaggaccattcactccgggctttgttgccgataccaagcttgcgccggaactggctgaactgggcgtcattctgttgatgtttggcgtcggtttgcacttttcgctgaaggatttgatggcggtaaaggccatcgccattcccggtgcgatcgcccagatagccgtggcgacgctgctgggtatggcgctctctgccgtgctgggctggtcgttaatgaccggtatcgtgttcggtttatgtctttccaccgccagtaccgtggtgttactgcgcgcacttgaagaacggcaattaattgacagtcagcgtgggcaaatcgccatcggttggttgattgtggaagacctggtaatggttctgacgctggtgttgctgcccgcagtggcaggaatgatggaacagggcgatgtgggctttgccactcttgcagtcgatatggggatcaccatcggcaaagtgatcgcatttatcgccattatgatgctggtaggtcgccgtctggtgccgtggattatggcacgcagcgcggcaaccggttctcgcgagctatttaccctgtcggtgctggcgctggcgttagggattgcctttggtgcggtggagttgtttgacgtctccttcgcacttggcgcgttctttgccgggatggtactgaacgagtctgaactgagtcaccgtgccgcccacgatacgctgccattgcgcgacgcgtttgcggtgctgttttttgtctccgtcgggatgttgtttgatccgttaattctgattcagcaaccgctggcagtgctggcgacgctggcaattattctgtttggtaaatcggtcgcggccctgttccttgtccgtctgtttggtcactcccaacgtacggcattaaccatcgccgccagcctggcgcagattggtgagttcgcgtttatcctggcgggactgggaatggcattgaatttactgccgcaggccggacaaaacctggtactggcaggggcgatcctgtcgattatgctcaacccggtactgttcgcactactggagaaatatctggcgaagaccgaaacgctggaagagcagacgctggaagaggcaatcgaagaagagaaacagatcccagtggatatttgcaaccatgcgctattggtgggttacggtcgtgtaggcagcctgctgggggagaaattgctcgcctctgatattccgctggtggtgattgagacgtcacgaacccgtgttgatgagctgcgagagcgtggggtccgcgctgtattgggcaatgcagcgaacgaagaaattatgcaactggcgcatctggaatgtgcaaaatggctgatcctgacgatccccaacggttatgaagcgggtgagattgtggcgtctgcccgcgcgaaaaacccggatattgagattatcgcccgcgcccattatgacgatgaagtgacgtatatcaccgaacgtggcgcgaatcaggtagtgatgggtgaacgtgaaattgcccgtactatgctggaactgctggaaacgccaccggcgggtgaagtggtgacggggtaa

SEQ ID NO: 483056 - DNA, 429 bp, Shigella sonnei
atgttacgtgaagtctcaattagtaatgatactataagtgtaaaattctacagaaatgaaaaaatagaatgcgcttgtaattttctgatggataaagatgcgcaggggtatatcgacctgtctgattttgatttaataaattgtcattttaaaggtgacgttatttctaaggtgtcttttttatcatcaaatctacaacatgtaactttcgaatgtaaagaaattgagaattgcaattttactaaggcaacagttgataatgtcatatttaaatgtcgacgtttacacaatgtgatttttctcaaaacgagtggcgaatgtgttgattttagccaaaatattcttgatacagttgacttctcgcagagtcaacttggtcatagtaatttatatgaacgcatcccgtttgcaaggcatccattgttttga

SEQ ID NO: 483057 - DNA, 195 bp, Shigella sonnei
atgataggtcatatcacaaattctggcggcaataactctttgatgaaacatgatgtggttcaaggaaataatatagtagatcttgatttactacgtaatttcaatggggtgacaggtttaaacagagataactttatttatatcagtgatatatttttaaatataaagcaacggaacgaaaaaatcatgcaataa

SEQ ID NO: 483058 - DNA, 153 bp, Shigella sonnei; identical to SEQ ID NO: 466720

SEQ ID NO: 483059 - DNA, 921 bp, Shigella sonnei
atgaaaatgaataaaagtctcatcgccctctgtttatcagcagggttactggcaagcgcgcctggaattagccttgccgatgttaactacgtaccgcaaaacaccagcgacgcgccagccattccatctgccgcgctgcaacaactcacctggacaccggtcgatcaatctaaaacccagaccacccaactggcgaccggcggccaacaactgaacgttcccggcatcagtggtccggttgctgcgtacagcgtcccggcaaacattggcgaactgaccctgacgctgaccagcgaagtgaacaaacaaaccagcgtttttgcgccgaacgtgctgattcttgatcagaacatgaccccatcagccttcttccccagcagttatttcacctaccaggaaccaggcgtgatgagtgcagatcggctggaaggcgttatgcgcctgacaccggcgttggggcagcaaaaactttatgttctggtctttaccacggaaaaagatctccagcagacgacccaactgctcgacccggctaaagcctatgccaaaggcgtcggtaactcgatcccggatattcccgatccggttgctcgtcataccagcgatggcttactgaaactgaaagtcaaaacgaactccagctccagcgtgttggtaggaccactatttggttcttccgctccagctccggttacggtaggcaacacggcggcaccagctgtggctgcacctgctccggtgccggtgaagaaaagcgagccgatgctcaacgacacggaaagttattttaataccgcgatcaaaaacgctgtcgcgaaaggtgatgttgataaggcgttaaaactgcttgatgaagctgaacgcctgggatcgacatctgcccgttccacctttatcagcagtgtaaaaggcaaggggtaa

SEQ ID NO: 483060 - DNA, 1341 bp, Shigella sonnei
atgatgattactctgcgcaaacttcctctggcggttgccgtcgcagcgggcgtaatgtctgctcaggcaatggctgttgatttccacggctatgcacgttccggtattggctggacaggtagcggcggtgaacaacagtgtttccagactaccggtgctcaaagtaaataccgtcttggcaacgaatgtgaaacttatgctgaattaaaattgggtcaggaagtgtggaaagagggcgataagagcttctatttcgacactaacgtggcctattccgtcgcgcaacagaatgactgggaagctaccgatccggccttccgtgaagcaaacgtgcagggtaaaaacctgatcgaatggctgccaggttccaccatctgggcaggtaagcgcttctaccaacgtcatgacgttcatatgatcgacttctactactgggatatttctggtcctggtgccggtctggaaaacatcgatgttggcttcggtaaactctctctggcagcaacccgctcctctgaagctggtggttcttcctcttttgccagcaacaatatttatgactataccaacgaaaccgcgaacgacgttttcgatgtgcgtttagcgcagatggaaatcaacccgggcggcacattagaactgggtgtcgactacggtcgtgccaacctgcgtgataactatcgtctggttgatggcgcatcgaaagacggctggttattcactgctgaacatactcagagtgtcctgaagggctttaacaagtttgttgttcagtacgctactgactcgatgacctcgcagggtaaaggtctgtcgcagggttctggcgtcgcgtttgataacgaaaaatttgcctacaatatcaacaacaacggtcacatgctgcgtatcctcgaccacggtgcgatctccatgggcgacaactgggacatgatgtacgtgggtatgtaccaggatatcaactgggataacgacaacggcaccaagtggtggaccgtcggtattcgcccgatgtacaagtggacgccaatcatgagcaccgtgatggaaatcggctacgacaacgtcgaatcccagcgcaccggcgacaagaacaatcagtacaaaattaccctcgcacaacaatggcaggctggcgacagcatctggtcacgcccggctattcgtgtcttcgcaacctacgccaagtgggatgagaaatggggttacgactacaacggcgatagcaaggttaacccgaactacggcaaagccgttcctgctgatttcaacggcggcagcttcggtcgtggcgacagcgacgagtggaccttcggtgcccagatggaaatctggtggtaa

SEQ ID NO: 483061 - DNA, 1116 bp, Shigella sonnei
atggcgagcgtacagctgcaaaatgtaacgaaagcctggggcgaggtcgtggtatcgaaagatatcaatctcgatatccatgaaggtgaattcgtggtgtttgtcggaccgtctggctgcggtaaatcgactttactgcgcatgattgccgggcttgagacgatcaccagcggcgacctgttcatcggtgagaaacggatgaatgacactccgccagcagaacgcggcgttggtatggtgtttcagtcttacgcgctctatccccacctgtcagtagcagaaaacatgtcatttggcctgaaactggctggcgcaaaaaaagaggtgattaaccaacgcgtcaaccaggtggcggaagtgctgcaactggcgcatttgctggatcgcaaaccgaaagcgctctccggtggtcagcgtcagcgtgtggcgattggccgtacgctggtggccgagccaagcgtatttttgctcgatgaaccgctctccaacctcgatgctgcactgcgtgtgcaaatgcgtatcgaaatctcccgtctgcataaacgcctgggccgcacaatgatttacgtcacccacgatcaggtcgaagcgatgacgctggccgacaaaatcgtggtgctggacgccggtcgcgtggcgcaggttgggaaaccgctggagctgtaccactatccggcagaccgttttgtcgccggatttatcggttcgccaaagatgaacttcctgccggtaaaagtgaccgccaccgcaatcgatcaagtgcaggtggagctgccgatgccaaatcgtcagcaagtctggctgccagttgaaagccgtgatgtccaggttggagccaatatgtcgctgggtattcgcccggaacatctactgccgagtgatatcgctgacgtcatccttgagggtgaagttcaggtcgtcgagcaactcggcaacgaaacccaaatccatatccagatcccttccattcgtcaaaacctggtgtaccgccagaacgacgtggtgttggtagaagaaggtgccacattcgctatcggcctgccgccagagcgttgccatctgttccgtgaggatggcactgcatgtcgtcgactgcataaggagccgggcgtttaa

SEQ ID NO: 483062 - DNA, 1191 bp, Shigella sonnei
atgaaaataaaaacaggtgcacgcatcctcgcattatccgcattaacgacgatgatgttttccgcctcggctctcgccaaaatcgaagaaggtaaactggtaatctggattaacggcgataaaggctataacggtctcgctgaagtcggtaagaaattcgagaaagataccggaattaaagtcaccgttgagcatccggataaactggaagagaaattccctcaggttgcggcaactggcgatggccctgacattatcttctgggcgcacgaccgttttggtggctacgctcaatctggcctgttggctgaaatcaccccggacaaagcgttccaggacaagctgtatccgtttacctgggatgccgtacgttacaacggcaagctgattgcttacccgatcgctgttgaagcgttatcgctgatttataacaaagatctgctgccgaacccaccaaaaacctgggaagagatcccggcgctggataaagaactgaaagcgaaaggtaagagcgcgctgatgttcaacctgcaagaaccgtacttcacctggccgctgattgctgctgacgggggttatgcgttcaagtatgaaaacggcaagtacgatattaaagacgtggccgtggataacgctggcgcgaaagcgggtctgaccttcctggttgaccttattaaaaacaaacacatgaatgcagacaccgattactccatcgcagaagctgcctttaataaaggcgaaacagcgatgaccatcaacggcccgtgggcatggtccaacatcgacaccagcaaagtgaattatggtgtaacggtactgccgaccttcaagggtcaaccatctaaaccgttcgttggcgtgctgagcgccggtattaacgccgccagtccgaacaaagagctggcgaaagagttcctcgaaaactatctgctgactgacgaaggtctggaagcggtcaataaagacaaaccgctgggtgcagtggcgctgaagtcttacgaggaagagttggcgaaagatccacgtattgccgccaccatggaaaacgcccagaaaggtgaaatcatgccgaacatcccgcagatgtccgctttctggtatgccgtgcgtactgcggtgatcaacgccgccagcggtcgtcagactgtcgatgaagccctgaaagacgcgcagactcgtatcaccaagtaa

SEQ ID NO: 483063 - DNA, 1545 bp, Shigella sonnei
atggatgtcattaaaaagaaacattggtggcaaagcgacgcgctgaaatggtcagtgctaggtctgctcggcctgctggtgggttaccttgttgttttaatgtacgcacaaggggaatacctgttcgccattaccacgctgatattgagttcagcggggctgtatattttcgccaatcgtaaagcctacgcctggcgctatgtttacccgggaatggctggaatgggattattcgtcctcttccctctggtctgcaccatcgccattgccttcaccaactacagcagcactaaccagctgacttttgaatgtgcgcaggaagtgttgttagatcgctcctggcaagcaggcaaaacctataactttggtctttacccggcgggcgatgagtggcaactggcgctcagtgacggcgaaatcggcaaaaattacctctccgacgcgtttaaatttggcggcgaacaaaaactgcaactgaaagaaacgaccgcccagcccgaaggcgaacgcgcgaatctacgcgtgattacccagaatcgtcaggcgctgagtgacattaccgccattctgccggatggcaacaaagtgatgatgagctccctgcgccagttttctggcacgcagccgctctacacactcgacggtgacggcacgttgacgaataatcagagcggcgtgaaatatcgtccgaataaccaaattggcttttaccagtccattaccgccgacggcaactggggtgatgaaaagctaagccccggttacaccgtgactactggctggaaaaactttacccgcgtcttcaccgacgaaggcattcagaaaccgttcctcgccattttcgtctggaccgtggtgttctcgctgatcactgtctttttaacggtggcggtcggcatggttctggcatgtctggtgcagtgggaagcattgcgcggcaaagcggtctatcgcgttctgctgattctgccctacgcggtgccatcattcatttcaatcttgattttcaaagggttgtttaaccagagcttcggtgaaatcaacatgatgttgagcgcgctgtttggcgtgaagcccgcctggttcagcgatccgaccaccgcccgcacgatgctaattatcgtcaatacctggctgggttatccgtacatgatgatcctctgcatgggcttgctgaaagcgattccggacgatttgtatgaagcctcagcaatggatggcgcagatccgttccagaacttctttaagattacgctgccgctgctgattaaaccgctgacgccgctgatgatcgccagcttcgcctttaactttaacaacttcgtgctgattcaactgttaaccaacggcggcccggatcgtcttggcacgaccacgccagccggttataccgacctgcttgttaactacacctaccgtatcgcttttgaaggcggcgggggtcaggacttcggtctggctgcagcaattgccacgctgctcttcctgctggtgggtgcgctggcgatagtgaacctgaaagccacgcgaatgaagtttgattaa

SEQ ID NO: 483064 - DNA, 891 bp, Shigella sonnei
atggcaatggtccaaccgaaatcgcaaaaagcacgtttgtttattactcacctgctactgctactttttatcgcggcgattatgttcccgctgctgatggtcgtcgctatctcactgcgccaggggaactttgcgatcggcagcctgatcccggagcaaatctcctgggatcactggaaactggctttaggttttagcgtggaacaggctgatggtcgcattacgccaccgccattcccggtactgctgtggctatggaactcggtaaaggtcgccgggatttccgcgattggcattgtcgcgctctctaccacctgcgcctacgctttcgcccgtatgcgctttccaggcaaagcgacgctgctgaaaggaatgctgattttccagatgttcccggcagtactttcactggtcgcgttgtatgcgttgtttgatcgtctgggtgagtacattccattcattggcctgaatactcacggcggcgtaattttcgcgtatctgggtgggattgcgctgcatgtctggaccatcaaaggctatttcgaaaccatcgatagttcgctggaagaagcggctgcgctggatggtgcgacaccgtggcaggccttccgccttgtcctgttgccgctgtcagtaccgattctggcggtggtattcatcctgtcgtttatcgctgccattactgaagttccggtcgcgtcgctgttactgcgtgacgtaaacagctacaccctggccgtggggatgcagcaatacctcaacccgcaaaactacctgtggggtgactttgccgccgctgccgtgatgtctgcattaccgatcaccatcgtcttcttgctggctcaacgctggctggtcaacggcctgacggcaggtggtgtgaaaggttaa

SEQ ID NO: 483065 - DNA, 1476 bp, Shigella sonnei
atgaatacccagtataattccagttatatattttcgattaccttagtcgctacattaggtggtttattatttggctacgacaccgccgttatttccggtactgttgagtcactcaataccgtctttgttgctccacaaaacttaagtgaatccgctgccaactccctgttaggattttgcgtagccagcgctctgattggttgcatcatcggcggtgccctcggtggttattgcagtaaccgcttcggccgtcgtgattcacttaagattgctgctgtcctgttttttatttctggtgtaggttctgcctggccagaacttggttttacctctataaacccggacaacacagtacctatttatctggcaggttatgtcccggaatttgttatttatcgtattattggcggtattggcgttggtttagcctcaatgctttcaccaatgtatattgcggaactggctccagctcatattcgcggaaaactggtttcatttaaccagtttgcgattattttcgggcaacttttagtttactgcgtaaactattttattgcccgttccggtgatgccagctggctgaatactgacggctggcgttatatgtttgcctcggaatgtatccctgcactgctgttcttaatgctgctgtataccgtgccagaaagtcctcgctggctgatgtcacgcggcaagcaagaacaggcggaaagtatcctgcgcaaaattatgggcaacacgcttgcaactcaggcagtacaggaaattaaacactccctggatcatggccgcaaaaccggtggtcgtctgctgatgtttggcgtgggcgtgattgtcatcggcgttatgctctccatcttccagcaatttgtcggcatcaatgtggtgctgtactacgcgccggaagtgttcaaaacgctgggggccagcacggatatcgcgctgttgcagaccattattgtcggagttatcaacctcaccttcaccgttctggcaattatgacggtggataaatttggtcgtaagccactgcaaattatcggcgcactcggaatggcaatcggtatgtttagcctcggtaccgcgttttacactcaggcaccgggtattgtggcgctactgtcgatgctgttctatgttgctgcctttgccatgtcctggggtccggtatgctgggtaccgctgtcggaaatcttcccgaatgctattcgtggtaaagcgctggcaatcgcggtggcggcccagtggctggcgaactacttcgtctcctggaccttcccgatgatggacaaaaactcctggctggtggcccatttccacaacggtttctcctactggatttacgggtgtatgggcgttctggcagcactatttatgtggaaatttgtcccggaaaccaaaggtaaaacccttgaggagctggaagccctctgggaaccggaaacgaagaaaacacaacaaactgctacgctgtaa

SEQ ID NO: 483066 - DNA, 411 bp, Shigella sonnei
atgacgtcactctctcgtccgcgcgtggagtttatctccaccattttgcagaccgtactcaatcttggcctgctgtgcctcggcctgattttggttgtcttcctcggcaaagaaacggtgcatctggcagatgtgctgttcgcgccagaacaaaccagcaaatatgagctggtagaaggactggtggtttactttctctatttcgaatttatcgcgctgattgtgaagtactttcagtccggttttcacttcccgctacgttactttgtctatattgggatcaccgccattgtgcgcttgatcatcgtcgatcataaatcgccactggatgtgttgatctactcggctgcgatcctgttactggtgatcactctgtggctgtgtaattcgaaacggctgaagcgggagtaa

SEQ ID NO: 483067 - DNA, 2097 bp, Shigella sonnei
atgaaaaaaagacatctgcttagcttactggcgctgggcattagcacagcttgctacggcgaaacatatcctgcgcccattggtccgtcgcagtcggatttcggtggcgtaggattattacaaactcccaccgcgcgtatggcacgggaaggggagttgagtctgaactatcgcgataacgatcagtaccgttattactcagcttcagtgcaactcttcccgtggctggaaacaacgctgcgttacaccgacgtgcgcacccggcagtacagcagcgtcgaagcgttctctggcgatcaaacgtataaagataaagccttcgatctcaaactgcgtttgtgggaagagagttactggctgccgcaagtggcggttggtgcgcgggatatcggcggtacggggctgtttgatgcggaatatcttgttgccagcaaagcctgggggccgttcgattttacgctcggcctgggctggggatatctgggcaccagcggtaatgtgaaaaatccgctctgttcagccagtgataaatattgctatcgcgataacagctacaaacaagcgggatctatcgacggcagtcagatgttccacggcccggcctcactgtttggcggcgtggaataccagacgccctggcaaccgctgcgcctgaaactggagtatgaaggtaataattatcagcaggattttgccgggaagctggagcaaaaaagtaagtttaacgtcggggcgatttatcgcgttaccgattgggccgacgttaaccttagctatgaacgtggcaacacctttatgtttggcgtcacgctgcgcaccaactttaacgatctgcgcccgtcctacatcgataacgcccgcccgcaatatcaaccgcagccgcaggatgccattttgcagcactcggtggtggcgaatcagttaacgttgctgaaatacaatgccggacttgccgatccgcagatccaggcgaaaggcgatacgctgtatgttaccggcgagcaggtgaaatatcgtgattcgcgcgaagggatcatccgtgctaatcggatcgtgatgaacgatctgccggatgggatcaaaacgatccgcattacggaaaatcgccttaacatgccgcaggtgacgacggaaaccgatgtcgccagcctgaaaaatcatctcgccggagagccgttgggccacgaaacgacgctggcgcaaaaacgcgtcgagccagtggttccgcagtccaccgagcagggctggtatatcgacaaatcacgctttgatttccatatcgatccggtgctgaaccagtcggtcggtggcccggaaaacttttacatgtatcagctgggcgtgatgggaacggcagatttgtggctgacggaccatctgctgaccatcggcagcctgtttgcaaatcttgccaacaactacgacaagtttaactacaccaatccgccacaggactcgcacttaccgcgcgttcgtacccatgtgcgcgagtatgtgcagaacgatgcctatgtgaataacctgcaagccaactacttccagcatctgggcaacggcttctacggtcaggtctatggaggttatctcgaaaccatgtttggcggtgcgggggctgaagtgttgtatcgtccgctggacagcaactgggcgtttggtctggatgccaactacgttaaacagcgcgactggcgtagtgcaaaagatatgatgaaattcaccgactacagcgtgaaaaccggacatctgaccgcctactggacgccatctttcgcccaggacgtgttagtgaaagccagcgtcgggcagtatctggcaggggataaaggcggcacgctggagatcgccaaacgctttgatagcggcgtggtggtgggtggctatgccacgatcacgaatgtttcaaaagaggagtacggcgaaggggacttcaccaaaggcgtgtatgtctcggtaccgttggatctcttctcgtctggcccgacacgcagccgtgcggcgattggctggacgccgctgacgcgtgacggtggtcagcaacttgggcgtaagttccagttgtatgatatgaccagcgaccgtagcgtcaatttccgctaa

SEQ ID NO: 483068 - DNA, 738 bp, Shigella sonnei
atgattaaacaaactattgtcgcgttgcttttgagtgtgggagcgtcatcggtcttcgcggcaggaaccgtcaaggtgttcagcaatggcagcagtgaggccaaaacgctaacgggcgcagagcatttaatcgatctggtagggcaacctcgactggcaaacagctggtggcctggtgcggtgattagcgaagagctggcaacggcggcagcattgcgtcagcagcaggcgttgctgacacggctggcagaacagggcgcagattccagcaccgacgatgccgccgccattaacgccttacgccagcaaatccaggcattggaagtgacaggcaggcaaaaaatcaatcttgatcccgatatcgtccgcgttgccgaacgcggtaacccgccgttgcagggcaactacacgctgtgggtcggaccaccgccgtccacggtcacgttgttcgggcttatcagccatcctggcaatcagccattcactccaggtcgcgacgtggcgagctatctctctgaccagagcctgctcagcggtgcggatcgcagctacgcgtgggtcgtttacccggacggacgcacgcaaaaagcgccggtggcttactggaacaagcgtcacgtagagccgatgcccggcagcattatttatgttggcctcgcagactccgtctggagtgagacgcctgatgcccttaacgccgacattcttcagactctgacgcagcggataccccaataa

SEQ ID NO: 483069 - DNA, 639 bp, Shigella sonnei
gtgaagcgacctgcactcattcttatctgcctgttattacaggcctgttcagccacgactaaagagctgggcaattcactgtgggacagtctgttcggcacgccaggcgtacagctgacggacgatgatattcaaaatatgccctacgccagccagtacatgcagcttaatggcgggccgcaattgtttgtggtgctggccttcgctgaagacggacaacaaaaatgggtcactcaggatcaagccactcttgtcacacaacatggtcgtctggtgaagactttgcttggcggcgacaacctgattgaagtgaataaccttgccgccgacccgctgattaaacccgcacaaattgttgatggtgcaacatggacgcgcacgatgggctggaccgagtaccagcaggtacgctacgccaccgcacgctcagtcttcaaatgggatggcaccgataccgtcaaggtcggcagcgatgaaaccctggttcgcgtgctggacgaagaagtctccaccgaccaggcgcgctggcataaccgctactggatcgacagcgaagggcaaattcgccagtcggaacagtatctcggcgcggattatttcccggtgaaaaccactctcatcaaggcggcaaaacaatga

SEQ ID NO: 483070 - DNA, 243 bp, Shigella sonnei
atgaaaaaagttctgtatggcatttttgccatatctgcgcttgcggcgacttctgtgtgggctgcacctgtacaggtgggcgaagcggcaggggcggcagcaacgtcggtttcggcggggagttcctccgcgaccagcgtcagcaccgtaagctcggcggtgggtgtcgcgctcgcggcaaccggtggcggtgatggttctaataccgggaccacaacaaccacaaccaccagtacccagtaa

SEQ ID NO: 483071 - DNA, 1650 bp, Shigella sonnei
atgaaaaacatcaatccaacgcagaccgctgcctggcaggcactacagaaacacttcgatgaaatgaaagacgttacgatcgccgatctttttgctaaagacggcgatcgtttttctaagttctccgcaacattcgacgatcagatgctggtggattactccaaaaaccgcatcactgaagagacgctggcgaaattacaggatctggcgaaagagtgcgatctggcgggcgcgattaagtcgatgttctctggcgagaagatcaaccgcactgaaaaccgcgccgtgctgcacgtagcgctgcgtaaccgtagcaataccccgattctggttgatggcaaagacgtaatgccggaagtcaacgcggtgctggagaagatgaaaaccttctcggaagcgattatctccggtgagtggaagggttataccggcaaagcaatcactgacgtagtgaacatcgggatcggtggttctgacctcggcccgtacatggtgaccgaagcactgcgtccgtacaaaaatcacctgaacatgcactttgtttctaacgtcgatgggactcacatcgctgaagtgctgaaaaaagtaaacccggaaaccacgctgttcctggtagcatctaaaaccttcaccactcaggaaactatgaccaacgcccatagcgcgcgtgactggttcctgaaagcggcaggtgatgaaaaacacgttgcaaaacactttgcggcgctttccaccaatgccaaagccgttggcgagtttggtattgatactgccaacatgttcgagttctgggactgggtcggcggccgttactctttgtggtcagcgattggcctgtcgattgttctctccatcggctttgataacttcgttgaactgctttctggcgcacacgcgatggacaagcatttctccaccacgcctgccgagaaaaacctgcctgtcctgctggcgctgattggcatctggtacaacaatttctttggtgcggaaactgaagcgattctgccgtatgaccagtatatgcaccgtttcgcggcgtacttccagcagggcaatatggagtccaacggtaagtatgttgaccgtaacggtaacgttgtggattaccagactggcccgattatctggggtgaaccaggcactaacggtcagcacgcgttctaccagctgatccaccagggaaccaaaatggtaccgtgcgatttcatcgccccggctatcacccataacccgctctctgatcaccaccagaaactgctgtctaacttcttcgcccagaccgaagcgctggcgtttggtaaatcccgcgaagtggttgagcaggaatatcgcgatcagggtaaagatccggcaacgcttgactacgtggtgccgttcaaagtgttcgaaggtaaccgcccgaccaactccatcctgctgcgcgaaatcactccgttcagcctgggtgcgttgattgcgctgtatgagcacaaaatctttactcagggcgtgatcctgaacatctttaccttcgaccagtggggcgtggagttgggtaaacaactggcgaaccgtattctgccagagctgaaagatgacaaagaaatcagcagccacgatagctcgaccaatggtctgattaaccgctataaagcgtggcgcggttaa

SEQ ID NO: 483072 - DNA, 1350 bp, Shigella sonnei
atgtctgaaattgttgtctccaaatttggcggtaccagcgtagctgattttgacgccatgaaccgcagcgctgatattgtgctttctgatgccaacgtgcgtttagtagtcctctcggcttctgctggtatcactaatctgctggtcgctttagcggaagggctggaacctggcgagcgattcgaaaaactcgacgctattcgcaacatccagtttgccattctggaacgtctgcgttacccgaacgttatccgtgaagagattgaacgtctgctggagaacattactgttctggcagaagcggcggcgctggcaacgtctccggcgctgacagatgagctggtcagccacggcgagctgatgtcgaccctgctgtttgtcgaaatcctgcgcgaacgcgatgttcaggcacagtggtttgatgtacgtaaagtgatgcgtaccaacgaccgatttggtcgtgcagagccagatgtagccgcgctggcggaactggccgcgctgcagctgctcccacgcctcaatgaaggcttagtgatcacccagggatttatcggtagcgaaaataaaggtcgtacaacgacgcttggccgtggaggcagcgattatacggcagccttgctggcggaggctttacacgcatctcgtgttgatatctggaccgacgtcccgggcatctacaccaccgatccacgcgtagtttccgcagcaaaacgcattgatgaaatcgcgtttgccgaagcggcagagatggcaacttttggtgcaaaagtactgcatccggcaacgttgctacccgcagtacgcagcgatatcccggtctttgtcggctccagcaaagacccacgcgcaggtggtacgctggtgtgcaataaaactgaaaatccgccgctgttccgcgcgctggcgcttcgtcgcaatcagactctgctcactttgcacagcctgaatatgctgcattctcgcggtttcctcgcggaagttttcggcatcctcgcgcggcataatatttcggtagacttaatcaccacgtcagaagtgagcgtggcattaacccttgataccaccggttcaacctccactggcgatacgttgctgacgcaatctctgctgatggagctttccgcactgtgccgggtggaagtagaagaaggtctggcgctggtcgcgttgattggcaatgacctgtcaaaagcctgcggcgttggcaaagaggtattcggcgtactggaaccgttcaacattcgcatgatttgttacggcgcatccagccataacctgtgcttcctggtgcccggcgaagatgccgagcaggtggtgcaaaaactgcatagtaatttgtttgagtaa

SEQ ID NO: 483073 - DNA, 273 bp, Shigella sonnei; identical to SEQ ID NO: 477483

SEQ ID NO: 483074 - DNA, 873 bp, Shigella sonnei
atgctgcccgactcatcagtccgtttaaataaatacatcagcgaaagcggaatttgctcacgccgcgaagcggatcgctatatcgagcaaggcaatgtgttccttaatggcaagcgagccaccattggtgatcaggtgaaacccggcgacattgtgaaagtaaacggtcagttgattgagcctcgggaagccgaagatttggtacttatcgccctgaacaagcccgtcggtattgtcagcaccaccgaagatggcgagcgcgataacattgtcgatttcgttaaccacagcaaacgcgtgttcccgattggccgcctggataaagactcccaggggctgattttcctcaccaatcacggcgatctggtgaataagatcctccgtgcgggtaacgatcatgagaaagagtatctggtgacggtcgataaaccgattaccgatgaatttattcgtggtatgggggcgggagtgccgatcctcgggacggtgacgaaaaagtgcaaagtcaaaaaagaagcaccgtttgtcttccgcattaccctggtgcaggggttgaaccgtcagatccggcgcatgtgcgagcatttcggctatgaagtgaaaaagctggaacgtacgcgcattatgaacgtcagcttaagcggcattccgctgggagaatggcgcgatttaaccgacgacgagcttatcgatctctttaagctcattgaaaattcctcttccgaggcgaagcccaaagcgaaggccaaaccgaaaacagcgggcatcaaacgtccagtcgttaagatggaaaaaacggcggaaaaaggcggtcgcccggcgtccaacggtaagcgttttacctcgccggggcgtaaaaagaaggggcgctga

SEQ ID NO: 483075 - DNA, 351 bp, Shigella sonnei
atggaaaacagtgacgatatccgtttgattgtgaagattgcccaactctattacgaacaggatatgacgcaggcgcaaatcgcgcgcgaactgggtatttaccgcaccaccatcagccgcttgcttaaacgaggccgcgatcagggaattgtcaccatcgccatcaactatgactacaacgaaaatctctggctggagcagcaactgaagcaaaagtttggcttgaaagacgttgtggtggtgtcgggaaatgatgaggatgaagagactcaactggcgatgatggggttacacggcgcgcaactgctggatcgcttgctggagcctggcgatattgtcggtttttcctag

SEQ ID NO: 483076 - DNA, 384 bp, Shigella sonnei
gtgagcgcactggttgaaaacttgccgcaagcggggcaatcgcggcagttaatctgcgtgccaattattggcggaccgtccggtaaactcgaaagccgctatcacgtaaacacattaacctacagcgtggcagcgaagctgaaaggggaatcgcatctcgcggattttccggctctgctggataaccccttaattcgtaatgggatcatgcagtctcagcactttaaaaccatctctgcctactgggataatctggatgtcgccctggtgggaattggctcaccggccattcgcgacggcgctaactggcatgcgttttatggtggtgaagagagtgacgacctgaaagcaggcgcggtattccattggcattgccatgagtga

SEQ ID NO: 483077 - DNA, 807 bp, Shigella sonnei
atgcaaacgtggttaaatttgcaggataaaatcattatcgtcaccggcggcgcatccggtattggtctggcgattgtagaggaattattagcacaaggcgcaaacgtacagatggtagatattcacggtggcgatggtcaatatgaagttcataaaggctatcagttttggccgaccgatatttccagcgccaaagaggtaaatcatacggtagcggaaattatccagcgttttggtcgcatcgacggtctggtcaataacgccggggtcaatttcccgcgtctgctggtcgatgagaaagcgcctgccgggcagtatgaactcaacgaagctgcattcgaaaaaatggtcaatatcaaccaaaaaggcgtttttctgatgtcgcaggcggtggcgcgccagatggtcaaacaacatgatggcgtgattgtgaatgtttcctcagaaagtggactggaaggctcagaaggccaaagctgttacgccgctaccaaagccgcgctcaatagcttcacgcgctcctggtcgaaagagctgggtaaacacggtatccgtgtggtcggtatcgcgccggggattctggaaaaaaccgggctacgcacgccggaatatgaagaggcgctggcgtggacgcgcaatatcaccgtcgagcagctgcgtgaaggctataccaaaaacgccattcctattgggcgcgccggaagattagcagaagtcgctgattttgtttgttatctgctgtctgaacgcgccagctacatcaccggagtaaccactaacattgcgggcggcaaaacgcgcggataa

SEQ ID NO: 483078 - DNA, 408 bp, Shigella sonnei
atggtcaacgccattttttgtgcccacggcaaattagcttgcgccatgctggaatcggttcagatggtgtacggcgacgccaatgtcgaggcggttgaatttgtaccaggcgagaacgccggagacatcgtagcaaagctggaaaagttagtaagcattcacaatcaagatgagtggctgattgccgtggatttacagtgcggcagcccgtgtaatgcggcagcgatgcttgcgatgcgcaatcctcgtctacgggtaatcagcggcctttccctgccgctggcgctcgaactggttgataaccaggacagcatgaatgttgatgaactgtgtgaacacctgacgcaaatcgcaaagcaaacctgcgttgtctggaaacaactggcaacggcagaggaagatttctga

SEQ ID NO: 483079 - DNA, 225 bp, Shigella sonnei
atgaacattacgctcgcccgcattgatgaccgtctgatccacggccaggtcactaccgtctggtcgaaagtggctaacgcccagcgcattattatctgcaatgacgaagtttataacgatgaagtgcgccggacattattgcgtcaggctgcgccaccgggaatgaaggttaacgtggtcaatattgaaaaagccgtcgcggtttatcacaacccgcaatattag

SEQ ID NO: 483080 - DNA, 222 bp, Shigella sonnei
atggtttgccagggggtaaaaataggcaccctgaatattggcggcatggcctggcggcccggtaaaaaacagttaaccaaagcggtttcattagatgatgatgatattaacgcatttcatgagttaaataatcttggcgtcataatggatttacgcgtcgtagcgtcagatccctcaatcaatattatcgacaaaataaacgaacagttaatcgcaaattaa

SEQ ID NO: 483081 - DNA, 798 bp, Shigella sonnei
atggaaataagtaccctacaaattattgctatatttcttttttcctgtattgccggaatgggcagcgtgctggatgaatttcagactcatcgcccgttaattgcctgtacggtgattggtttaattctcggtgatttaaaaaccggaataatactcggtggtacgctggaattgatagctctcggctggatgaacgtcggcgcggcgcaatctccggattctgcactcgccagcataatctccgccattctggttatcgttggtcagcaaagcatcgccaccggaatcgccatcgcgttgcctgtggctgcggcaggccaagtgctgacggtgtttgcccgtaccatcaccgtagtgttccagcacgcggcggataaagcagcggaagaggcgcggtttcgcactctcgatattctgcatgtctccgcgcttggcgtgcaggcgctgcgcgttgctattccggcactgattgtctcactgttcgtcagcgccgatatggtcagcaatatgttaaacgccattcccgaatttgtgacccgtggactgcaaattgctggcggttttatcgtggtggtcggttacgccatggtgctacgtatgatgggcgtgaaatatttgatgcctttctttttcctcggtttcctcgcaggtggctacctcgatctcagcctgctggcgttcggtggcgtcggcgtgatcatggccctggtctacatccagctaaatccacagtggcgtaaagctgaacctcaactccaggccaccgcctccaccgcccttgaccaacttgacgattaa

SEQ ID NO: 483082 - DNA, 825 bp, Shigella sonnei
atggaacagagaaaaattacacgcagcgatctggtgagcatgtttctgcgctccaacctgcaacaggcgtcctttaactttgaacgtattcacggactgggcttttgctacgacatgatccccgccatcaagcgactttacccattaaaagaggatcaggttgcggcgctcaggcgacacctggtgttcttcaataccacgccagccgtatgtggcccggtcatcggcgtcactgccgccatggaagaggcgcgggccaacggcgcggaaattgatgacggtaccattaacggcatcaaagtcggtctgatgggaccattggcaggagttggcgatccactggtctggggaacgctgcgcccgattaccgctgcgctcggcgcatctctggcactttctggcaacatcctcggcccgctgctgtttttctttattttcaatgcggtgcgtctggcgatgaagtggtatggcctacagctcggctttcgcaaaggggtgaatatcgtcagcgatatgggcgggaatgtgctgcaaaaactcaccgaaggcgcgtcgattctcggactgtttgtgatgggcgtgctggtcaccaaatggacgtcaatcaacgtaccgttggtggtttcacaaacgcatgccgccgatggctccaccgtcatcatgaccgtgcagaacattctcgaccaactttgccctggtttgctggcgctcggtctgacgctactgatggttcgtctgctcaacaaaaaaattaacccggtatggctgattttcgccctgtttggcttagggattatcggcaatgcgctgggcttcctgtcctga

SEQ ID NO: 483083 - DNA, 1116 bp, Shigella sonnei
gtgcctctcttcctggaaagaggcaacctgggtgaaaaccataaaaaagtacccgacgatgtggcgaccaacccaatcatcatcggccacgagttttgcggcgatattctggccgtgggtaaaaagtggcagcacaaattccagccgggtcagcgttatgtgattcaggccaacctgaaactccctgaccgcccggactgccccggctactccttcccgtgggtgggcggcgaagccacgcatgtggttattcccaacgaggtcatggaacaagattgcctgctggcatacgacggcgaaacctattttgaaggctcgctggttgaaccgctttcctgcgtgattggcgcgttcaacgccaactatcatcttcaggaaggtagttataaccacacgatggggattcgcccgcaagggcgcacgctgatcctcggcggcaccggaccaatgggattgttggcgattgattatgcgctgcatggaccagttaacccgtcgctgctcgtcattaccgataccgacaacgacaaattgagttatgcgcgcaagcactatccatcagaaccgcaaacactgattcattatctcaatgccaccgatgcagcatttgatacgttaatggcgctgagtggcggtcacggcttcgatgatattttcgtctttgtgcctaatgaaggactggtgactctcgcctcttccttgctggcgacagatggttgcctgaatttcttcgccggaccgcaggataaacatttcagcgcgccaattaatttctacgatgtgcattatgcatttacccactacgtgggcacgtcaggcggcaataccgacgacatgcgcgcggcggtcaaactgattgaagagaaaaaagtgcaggccgcaaaagtggtaacacatattcttgggctgaatgccgcgggcgaaaccacgcttgaattgcctgccgtcggcggcggcaaaaagctggtgtataccgggaaatacctgccgctgacgtcactcacgcagattcaggatcaagcactggcggcgattctggcgcgtcatcaggggatctggtccggtgaggcggagcaatatctgctcactcatgcagaggcaatttcccatgattaa

SEQ ID NO: 483084 - DNA, 690 bp, Shigella sonnei
atggaactgcttttattgagtaactcgacgctgccgggtaaagcctggctggaacatgcactgccgctaattgctgaacagttgcagggtcgccgctcagcggtgtttatccctttcgctggcgtaacgcagacctgtgatgattacacagcgaaaacggctgcggttctcgctccgctgggtgtttctgtcaccggtattcatagcgttgtcgatcccgttgccgcgattgaaaatgctgagatcgtgattgtcgggggcgggaatactttccagttgctgaaacagtgccgcgagcgcgggctgctggcaccaattactgacgtggttaaacgtggtgcgctgtatattggctggagcgcaggcgctaaccttgcttgcccaaccattcgtaccaccaacgatatgccgattgtcgatccgcaaggtttcgatgcgctaaatctgttcccgctgcaaatcaacccgcacttcaccaacgcgctgccggaaggccataaaggtgaaacccgtgagcagcgtattcgcgaactgctggtcgtcgcgccagaactgacgattattggtctaccggaaggtaactggatcacggtgagtaaaggtcacgctacgctgggtggcccgaacaccacttatgtgtttaaggccggtgaagaagcggtgccgctggaagcgggtcaccgtttttaa

SEQ ID NO: 483085 - DNA, 1632 bp, Shigella sonnei
gtgttaacgctgcttcacctgctttctgccgtcgccctgctggtctgggggactcatattgttcgaaccggcgtaatgcgcgtcttcggcgcgcgtttgcgtactgtccttagccggagcgtcgaaaaaaagccgctcgccttttgcgcggggatcggcgttaccgcactggtacagagcagtaatgccaccaccatgctggtgacctcgttcgtcgctcaggatctggtagccctcgcaccggctctggtgattgtgctgggtgcagatgtcgggacggcgctaatggcgcgtattctcaccttcgacttatcctggctgtcaccgttacttatttttatcggcgtgatttttttcctcggacgcaaacagtcacgcgccgggcaactgggccgcgtcggtattggtcttgggctgattttgctggcgctggagttgattgtgcaggccgtaacgccgatcacccaggcaaacggcgttcaggtgatctttgcctcgctgaccggcgatattctgctggatgcgctgattggcgcgatgttcgccattatcagctactccagccttgctgctgtactgctgaccgcgactctgaccgccgcaggcattatctccttccccgtggcgctctgtctggtgattggtgctaacctcggttccggcctgctggcgatgctcaacaacagtgccgccaatgccgcagcccgccgtgtcgcgctgggtagtttgctgtttaagctggtgggtagcctgattatcctgccgtttgtccatttgctggcagagacaatggggaagttgtcattgccaaaagcggaactggtgatctatttccacgtcttctacaaccttgtacgttgcctggtcatgctgccatttgttgacccgatggcacggttttgcaaaacgattattcgcgatgaaccggaactggatacccagctacggcctaaacatctggatgtcagcgcgctggatacgcccacgcttgctctggcgaacgccgcgcgcgaaaccctgcgcattggcgacgccatggaacagatgatggaagggctgaataaagtgatgcacggcgagccacggcaggagaaagagctgcgtaagctggcagatgatatcaacgttctctacaccgccattaagctgtatctggcgcgaatgccaaaagaggaacaggcagaagaagagtcgcgtcgctgggcggagattattgaaatgtcgctcaaccttgaacaggcttccgatatcgtcgagcgcatgggcagcgaaattgctgataaatcgctggcagcacggcgggcattttcgcttgatgggttgaaggaactggatgcgctctatgagcaattgctcagtaatttaaagctggcaatgtcggtgttcttctctggcgatgtcaccagcgctcgtcgtttgcgccgcagcaagcatcgctttcgcattcttaatcgccgctattcccacgcccacgtcgatcgcctgcatcagcaaaacgtgcagagcattgaaaccagttcgctacatttaggcttactgggagatatgcagcgtctgaactcgctgttttgttcggtggcttacagtgtgctggaacagccggatgaagatgaaggacgggacgagtattaa

SEQ ID NO: 483086 - DNA, 3684 bp, Shigella sonnei
gtgagcagcaaagtggaacaactgcgtgcgcagttaaatgaacgtattctggtgctggacggcggtatgggcaccatgatccagagctatcgactgaacgaagccgattttcgtggtgaacgctttgccgactggccatgcgacctcaaaggcaacaacgacctgctggtactcagtaaaccggaagtgatcgccgctatccacaacgcctactttgaagcgggcgcggatatcatcgaaaccaacaccttcaactccacgaccattgcgatggcggattaccagatggaatccctgtcggcggaaatcaactttgcggcggcgaaactggcgcgcgcctgtgctgacgagtggaccgcgcgcacgccggagaaaccgcgctacgttgccggtgttctcggcccaaccaaccgcacggcgtctatttctccggacgtcaacgatccggcatttcgtaatatcacttttgacgggctggtggtggcttatcgagagtccaccaaagcgctggtggaaggtggtgcggatctgatcctgattgaaaccgttttcgacacccttaacgccaaagcggcggtatttgcggtaaaaacggagtttgaaacgctgggcgttgagctgccgattatgatctctggcaccatcaccgacgcctccgggcgcacgctctccgggcagaccaccgaagcattttacaactcattgcgccacgccgaagcgctgacctttggcctgaactgtgcgctggggcccgatgaactgcgccagtacgtgcaggagctgtcacggattgcggaatgctacgtcaccgcgcacccgaacgccgggctacccaacgcctttggtgagtacgatctcgacgccgacacgatggcaaaacaaatacgtgaatgggcggaagcgggctttctcaatatcgtcggcggctgctgtggcaccacgccacaacatattgcagcgatgagtcgtgcagtagaaggattagcgccgcgcaaactgccggaaatccccgtagcctgccgtttgtccggcctggagccgctgaacattggcgaagatagcctgtttgtgaacgtgggtgaacgcaccaacgtcaccggttccgctaagttcaagcgcctgatcaaagaagagaaatacagcgaggcactggatgtggcccgccagcaggtggaaaacggcgcgcagattatcgatatcaatatggatgaagggatgctcgacgccgaagcggcgatggtgcgttttctcaatctgattgccggtgaaccggatatcgctcgcgtgccgattatgatcgactcctcaaaatgggaggtcatcgaaaaggggctgaagtgtattcagggcaaaggcattgttaactctatctcaatgaaagagggcgtcgacgcctttatccatcatgcgaaactgttgcgtcgttacggtgcagcggtggtggtaatggcctttgacgaacagggacaggccgatacccgcgcacggaaaatcgagatttgccgtcgggcgtacaaaatcctcaccgaagaggttggcttcccgccagaagatatcatcttcgacccgaacatcttcgcggtcgccaccggcattgaagagcacaacaactatgcgcaggactttatcggcgcctgcgaagacatcaaacgcgaactgccgcacgcgctgatttccggcggcgtatctaacgtttctttctcattccgtggcaacgaaccggtgcgcgaagccattcacgcggtgttcctctactacgctattcgcaatggcatggatatggggatcgtcaacgccgggcaactggcgatttacgacgacctgcccgctgaactgcgcgacgcggtggaagatgtgattcttaatcgtcgcgatgatggcactgaacgtttactggagcttgccgagaaatatcgcggcagcaaaaccgacgacaccgctaacgcccagcaggcggagtggcgctcgtgggaagtgaataaacgtctggaatactcgctggtcaaaggcattactgagtttatcgagcaggataccgaagaagcccgccagcaggctacgcgcccgattgaagtgattgaaggcccgttgatggacggcatgaacgtggtcggcgatctgtttggcgaggggaaaatgttcctgccacaggtggtcaaatcggcgcgcgtcatgaaacaggcagtggcctacctcgaaccgtttattgaagccagcaaagagcagggcaaaaccaacggcaagatggtgatcgccaccgtgaagggcgacgtccacgacatcggtaaaaatatcgttggtgtggtgctgcaatgtaacaactacgaaattgtcgatctcggcgttatggtgcctgcggaaaaaattctccgtaccgctaaagaagtgaatgctgatctgattggactttcggggcttatcacgccgtcgctggacgagatggttaacgtggcgaaagagatggagcgtcagggcttcaccattccgttactgatcggtggcgcgacgacctcaaaagcgcacacggcggtgaaaattgagcagaactacagcggcccgacggtgtatgtgcagaatgcctcgcgcaccgttggtgtggtggcggcgctgctttccgatactcagcgcgatgattttgtcgctcgtacccgcaaggagtatgaaaccgtacgtattcagcacgggcgcaagaaaccgcgcacaccaccggtcacgctggaagcggcgcgcgataacgacttcgcttttgactggcaggcttacacgccgccggtggcgcaccgtctcggcgtgcaggaagttgaagccagcatcgaaactctgcgtaattacatcgactggacaccgttctttatgacctggtcgctggccgggaagtatccgcgcattctggaagatgaagtggtgggcgttgaggcgcagcggctgtttaaagacgccaacgacatgctggataaattaagcgccgagaaaacgctgaatccgcgtggcgtggtgggcttgttcccggcaaaccgtgtgggcgatgacattgaaatctaccgtgacgaaacgcgcacccatgtgatcaacgtcagccaccatctgcgtcaacagaccgaaaaaacgggattcgctaactactgcctcgctgacttcgttgcgccgaagctttctggtaaagcagattacatcggcgcatttgccgtgactggcgggctggaagaggacgcactggctgatgcctttgaagcgcagcacgatgattacaacaaaatcatggtgaaagcgcttgccgaccgtttagccgaagcctttgcggagtatctccatgagcgtgtgcgtaaagtctactggggctatgcgccgaacgagaacctcagcaacgaagaactgatccgcgaaaactaccagggcatccgtccggcaccgggctacccggcctgcccggaacatacggaaaaagccaccatctgggagctgctggaagtggaaaaacatactggcatgaaactcacagaatctttcgccatgtggcctggtgcatcggtttcgggttggtatttcagccacccggacagcaagtactacgcggtggcgcaaattcagcgcgatcaggttgaagactatgcccgccgtaaaggtatgagcgtctccgatgttgagcgctggctggcaccgaatctggggtatgacgcggactga

SEQ ID NO: 483087 - DNA, 825 bp, Shigella sonnei
atggtcgcacccattcccgcgaaacgcggcagaaaacccgccgttgccaccgcaccagcgactggacaggttcagtctttaacgcgtggcctgaaattactggagtggattgccgaatccaatggcagtgtggcactcacggaactggcgcaacaagccgggttacccaattccacgacccaccgcctgctaaccacgatgcaacagcagggtttcgtgcgtcaggttggcgaactgggacactgggcaatcggcgcacatgcctttatggtcggcagcagctttctccagagccgtaatttgttagcgattgttcaccctatcctgcgcaatctaatggaagagtctggcgaaacggtcaatatggcggtgcttgatcaaagcgatcacgaagcgattattatcgatcaggtacagtgtactcacctgatgcgtatgtccgcacctatcggcggtaaattgccgatgcacgcttccggtgcaggtaaagcctttttagcccaactgagcgaagaacaggtgacgaagctgctgcaccgcaaagggttacatgcctatacccacgcaacgctggtgtctcctgtgcatttaaaagaagatctcgcccaaacgcgcaaacggggctattcatttgacgatgaggaacatgcactggggctacgttgccttgcagcgtgtattttcgatgagcaccgtgaaccgtttgccgcaatttctatttccggaccgatttcacgtattaccgatgaccgcgtgaccgagtttggcgcgatggtgattaaagcggcgaaggaagtgacgctggcgtacggtggaatgcgctga

SEQ ID NO: 483088 - DNA, 321 bp, Shigella sonnei
atgattactcgtattcctcgtagttctttctctgcaaatattaataatacagcccagacaaatgaacaccaaaccctgagtgaattgttttataaagaactcgaggataaattttctggcaaggagctggcgacgcctctattaaaaagcttctcagagaactgtagacaaaatggtcgtcatatctttagcaacaaggattttgtcattaaattttccacgtccgtcttacaagctgataagaaagaaattacgataattaataaaacgaaaacacgacactcactcaaaccattgctccaatatttgaagaatacctaa

SEQ ID NO: 483089 - DNA, 702 bp, Shigella sonnei
atggaaattttacctcaacgctcagacactcttgataaacaagaattaaacctaaaatcagatagaaaagaaaaagaattcccaagaattaaacttaatggtcaatgttattttccggggcgaccccaaaaccgtatagtatgccgacacattgctgcacaatatattaatgatatttatcagaatgttgattacaaaccccatcaagatgattattcttcagctgaaaaatttctcactcacttcaacaaaaaatgcaaaaaccagactttggcgttgatttccagccgtcctgaggggcgttgcgttgctgcctgcggtgatttcgggctagttatgaaagcatattttgacaagatggaatcaaatggcatcagtgttatggcagccatattactggtggataaccatgctttgacggtccggctaagaataaagaacacaactgaaggatgtacccattacgtggtttcggtttatgatcctaatgtaactaacgacaaaataagaatcatgagcgaaagcaaagaggatattaaacactattctctgatggattttatgaatgtagattatagcctcctgaaatggtcaaatgatcatgttattaaccaatctgttgcaataattccagcacttccgaaagaacagctattgatattaaaaggatctgtgggtgatgctgccaacttactgatttag

SEQ ID NO: 483090 - DNA, 477 bp, Shigella sonnei
atgaaactcatcagtaacgatctgcgcgatggcgataaattgccgcatcgtcatgtctttaacggcatgggttacgatggcgataatatttcaccgcatctggcgtgggatgatgttcctgcgggaacgaaaagttttgttgtcacctgctacgacccggatgcgccaaccggctccggctggtggcactgggtagttgttaacttacccgctgatacccgcgtattaccgcaagggtttggctctggtctggtagcaatgccagacggcgttttgcagacgcgtaccgactttggtaaaaccgggtacgatggcgcagcaccgccgaaaggcgaaactcatcgctacatttttaccgttcacgcgctggatatagaacgtattgatgtcgatgaaggtgccagcggcgcgatggtcgggtttaacgttcatttccactctctggcaagcgcctcgattactgcgatgtttagttaa

SEQ ID NO: 483091 - DNA, 1290 bp, Shigella sonnei
atgacaacggacgatcttgcctttgaccaacgccatatctggcacccatacacatccatgacctccccgctgccggtttatccggtggtgagcgccgaaggttgcgagctgattttgtctgacggcagacgcctggttgacggtatgtcgtcctggtgggcggcgatccacggctacaatcacccgcagcttaatgcggcgatgaagtcgcaaattgatgccatgtcgcatgtgatgtttggcggtatcacccatgcgccagccattgagctgtgccgcaaactggtggcgatgacgccgcaaccgctggagtgcgtttttctcgcggactccggttccgtagcggtggaagtggcgatgaaaatggcgttgcagtactggcaagccaaaggcgaagcgcgccagcgttttctgaccttccgcaatggttatcatggcgatacctttggcgcgatgtcggtgtgcgatccggacaactcaatgcacagcctgtggaaaggctatctgccagaaaacttgtttgctcccgccccacaaagccgtatggatggcgaatgggatgagcgcgatatggtgggctttgcccgcctgatggcggcgcatcgtcatgaaatcgcggcggtgatcattgagccgattgtccagggcgcaggcgggatgcgcatgtaccatccggaatggttaaaacgaatccgcaaaatatgcgatcgcgaaggtatcttgctgattgccgacgagatcgccactggatttggtcgtaccgggaaactgtttgcctgtgaacatgcagaaatcgcgccggacattttgtgcctcggtaaagccttaaccggcggcacaatgaccctttccgccacactcaccacgcgcgaggttgcagaaaccatcagtaacggtgaagccggttgctttatgcatgggccaacttttatgggcaatccgctggcctgcgcggcagcaaacgccagcctggcgattctcgaatctggcgactggcagcaacaggtggcggatattgaagtacagctgcgcgagcaacttgcccccgcccgtgatgccgaaatggttgccgatgtgcgcgtactgggggccattggcgtggtcgaaaccactcatccggtgaatatggcggcgctgcaaaaattctttgtcgaacagggtgtctggatccggccttttggcaaactgatttacctgatgccgccctatattattctcccgcaacagttgcagcgtctgaccgcagcggttaaccgcgcggtacaggatgaaacatttttttgccaataa

SEQ ID NO: 483092 - DNA, 1041 bp, Shigella sonnei
atggctcaccgcccacgctggaccttgtcgcaagtcacagaattatttgaaaaaccgttgctggatctgctgtttgaagcgcagcaggtccatcgccagcatttcgatcctcgtcaggtccaggtcagcacgttgctgtcgattaagaccggagcttgtccggaagattgcaaatactgcccgcaaagctcacgctacaaaaccgggctggaagccgagcggttgatggaagttgaacaggtgctggagtcggcgcgcaaagcgaaagcggcaggatcgacgcgcttctgtatgggcgcggcgtggaagaatccccacgaacgcgatatgccgtacctggaacaaatggtgcagggggtaaaagcgatggggctggaggcgtgtatgacgctgggcacgttgagtgaatctcaggcgcagcgcctcgcgaacgccgggctggattattacaaccacaacctggacacctcgccggagttttacggcaatatcatcaccacccgcacttatcaggaacgcctcgatacgctggaaaaagtgcgcgatgccgggatcaaagtctgttctggcggcattgttggcttaggcgaaacggtaaaagatcgcgccggattattgctgcaactggcaaacctgccgacgccgccggaaagcgtaccaatcaacatgctggtgaaggtgaaaggcacgccactggcggataacgatgatgtcgatgcctttgattttattcgcactattgcggtagcgcggatcatgatgccgacctcttacgtgcgcctttctgccggacgcgagcagatgaatgaacagactcaggcgatgtgctttatggctggcgcaaactcgattttctacggttgcaaactgctgaccacgccgaatccggaagaagataaagacctgcaactgttccgcaaactggggctaaatccgcagcaaactgccgtgctggcaggggataacgaacaacagcaacgtcttgaacaggcgctgatgaccccggacaccgacgaatattacaacgcggcagcattatga

SEQ ID NO: 483093 - DNA, 1155 bp, Shigella sonnei
atgagctggcaggagaaaatcaacgcggcgctcgatgcacggcgtactgccgatgccctgcgtcgccgttatccggtggcgcaaggagccggacgctggctggtggcggatgatcgccagtatctgaacttttccagtaacgattatttaggtttaagccatcatccgcaaattatccgcgcctggcagcagggcgcagaaaagtttggtgtaggtagcggcggttccgggcatgtcagcggttatagcgtggtgcatcaggcgctggaagaagaactggccgagtggcttggctattcgcgggcgctgctgtttatctctggttttgccgcgaatcaggcagtcattgccgcgatgatggcgaaagaggaccgtattgttgccgaccggcttagccatgcctccttgctggaggctgccagtttaagcccgtcgcagcttcgccgttttactcataacgatgtcgctcatctggcgcgactgcttgcttccccctgtccggggcagcaactggtggtgacagaaggcgtgttcagcatggacggcgatagcgcgccactggcggaaatccagcaggtaacgcaacagcacaatggctggttgatggtcgatgatgcccacggcacgggcgttatcggggagcaggggcgcggcagctgctggctgcaaaaggtaaaaccagaattgctggtggtgacttttggcaaaggatttggcgtcagtggggctgcggtgctttgctccagtacggtggcggattatctgctgcaattcgcccgccaccttatctacagcaccagtatgccgcccgctcaggcgcaggcattacgtgcgtcgctggcggtcattcgccgtgatgagggggatgcacggcgcgaaaaactggtgtcactcattgcgcgttttcgtgccggagtacaggatttgccgtttacgcttgctgattcatgcagcgccatccagccattgatcgtcggtgataacagccgtgcgttacaactggcagaaaaactgcgccagcaaggctgctgggtcacggcgattcgcccgccaaccgtacccgctggtactgcgcgactgcgcttaacgctaaccgcagcgcatgaaatgcaggatatcgaccgtctgctggaggtgctgcatggcaacggttaa

SEQ ID NO: 483094 - DNA, 756 bp, Shigella sonnei; identical to SEQ ID NO: 457939

SEQ ID NO: 483095 - DNA, 678 bp, Shigella sonnei
gtgagtaaacgttattttgtcaccggaacggataccgaagtggggaaaaccgtcgccagttgtgcacttttacaagccgcgaaggcagtaggttatcggacggcaggttataaaccggtcgcctctggcagcgaaaagaccccggaaggcttacgtaatagtgacgcgctggcgttacagcacaacagcagcctgcagctggattacgcaacagtaaatccttacaccttcgcagaacccacttcgccgcacatcatcagcgcgcaagagggcaggccgatagaatcattggtaatgagcgccggattacgcgcgcttgaacaacaggctgactgggtgttagtggaaggtgctggcggctggtttacgccgctttctgacactttcacttttgcagattgggtaacacaggaacaactgccggtgatactggtagttggtgtgaaactcggctgtattaatcacgcgatgttgactgcgcaggcaatacaacacgccggactgactctggcgggttgggtggcgaacgatgttacgcctccgggaaaacgtcacgctgaatatatgaccacgctcacccgcatgattcccgcgccgctgctgggagagatcccctggcttgcagaaaatccagaaaatgcggcaaccggaaagtacataaaccttgccttgttgtag

SEQ ID NO: 483096 - DNA, 2022 bp, Shigella sonnei
atgagtaaaccgttcaaactgaattccgcttttaaaccttctggcgatcagccagaggcgattcgacgtctcgaagaggggctggaagatggcctggcgcaccagacgttacttggcgtgactggctcagggaaaaccttcaccattgccaatgtcattgctgaccttcagcgcccaaccatggtacttgcgcccaacaaaacgctggcggcccagctgtatggcgaaatgaaagagttcttcccggaaaacgcggtggagtatttcgtctcctactacgactactatcagccggaagcctatgtaccgagttccgacactttcattgagaaagatgcctcggttaacgaacatattgagcagatgcgtttatccgccaccaaagcgatgctggagcggcgtgatgtggttgtagtggcctctgtttccgcgatttatggtctgggcgatcctgatttatatctcaagatgatgctccatctcacggtcggtatgattatcgatcagcgcgcgattctgcgccgactggcggagctgcaatacgctcgtaatgatcaagcattccagcgtggtactttccgcgttcgtggcgaggtgatagatatcttcccggcagaatcggatgacattgcacttcgcgtggaactgtttgacgaggaagtggaacgattgtcgttatttgacccgctgaccgggcagattgtttccactattccacgttttaccatctacccgaaaacgcactacgtcacaccgcgcgagcgcatcgtacaggcgatggaggagatcaaagaagaactggccgccagacgcaaagtgctgttggaaaacaacaaactgctggaagagcagcggctgacccagcgtacccagtttgatctggagatgatgaacgagctgggctactgttcggggattgaaaactactcgcgcttcctctccggtcgtggaccgggtgagccaccgccgacgctgtttgattacctgcctgccgatgggctgctggtggtcgatgaatctcacgtcaccattccacaaattggcggcatgtatcgcggtgaccgggcgcgtaaagagacactggtggagtacggcttccgcctgccatcagcgctggataaccgtccgcttaagtttgaagagttcgaagcattagcgccgcaaaccatctatgtttcggcgacgccgggtaattacgagctggaaaaatccggcggcgatgtggtggatcaggtggtgcgtccaaccggattgcttgacccgattatcgaagtgcggccggtggcgacacaggttgatgatcttctttcggagattcgtcagcgagcggcaattaacgaacgcgtactggtcaccacactgaccaagcggatggcggaagatcttaccgaatatctcgaagaacatggcgagcgcgtgcgttatcttcattcagatatcgacaccgtcgaacgtatggagattatccgcgacttgcgtctgggtgagttcgacgtgctggtagggatcaacttactgcgcgaaggtctggatatgccggaagtgtcgctggtggcgatcctcgacgctgacaaagaaggcttcctgcgttccgaacgttcgttgatccagactattggtcgtgcggcacgtaacgttaacggtaaagcgattctctacggcgataagatcaccccatcaatggcgaaagcgattggcgaaaccgaacgtcgccgtgagaaacagcagaagtacaacgaggaacacggaattacgccgcaaggcttgaacaagaaagtggtcgatatcctggcgctggggcagaacattgccaaaaccaaagcgaagggcagaggaaaatcgcgcccgattgttgagccggataatgtgccgatggatatgtcgcctaaagcgttgcaacagaaaatccatgagctggaagggttaatgatgcaacacgcgcagaatctggagttcgaagaagcggcacaaattcgtgaccagttgcatcagctgcgtgagctgtttatcgcggcttcgtga

SEQ ID NO: 483097 - DNA, 909 bp, Shigella sonnei
atgcgcaatcgtacgctggctgatcttgatcgtgtcgttgctctcggcggagggcatggactgggacgcgttctctcatcactttcgtctttgggttctcgtttaacgggtatcgtcaccaccacggataatggtggctcgacggggcgtattcgccgttcagaaggcggcattgcctggggcgatatgcgcaactgcctcaaccaactgataacggaaccgagcgtcgcctccgcgatgtttgaataccgttttggcggcaatggcgaactttccggtcataatctcggaaacttgatgttaaaggcgctggatcaccttagcgtgcggcctctggaagccatcaatttaattcgtaatctgctgaaagtggatacgcatttgattccaatgtcagagcatcccgtcgatctgatggcgattgacgatcaggggcatgaagtttacggcgaggtcaatatcgaccagttaactacgccgattcaagagttattattaacgccgaatgtacccgcaacgcgtgaggcggttcacgctatcaatgaagcggatctcatcattattgggcctggcagtttttataccagcctgatgccaattctgctgctgaaggaaatcgcccaggcattacgccgcacgccagcgccgatggtctatatcggcaatctggggcgtgagttgagtttacctgcggctaatttgaagctggaaagcaagctggcaattatggagcagtatgttggtaaaaaggtcattgatgcggtcatcgtcgggccaaaagtggatgtctcggcggtgaaagagcggattgtgattcaggaggtactggaggccagcgatattccgtatcgtcatgaccgccagttgttacataacgcgctggaaaaggcgttacaggctttaggttaa

SEQ ID NO: 483098 - DNA, 990 bp, Shigella sonnei
atggcttcacaactgactgatgcatttgcgcgtaagttttactacttgcgcctgtcgattaccgatgtgtgtaactttcgttgcacctactgcctgccggatggctacaaaccgagcggcgtcaccaataaaggctttcttaccgtcgatgaaattcgccgggttacgcgcgccttcgccagtctgggcaccgaaaaagtgcgcctgacaggaggagagccgtctttacgccgcgactttaccgatatcatcgccgctgtgcgggaaaacgacgctatccgccagattgcggtcaccaccaatggttaccgtctggaacgcgatgtggcgaactggcgcgatgcgggacttactggcattaacgtcagtgtcgacagtctggacgcccgccagtttcacgctattaccgggcaggataaattcaaccaggtcatggcagggatcgatgctgcatttgaggtcggttttgagaaggtcaaagtcaataccgtgctgatgcgtgatgttaatcatcaccagctcgacacctttctgaactggatccagcatcgccctatccagctgcgtttcatcgaactgatggaaacgggcgagggcagtgagctcttccgtaagcatcacatctctggtcaggttctgcgtgacgagctactgcgtcgcggctggatccaccaattacgtcaacgcagcgacggtcctgcgcaagtcttttgccatccagattacgccggagagattggccttatcatgccgtatgaaaaagacttctgcgccacttgcaaccgcctgcgcgtttcctccattggtaaactccatctctgcctgtttggtgaaggcggcgttaacctgcgcgatctgctggaagacgatacccagcaacaggcgctggaagcgcgtatttcagcggcgctgcgggagaagaaacagacccatttcctgcatcaaaacaacaccggtattacgcaaaacttatcgtacattggcggctaa

SEQ ID NO: 483099 - DNA, 513 bp, Shigella sonnei
atgagtcaggtaagcactgaatttatcccgacccgtattgctattcttacggtttctaatcgtcgcggtgaagaagacgatacctccggtcactatttgcgcgattcggcgcaagaagcgggccatcacgttgtcgataaagccattgtgaaagaaaaccgctacgctattcgcgctcaggtatctgcgtggatcgccagcgacgatgtacaagtggtgttgattacgggggggactggcctgacggaaggtgatcaggctcccgaagcattgctgccgttgttcgaccgtgaagttgaaggttttggtgaagtgttccggatgttgtcgtttgaagagattggcacttccacgttgcaatctcgtgcggtagcgggcgtcgccaacaaaacgctgattttcgccatgccgggttcgaccaaagcgtgccgtaccgcatgggaaaatatcatcgcgccgcagctggatgcccgtacgcgtccgtgtaatttccatccacatttgaagaaataa

SEQ ID NO: 483100 - DNA, 486 bp, Shigella sonnei
atgtcgcaactgacccatatcaacgccgctggcgaagcgcacatggtggatgtctccgccaaagcggaaaccgtgcgtgaagcgcgggcggaagcctttgtcaccatgcgcagcgagacgctggcgatgattattgatggtcgccaccacaaaggcgacgtatttgccactgcgcgtattgtcggtattcaggcggcaaaacgcacctgggatctgatcccgctgtgtcacccgctgatgctcagcaaagttgaagtcaatttacaggccgagccggagcacaatcgggtgcgtatagaaaccttatgccgcctgaccgggaaaaccggtgtcgaaatggaagcgttaaccgcggcctccgtggcggcgctgaccatttatgacatgtgcaaagcggtgcaaaaagatatggtgattggtccggtacgtttgctggcgaagagcggcggcaagtcgggtgactttaaggtggaagcggatgattaa

SEQ ID NO: 483101 - DNA, 246 bp, Shigella sonnei; identical to SEQ ID NO: 471879

SEQ ID NO: 483102 - DNA, 453 bp, Shigella sonnei
atggcagaaaccaaaattgttgtcggcccgcagccgttcagcgtaggagaagagtacccgtggctggctgagcgtgacgaagacggtgcagtggtcacgtttaccggtaaggtgcgcaaccataacctgggtgacagcgtcaaagcattaaccctcgaacactatccggggatgactgaaaaagcactggcagaaatcgttgatgaagcgcgtaaccgctggccgctggggcgcgtcacggtgattcaccgcatcggggaattatggccgggcgatgaaatcgtttttgtcggtgtcaccagtgcgcatcgcagcagtgcgtttgaagccgggcagtttattatggattatctcaaaacccgcgcaccgttctggaagcgcgaagccacgccggaaggcgaccgctgggttgaagcccgggagagcgatcagcaggcggcaaaacgctggtag

SEQ ID NO: 483103 - DNA, 705 bp, Shigella sonnei
atggacagattcccacgttctgattcaatcgtacaaccccgggctggcttgcaaacttatatggcgcaagtctatggctggatgaccgttggcttgttgctgaccgcatttgttgcctggtatgcggctaattccgcggccgtgatggagctgttgttcactaaccgtgtctttttaatcggtctgatcatcgcgcaattagcattggttattgtgttatcagcgatgattcaaaagctgagcgcaggtgtaacgacgatgctctttatgctttattcggcgctgacgggtcttacgctttccagtatattcattgtctataccgctgcttctatcgccagtactttcgtcgttactgccgggatgttcggcgcaatgagcctgtacggttacaccacgaagcgcgatttaagtggctttggcaatatgctgtttatggcgttaatcggcattgtgctggcatcgctggtcaacttctggctgaaaagcgaagcattgatgtgggcagttacctacatcggcgtgattgtctttgtcggattgacggcgtatgacactcagaaattgaaaaatatgggtgagcagattgatacccgcgacacgtcgaacctgcgcaaatattccattcttggcgcgttaaccttgtatctggacttcatcaacctgttcctgatgttgttacggatcttcggcaaccgccgttaa

SEQ ID NO: 483104 - DNA, 621 bp, Shigella sonnei
gtggcaaccgcaggactagcctggggagctaagtatctcgaaattacggcaaccaaatatgattcaccaccaatgtatgtcgctatagggttattattactttgtatgtatggcttaagtaaggatatcaacaagataaatgccgccatcgcgggcgtaatatatctgtttttactctctttggtggcgattgtcgttgcaagtttagttcctgtatatgccattatcatcgtgttcagcactgcgggcgcgatgtttttaatcagtatgctggccggtttattatttaatgttgagcctggttctcaccgttttatcattatgatgacgttgacagggttggccctggtaatcatcgtgaatgcggcattaatgagtgaacggcccatttgggtaataagttgcttaatgattgtgttatggccaggcattatctcgcatggacgaaataagctccttgaactggcaggaaaatgccatagtgaagagttgtggagtccggttcgttgcgcttttacaggtgcattaacactctattactattttatcggcttctttgggatacttgccgcgatagctataacgcttgtctggcaaaggcatacgcgtttttttcattag

SEQ ID NO: 483105 - DNA, 591 bp, Shigella sonnei
gtgcggtcgctggtggtcgtcagctatctgatttacggctgctatgacctgctcgcccgcttttactgcggtcacaaactggcgaagcgccaggtgatgctggtgtcgtttatctgctacgccttcaacctgacgctcagtacctgggtcggcggcattggtatgcgctatcgtttgtactctcgtctggggttgcccggtagcactattacgcggattttctcgctcagtattaccaccaactggctgggctatattttactggcagggattatctttaccgcaggcgtggtggagttgccggatcactggtatgtcgatcaaactacgctgcgtattctcggcattggcttactgatgattatcgcggtttatttgtggttttgcgctttcgcgaagcaccgccatatgaccatcaaagggcaaaagctggtgctgccttcatggaaattcgccctcgctcagatgctgatttccagcgttaactggatggtaatgggggcgattatctggctgttacttggtcaaagcgtgaactatttctttgtactgggctacgggcgaaaaatgaagcggcgatgtgaagtttag

SEQ ID NO: 483106 - DNA, 204 bp, Shigella sonnei
atgagtaaatcacacccgcgctggcgcttagcaaagaagatcctcacctggctgttttttatcgcggtgattgtgttgctggtggtctacgccaaaaaagtggactgggaagaggtctggaaggtcatccgcgactacaatcgcgttgcgctgcttagtgcggtcgctggtggtcgtcagctatctgatttacggctgctatga

SEQ ID NO: 483107 - DNA, 1242 bp, Shigella sonnei
atgaaatgtagctggcgcgaaggcaataagatccagttgctggaaaacggcgagcaatattatcccgcggtgtttaaggcgattggcgaggcacaagaacgcatcattcttgaaacgtttatctggtttgaggataacgtcggcaaacagctgcatgcggcactactggcagcagcgcaacgcggggttaaagcggaagtcttgctggatggctacggttcgccggatctcagcgatgagtttgtcaatgaactgacggcagctggcgtagtgttccgctactacgatccccgccctcgcctttttggtatgcgcaccaatgtgtttcgccggatgcatcgcaaaattgtggtgatcgacgcgcgtatcgcctttattggcgggctgaattactccgccgagcatatgtccagctacggtccagaggctaaacaggattacgcggtacgccttgaagggccgattgtcgaagatattctccagtttgagctggaaaacctgcctggacagagcgcggcacgacgctggtggcgacgtcatcacaaagcggaagagaaccgccagccgggagacgcgcaggtattgctggtctggcgcgataacgaagaacaccgcgatgatatagaacgccactatctgaaaatgctcactcaggcgcggcgggaagtcattatcgccaacgcctacttcttccccggctatcgatttttacacgccttgcgtaaagcggcacgccgcggggtgcggatcaaactgatcattcagggcgaaccggatatgccgattgtcagagtcggcgcgcgcttgctgtataactatctggttaaaggcggcgttcaggtgtttgagtaccgccgccgcccgctccacggcaaagtagcattgatggacgatcactgggcgacagtagggtccagtaatctcgatccgctcagtttgtcactgaatctcgaagcaaatgtcatcatccacgatcgtaattttaaccagacgctgcgcgataatctgaacggcattatcgccgcagattgtcagcaggtggatgaaaccatgctgcccaaacgcacctggtggaacctgaccaaaagcgtgctggcgttccactttttacgccacttcccggcgctggttggctggcttccggcacacacgccacgtctggcgcaggttgatccgcccgcacaaccgacaatggaaacgcaggatcgggtagaaactgaaaacacgggggtaaaaccctga

SEQ ID NO: 483108 - DNA, 762 bp, Shigella sonnei
atgcccgatcaaacacaacaattttcgttcaaggtgctcaccatcaacattcacaaaggctttaccgcgtttaaccgacgcttcattttgccggaacttcgcgatgccgtgcgtaccgtcagcgccgatattgtttgcctgcaggaagtgatgggcgcgcacgaagttcatccgctgcatgtggaaaactggcccgatacctcgcactacgagtttctcgccgacactatgtggagcgattttgcctacggtcgcaatgccgtatacccggaagggcatcacggcaacgccgtactgtcgcgttatcccattgaacattatgagaatcgcgatgtttcggtcgatggtgcggaaaagcgcggcgtgctctactgccgcattgtgccgccgatgaccggaaaagcgattcatgtgatgtgcgtacatctgggcctgcgtgaggcgcaccgtcaggcgcagcttgcgatgctcgccgaatgggtgaatgagctaccggacggcgaaccggtattggtggcgggtgatttcaatgactggcggcaaaaagctaatcatccgttaaaagtgcaggccggactggatgagatttttacccgcgcccacggacgcccggcgcgcacgtttccggtgcaatttcctctactacgactggacaggatctacgtcaaaaatgccagcgccagcgcgccaaccgcgttgccgctgcggacatggcgacacctttctgatcatgcccctttaagtgcggagattcatttatga

SEQ ID NO: 483109 - DNA, 411 bp, Shigella sonnei; identical to SEQ ID NO: 471886

SEQ ID NO: 483110 - DNA, 1107 bp, Shigella sonnei
atgtttcatcgcttatggacgttaatccgcaaagagttgcagtcgttgctgcgcgaaccacaaacccgcgcgattctgattttacctgtgcttattcaggtgatcctgttcccgttcgccgccacgctggaagtgactaacgccaccatcgccatctacgatgaagataacggcgagcattcggtggagctgacccaacgttttgcccgcgccagcgcctttacccatgtgctgctgctgaaaagcccacaggagatccgcccaaccatcgacacacaaaaggcgttactactggtgcgtttcccggctgacttctcgcgcaaactggataccttccagaccgcgccgttgcagttgatcctcgacgggcgtaactccaacagtgcgcaaattgccgccaactacctgcaacagatcgtcaaaaattatcagcaggagctgctggaaggaaaaccgaaacctaacaacagcgagctggtggtacgcaactggtataacccgaatcttgactacaaatggtttgtggtgccgtcgctgatcgccatgatcaccactatcggcgtaatgatcgtcacttcactttccgtcgcccgcgaacgtgaacaaggtacgctcgatcagctactggtttcgccgctcaccacctggcagatcttcatcggcaaagccgtaccggcgttaattgtcgccaccttccaggccaccattgtgctggcgattggtatctgggcgtatcaaatccccttcgccggatcgctggcgctgttctactttacgatggtgatttacggtttatcgctggtgggattcggtctgttgatttcatcactctgctcgacacaacagcaggcgtttatcggcgtgtttgtttttatgatgcccgccattctcctttccggttacgtttctccggtggaaaacatgccagtatggctgcaaaacctgacgtggattaaccctattcgccactttacggacattaccaagcagatttatttgaaggatgcgagtctggatattgtgtggaatagtttgtggccgctactggtgataacggccacgacagggtcagcggcgtacgcgatgtttagacgtaaggtgatgtaa

SEQ ID NO: 483111 - DNA, 1134 bp, Shigella sonnei
atgagtaacccgatcctttcctggcgtcgcgtgcgggcgctgtgcgtcaaagagacgcggcagatcgttcgcgatccgagtagctggctgattgcggtagtgatcccactgctactgctgtttatttttggttatggcattaacctcgactccagcaagctgcgggtcgggatcttgctggaacagcgtagcgaagcggcgctggatttcacccacaccatgaccggttcgccctacatcgacgccaccatcagcgataaccgtcaggaactgatcgccaaaatgcaggcggggaaaattcgcggtctggtggttattccagtggattttgcggaacagatggagcgcgccaacgccaccgcaccgattcaggtgatcaccgacggcagtgagccgaataccgctaactttgtacaggggtatgtcgaagggatctggcagatctggcaaatgcagcgagcggaggacaacgggcagacttttgaaccgcttattgatgtacaaacccgctactggtttaacccggcggcgattagccagcacttcattatccccggtgcagtgaccatcatcatgacggtcatcggcgcgattctcacctcgctggtggtggcgcgagaatgggaacgcggcaccatggaggctctgctctctacggagattacccgcacggaactgctgctgtgtaagctgatcccttattactttctcgggatgctggcgatgctgctgtgtatgctggtgtcagtgtttattctcggcgtgccgtatcgcggttcgctgcttattctgttttttatctccagcctgtttttactcagtaccctggggatggggctgctgatttccacgattacccgcaaccagttcaatgccgctcaggtcgccctgaacgccgcgttcctgccgtcgattatgctttccggctttatttttcagatcgacagtatgcccgcggtgatccgcgcggtgacgtacattattcccgctcgttatttcgtcagcaccctgcaaagcctgttcctcgccgggaatattccagtggtgctggtggtaaacgtgctgtttttgatcgcttcggcggtgatgtttatcggcctgacgtggctgaaaaccaaacgtcggctggattag

SEQ ID NO: 483112 - DNA, 1737 bp, Shigella sonnei
atgaatgatgccgttatcacgctgaacggcctggaaaaacgctttccgggcatggacaagcccgccgtcgcgccgctcgattgtaccattcacgccggttatgtgacggggctggtggggccggatggtgcaggtaaaaccacgctaatgcggatgctggcgggattactgaaacccgacagcggcaatgccacggtgattggctttgatccaatcaaaaacgacggcgcgctgcacgccgtgctcggctatatgccgcagaaatttggtctgtatgaagatctcacggtgatggagaacctcaatctgtacgcggatttgcgcagcgtcaccggcgaggcacgtaagcaaacttttgctcgcctgctggagtttacgtctcttgggccgtttaccggacgcctggcgggcaagctctccggtgggatgaaacaaaaactcggcctggcctgtaccctggtgggcgaaccgaaagtgttgctgctcgatgaacccggcgtcggcgttgaccctatctcacggcgcgaactgtggcagatggtgcatgagctggcaggcgaagggatgttaatcctctggagtacctcgtatctcgacgaagccgagcagtgccgtgacgtgttactgatgaatgaaggcgagttgctgtatcagggggaaccaaaagccctgacacaaaccatggccggacgcagctttctgatgacaagtccacacgagggcaaccgcaaactgttgcaacgggcattgaaactgccgcaggtcagcgacggcatgattcaggggaaatcggtacgtctgatcctcaaaaaagagaccacaccagacgatattcgccatgccgacgggatgccggaaatcaacatcaacgaaactacgccgcgttttgaagatgcgtttattgatttgctgggcggtgccggaacctcggaatcgccgctgggcgcaatattacatacggtagaaggcacacccggcgagacggtgatcgaagcgaaagaactgaccaagaaatttggtgattttgccgccaccgatcacgtcaactttgccgttaaacacggggagatttttggtttgctggggccaaacggcgcgggcaaatcgaccacctttaagatgatgtgcggtttgctggtgccgacctctggtcaggcgctggtactggggatggatctgaaagagagttctggtaaagcgcgccagcatctcggctatatggcgcaaaagttttcgctctacggtaacctgacggtcgaacagaatttacgctttttctctggtgtgtatggcttacgcggtcgggcgcagaacgaaaaaatctcccgcatgagcgaggcgttcggcctgaaaagtatcgcctcccacgccaccgatgaactgccattaggttttaaacagcggctggcgctggcctgttcgctgatgcatgaaccggacattctgtttctcgacgaaccgacgtccggcgttgatcccctcacccgccgtgaattttggctacatatcaacagcatggtagagaaaggcgtcacggtgatggtcaccacccactttatggatgaagcggaatattgcgaccgcatcggcctggtgtaccgtgggaaattaatcgccagcggtacgccggacgatttgaaagcacagtcggctaacgatgagcaacccgatcccaccatggagcaagcctttattcagttgatccacgactgggataaggagcatagcaatgagtaa

SEQ ID NO: 483113 - DNA, 996 bp, Shigella sonnei
atgaaaaaacctgtcgtgatcgaactggcggtagtggtacttgccgccgtggttgccggaggctactggtggtatcaaagccgccaggataacggcctgacgctgtatggcaacgtggatattcgtacggtgaatcttagtttccgtgttggggggcgcgttgaatcgctggcggtggacgaaggtgatgctatcaaagcgggccaggtgctgggcgaactggatcacaagccgtatgagattgccctgatgcaggcgaaagcgggcgtctcggtggcacaggcgcagtatgatctgatgcttgccgggtatcgcgatgaagaaatcgctcaggccgccgcagcggtgaaacaggcgcaagccgcctatgactatgcgcagaacttctataaccgccagcaaggactgtggaaaagccgcactatttcggcaaatgacctggaaaatgcccgctcctcgcgcgaccaggcgcaggcaacgctgaaatcagcacaggataaattgcgtcagtaccgttccggtaaccgtgaacaggacatcgcccaggcgaaagccagcctcgaacaggcgcaggcgcaactggcgcaggcggagttgaatttacaggactcaacgttgatagccccgtctgatggcacgctgttaacgcgcgcggtggagccaggcacggtcctcaatgaaggtggcacggtgtttaccgtttcactaacgcgtccggtgtgggtgcgcgcttatgttgatgaacggtatcttgaccaggcccagccggggcgcaaagtgctgctttataccgatggtcgcccggacaagccgtatcacgggcagattggtttcgtttcgccgactgctgaatttaccccgaaaaccgtcgaaacaccggatctgcgtaccgacctcgtctatcgcctgcgtattgtggtgaccgacgccgatgatgcgttacgccagggaatgccggtgacggtgcaattcggtaacgaggcaggacatgaatga

SEQ ID NO: 483114 - DNA, 672 bp, Shigella sonnei
atgaataatcctgccatgacaatcaagggtgaacaggcgaaaaaacagctgattgctgccgcactggcgcagtttggtgaatatggaatgaacgccaccacccgcgagatagccgcccaagccgggcagaatatcgctgccatcacctactacttcggttcgaaagaagatttgtacctcgcctgcgcccagtggattgccgattttattggcgagcagttccgtccgcatgccgaggaagccgaacgcttgttcgcccaaccacagcctgatcgggctgccatccgtgaactgctccttcgcgcctgcaggaacatgattaagctgctcacccaggatgacaccgtcaacctcagcaagtttatctcccgtgagcagctctctcccacggcagcctaccacctggtgcacgaacaggtgattagtccgctacacagccacctgacacgcctgattgccgcctggaccggcagcgacgccaatgacacccgcatgatccttcatacccatgcgttgattggtgagattctggcgttccgtcttggcaaagaaacaattctgttacgtaccggctggaccgcgttcgatgaagaaaagaccgaactgatcaaccagacggtgacctgtcatatcgacctgattttgcaaggattatcgcaaaggagtttgtag

SEQ ID NO: 483115 - DNA, 1365 bp, Shigella sonnei
atgtctttcgattatttgggtttaagccctgatatcctgcgcgccgttgccgagcagggttaccgtgaacccacccctattcagcagcaggcgatccctgcggtgctggaaggccgcgacctgatggctagcgcccagaccggcaccggcaaaacagcgggctttacgctgccgctgttgcaacacctgatcactcgccagccgcacgccaaagggcgtcgtccggtacgtgcgctcattcttaccccgacccgtgaactggcggcgcagattggcgaaaacgtccgtgattacagcaaatacctgaacattcgttcgctggtggtgtttggtggtgtgagtattaacccgcagatgatgaaactgcgtggcggcgttgatgtgctggtggcaacgccgggacgtttgctggacctggaacatcagaatgcagtgaagctggatcaggttgaaatcctcgtcctcgatgaagctgaccgcatgctcgacatgggctttatccacgatatccgtcgcgtgttaacaaaactacctgcgaagcgccagaacctgttattctccgcgaccttctctgacgatattaaagccctggcggaaaaactgttgcacaacccgctggaaatcgaagtggcacgccgcaataccgcgtctgatcaggtgacccagcacgttcactttgtcgataagaaacgcaaacgcgaattgctgtcgcacatgattgggaaagggaactggcagcaggtgctggtgtttacccgtaccaaacacggcgctaaccatctggctgaacagctcaataaagatggcatccgtagtgcggcgatccacggcaataaatcgcaaggtgcgcgtactcgtgcgctggctgattttaaatcgggcgatattcgtgtactggtggcaactgacatcgctgcgcgcggcctggatattgaagagctgccgcacgtcgtcaactatgaactgccaaacgtaccggaagattatgtccatcgtatcgggcgtaccggtcgtgcggctgctaccggtgaagcgttgtcgctggtgtgtgttgatgaacacaaactgctgcgtgatatcgaaaaactgctgaaaaaagagatcccgcgcattgcgattccgggctatgagccggacccgtcaatcaaagccgaaccgatccagaacggtcgccagcaacgtggcggcggcggtcgtgggcaaggtggtggtcgcggtcaacagcaaccacgccgtggggaaggtggcgcaaaatctgcaagcgcgaaacctgcagaaaaaccgtctcgccgcctcggcgatgccaaaccggcaggcgaacaacaacgtcgccgccgtccgcgtaaacctgccgctgcgcagtaa

SEQ ID NO: 483116 - DNA, 450 bp, Shigella sonnei
atgcaagacaccatcataaatttctacagcaccagcgatgactacggtgatttttctaactttgccgcctggcccatcaaggttgacgggaaaacctggcccacctccgaacactattttcaggcacaaaaattccttgatgaaaaataccgcgaagagatccgtcgggtttcttcccccatggtcgccgctcgcatggggcgtaatcgttccaagccacttcgtaaaaactgggagtcggttaaagaacaggtgatgcgtaaagcacttcgtgctaaattcgaacagcatgcagaactgcgtgtgctcttgctggcaaccgcgcccgcaaaactggttgagcatacggaaaacgatgcttactggggagacggtggtaatggtaagggcaagaatcgactgggctaccttttaatggagttgcgagaacaattggctatagagaagtaa

SEQ ID NO: 483117 - DNA, 2286 bp, Shigella sonnei
gtgctcgaacgggcattaaaccgcattatgttggtggttattgcgagccgctttccagaaacagaaaaaccattacccctgaaaaccgaaaaatgccacaatattggctgtttatacagtatttcaggttttctcatggcattaaccgccgcgcttaaagcgcaaattgccgcctggtataaggcgcttcaggaacagatccccgactttattccccgtgtgccgcagcggcagatgattgcggacgtcgccaaaacgctggccggagaagaaggccggcatctggcgattgaagcccccaccggcgttgggaaaacgctctcctatttgatccccggcatcgccattgcccgcgaagagcaaaaaacgctggtggtgagtaccgccaacgtggcgttgcaggatcagatttacagcaaagatttaccgctgctgaaaaagatcattcccgatcttaaattcactgccgctttcgggcgtgggcgctacgtttgtccgcgtaatctgacggcgctcgccagcactgaacccacgcaacaggatctgctggcgtttcttgacgacgaactgacggcaaataatcaggaagagcaaaaacgttgtgcgaagctgaagggcgatctcgacacttatagatgggatggtctgcgcgatcatacggatatcgttatagatgatgatctctggcgtcgtttgagtaccgacaaagccagctgcctcaaccgtaactgttactactatcgtgaatgcccgttttttgttgctcgtcgggagattcaggaagcggaagtggtggtggcaaaccatgcgctggtgatggcggcgatggaaagcgaagccgtactgcctgacccgaaaaatctgctgctggtgctggacgaaggtcatcacctgccagatgtggcccgggatgcgctggagatgagcgctgaaatcaccgcgccctggtatcgactacagctggacttgttcacgaaactggtcgctacctgcatggagcagtttcgcccgaagaccatcccaccgctggcgatccctgaacgtttgaatgcgcattgtgaagagttgtatgagcttatcgcctcgttaaacaacattctcaatctctacatgcctgccgggcaggaggcagagcaccgttttgcgatgggcgaactgcctgatgaagtgctggagatctgccagcggctggcaaaactcaccgagatgctgcgtggtctggcggagttatttcttaacgatttaagtgagaaaaccggcagccatgacattgtacgcctgcatcggttgattttgcagatgaaccgcgcgttggggatgttcgaggcgcaaagcaaactctggcggctggcgtctctggcgcaatcttccggtgcgccggtgaccaaatgggcgacgcgggaagagcgcgaagggcaactgcatctctggtttcactgcgtggggatacgtgtcagcgatcagctggaaaggctgctgtggcgcagtattccgcacattattgtcacctccgcaaccttgcgttcgctgaatagtttttcgcgtttgcaggagatgagtggtctgaaagagaaagcgggcgaccgttttgtggcgctggattccccctttaaccactgcgaacagggcaaaattgttattccccggatgcgcgttgagccttccatcgacaacgaagagcagcatattgccgaaatggcggcctttttccgtaagcaggtggagagcaaaaaacatctcggtatgttggtactgtttgccagcggacgggcgatgcagcgctttctcgactatgtgacggatttacgtctgatgttgctggttcagggcgatcagccgcgttaccgtttagttgaactgcaccgcaaacgcgtcgccaacggtgagcgcagcgtgctggtgggcttacagtcatttgccgaagggcttgatttgaaaggtgatctgctcagccaggtgcatatccacaaaatcgcttttccgcccatcgacagccccgtggtgatcaccgaaggggaatggctgaaaagcctcaaccgctatccgtttgaggtgcaaagcctgccgagcgcctcgtttaacctgattcagcaggttgggcgactgattcgaagccacggttgctggggcgaagtggttatctacgacaaacgcttgctgaccaaaaattatggcaagcgactactggatgcattaccggtatttccgatagagcaaccggaagtccctgaaggtatagttaaaaagaaagaaaaaacgaaatccccacgccgtcggcggcgttaa

SEQ ID NO: 483118 - DNA, 963 bp, Shigella sonnei
atggactatcgcaaaatcattaaagagatcgggcgcgggaaaaaccacgcgcgcgatttagaccgggatactgcgcgcggtctgtatgctcatatgctcaatggtgaagtccctgaccttgagttgggcggcgtattgattgcgctgcgtatcaaaggagaaggggaagcagagatgctcggcttttacgaagccatgcaaaatcacaccatcaagctgacgccgccagcaggcaagccgatgccgattgtcatccccagttacaacggcgcgcgtaaacaggccaacctgacgccgttgttggcgattctcctgcacaaactcggttttcctgtggtggttcacggggttagcgaagatccaacccgcgtgctgactgaaaccatttttgaattgatgggtattacgccaacgttgcacggcgggcaggcgcaggcgaagctcgacgaacatcaaccggtgtttatgccagtcggcgcgttttgcccgccgctggaaaaacaactggcgatgcgctggcggatgggcgtgcgtaacagtgcacataccctggcgaaactggcgacgccatttgccgaaggtgcggcgctgcgtctttccagcgtttcgcatccggaatatattggacgcgtcgcgaagttctttagcgatatcggcgggcgggcgctactaatgcatggtactgaaggtgaagtgtatgctaatccgcagcgctgcccgcagatcaatctcattgaccgtgaagggatgcgggtgctgtatgaaaaacaggacactgctggtagcgagttactgccacaagcaaaagatccggaaaccacggcgcagtggattgagcgttgccttgctggcagcgaaccgattcccgaatcgctgaaaatccagatggtttgctgcctggtggctacgggtgaagcggcaactatcagcgacggcctggcgcgcgttaatcaggcattttaa

SEQ ID NO: 483119 - DNA, 1086 bp, Shigella sonnei
atggaaagtggtcatcgctttgatgctcagacgctgcacagttttattcaggctgtatttcgtcagatgggtagcgaggaacaagaagcgaaattagttgccgatcatttaatcgcggcaaacctggcagggcatgattcacatggtattggcatgatcccaagctatgtacgctcctggagtcaggggcacctgcaaattaaccatcatgccaaaaccgttaaagaggcgggggcggcggtcacgctcgatggcgatcgcgcatttggtcaggtcgcggcacatgaagcgatggcgctggggattgagaaagcgcatcagcacggtattgccgccgtggcgctacataactcgcatcatatcggccgtatcggttactgggcggagcagtgtgcagcggcggggtttgtctctatccactttgttagcgtggtcggtattccaatggtcgcgccgttccacggtcgcgacagccgctttggcaccaatccgttctgtgtggttttccctcgtaaagataatttcccgctgttgcttgattacgccaccagcgccattgcatttggcaaaacccgcgtcgcctggcataaaggcgtccccgtgccgccaggttgcctgattgacgttaacggcgtgccgacgaccaatccggcggtaatgcaggagtcgccgttgggttcgctgttgacctttgccgaacataaaggctacgcccttgcagcgatgtgtgaaattcttggcggggcgctttccggcggtaaaacgacgcatcaggaaacgttacaaaccagtcccgatgccattcttaactgcatgaccactatcatcatcaacccggaactcttcggcgcgccggattgtaacgcgcagaccgaagcctttgccgagtgggtgaaagcctcgccacatgatgatgataagccgattttgctaccgggcgagtgggaagtgaacacgcgtcgcgaacggcagaagcaggggattccactggatgcgggaagctggcaggccatttgtgatgcagcgcggcagattggtatgccggaagagacgttgcaggctttctgtcagcagttagccagctaa

SEQ ID NO: 483120 - DNA, 261 bp, Shigella sonnei
atgaaaactatcaatactgttgttgctgctatggctctttcaactctgtcatttggcgtgttcgcggcggaaccgataacggcatcccaggcacagaacatgaataaaatcggcgtggtttctgccgatggcgcatccaccctcgatgccctggaagcgaaactggctgagaaagccgcggcagccggtgccagtggatacagcatcacttccgccaccaacaacaataaattaagcggtactgcggtaatttataagtaa

SEQ ID NO: 483121 - DNA, 267 bp, Shigella sonnei
atggcatccggttgggctaacgatgacgccgtcaacgaacagatcaacagtacaattgaagatgcgattgcccgcgctcggggtgaaattccgcgcggcgaaagcctggatgaatgtgaagagtgcggtgcccccatcccgcaggcccgtcgggaagccattcctggcgtgcgcttatgtattcattgtcagcaggagaaagatttacaaaaaccagcttatacaggatataatcgcagaggttcgaaagacagccagttacgttaa

SEQ ID NO: 483122 - DNA, 675 bp, Shigella sonnei
atgtaccacattcccggcgtgttatcgccacaggacgtcgcccggtttcgcgaacaactggaacaagccgaatgggtggatggacgcgtcaccaccggcgcacaaggtgcgcaagttaagaacaatcaacaggtcgacacccgcagcacgttatacgccgccctgcaaaatgaggtgctgaacgcggttaaccaacatgctttgttctttgccgcggccttgccgcgtaccctttccacgccgctgtttaatcgctatcagaacaatgaaacctatggtttccatgtggatggcgcagtacgcagccatccacaaaacggctggatgcgtactgacctttctgccacgctgtttttaagcgatccacaaagctacgacggcggcgaactggtcgttaatgacaccttcggacaacatcgggtaaaactcccggcaggcgatctcgtgttgtatccctccagcagccagcattgcgtgccacccgtaacccgcggcgtacgagtggcatcatttatgtggatccagtcgatgatccgcgatgataaaaagcgcgccatgctgtttgaactggacaacaatattcagtcgctgaaaagccgctacggcgaaagtgaagagatcctgtcgctgcttaatctttatcataatctgctgcgggaatggtcggagatctga

SEQ ID NO: 483123 - DNA, 1176 bp, Shigella sonnei
gtgagtaataaaattctcaccaaccagaccaacctgacctcgacgttctataccggttctatcggtcatgatgtcagtaccggcgtggaatttacccgtgaaacgcagactaactacggcgttaatccggtgacgttacccgcggtaaatatttatcatcctgacagcagcattcatcccggcggcctgacgcgcaacggcgcaaacgccaatggtcagacggataccttcgcaatttacgcctttgatacgctgcaaatcacccgtgattttgagctgaacggcgggatccgtctggataattatcatactgaatatgacagtgccaccgcctgcggcggcagcggacgcggtgccatcacctgcccaactggtgtggcaaaaggttctccggtcaccaccgtcgacaccgccaagtcgggcaatctgatgaactggaaagccggggcgctgtatcacctgacggaaaacggcaatgtctatattaactatgccgtttcccagcagcctccgggcggcaacaacttcgcccttgcgcagtctggcagcggtaacagtgccaaccgcaccgattttaaaccgcaaaaagccaacaccagcgagattggcaccaaatggcaggttctggataaacgtctgttgctcaccgccgcgctgttccgtactgatatcgaaaatgaagttgagcaaaatgatgacggaacttactcgcaatacggtaagaaacgcgtcgaaggctatgagatatccgtggccgggaatatcactcccgcgtggcaggtgattggcggctatacccagcaaaaagcaaccatcaaaaacggcaaagatgttgcccaggatggttcctcatcgctgccgtataccccggagcacgccttcaccttatggagccaatatcaggcaaccgacgatatctctgttggcgcgggcgcacgctatatcggcagtatgcataaaggttcagacggcgcggtgggaacgccagcatttaccgaaggttactgggtcgccgatgccaaactggggtatcgggttaatcgcaatctcgacttccagctaaacgtctacaacctgtttgatactgattacgtcgcctcaatcaacaagagcggctaccgttatcacccgggcgagccaagaaccttcttgctcacagccaatatgcatttctga

SEQ ID NO: 483124 - DNA, 777 bp, Shigella sonnei
gtgggtgcgttttttgcgggtgagaacggtaactccaccactggcgacgccatttatatgcgtggtgccgatacctctaacagtatttatattgatggcattcgcgatatcggcagcgtctcgcgcgacaccttcaataccgagcaggtcgaagtgattaaagggccgtccggcaccgactacgggcgcagcgcaccgacgggctcgatcaatatgatcagcaaacagccgcgcaatgattccggcattgacgcctccgccagtattggcagcgcctggttccgccgcggcacgctggacgtcaatcaggtcattggtgataccaccgcggtgcgcctgaatgtaatgggcgaaaaaacgcacgatgccggacgcgacaaagtcaaaaatgagcgttacggcgtcgccccttctgtcgcttttggccttggtacagcgaatcgtttgtatcttaattatctgcatgtcacccagcacaacacgccagacggcggcattccgaccatcggtttgccgggctattctgccccatctgcgggaacggcggccctgaatcattccggaaaagttgatactcataacttttacggcacggattccgattacgacgattcgaccaccgacaccgccaccatgcgttttgagcacgacatcaacgataacaccaccattcgcaatactacccgttggtcgcgcgtaaagcaggattacctgatgacggcgattatgggcggggcgtcgaatattactcagcccaccagcgatgtgaatagctga

SEQ ID NO: 483125 - DNA, 216 bp, Shigella sonnei
atgggtgctggtatcgggtatctgctctatgaacagatcaaggagtaccttgataccggtcgtttagaatgtgtactggaagactggatcacagagcgtccaggcttccagatctattacccaaaccgccagtatatgtcctgcggcttgcgcgcatttctcgattatgtaaaaacgggtcagatctgccagagtcagcgtcaccgaccacaataa

SEQ ID NO: 483126 - DNA, 1086 bp, Shigella sonnei
atgaaaggcgacggttcgctaatcaaagaatattcagtcgtagcgttacaggggttaacgctggtgctgtttatcttctttatgtgggttgcttcacgcggtatgaaatcgctgaaaatcgtcggttctgtggcagggattgctatgtttgttatgtcgctcctgtatgtggcgatggcggtaaccgcgcctgcaattactgaagtgcatattgcgaccacaaacattacctgggaaacgttcattcctcatatcgactttacctacattaccactatttcaatgctggttttcgcggttggcggagcagagaagatttctccttacgttaatcaaacgcgcaacccaggaaaagaatttccaaaagggatgttatgcctggcggtgatggttgcggtttgtgccattctgggctcgctggcgatggggatgatgtttgattcgcgtaatatcccggatgacttaatgaccaacggtcagtattacgcctttcagaagctgggcgagtattacaacatgggtaatactttaatggtgatttacgccattgcgaataccctgggacaagtagcggcgctggtattctcgattgatgccccgcttaaagtgctattaggtgatgctgacagcaaatatattccagccagtttatgtcgtaccaacgcttctggtacgcccgttaatggctattttctgaccctggtactggtggcgattctgattatgctgccgactctcggcattggtgatatgaacaatctctataaatggctgttgaaccttaattcggtagtgatgccgctgcgttatttatgggtatttgttgcatttattgcagtcgttcgcctggcgcagaaatataaaccagaatatgtctttattcgtaataagcctctggcaatgaccgtcgggatttggtgttttgcctttaccgcctttgcctgtttgacggggatcttcccgaaaatggaagccttcactgcagagtggaccttccagttggcgctgaatgttgcaacgccgtttgtgctggtaggattaggactgatattcccgctgctggcgcgtaaagcgaatagtaaataa

SEQ ID NO: 483127 - DNA, 318 bp, Shigella sonnei
atggctgggaatgttcaggaaaaacagctgcgatggtacaacattgcgctgatgtcttttatcactgtctggggttttggcaacgttgttaataactacgccaaccaggggctggtggttgttttttcatgggtgtttatctttgcgctctatttcacaccttatgcgctaattgttggtcagttaggctcgaccttcaaagatgggaagggcggggtcagtacctggattaaacacacgatgggacccggactggcttatctcgccgcgtggacctactgggtggtgcatattccctatctggcacaaaaaccctag

SEQ ID NO: 483128 - DNA, 1149 bp, Shigella sonnei
atgtccacgtatacccggcctgtcatgcttttgctgtctggcctgcttttgttgactctggcgatcgcggtgttaaatacactcgtgccgctttggctcgcccaggaacacatgtccacatggcaggtaggcgttgtcagctcatcctattttaccggcaaccttgtcggtacattgctgacagggtatgtcattaaacgcattggttttaaccgcagctattatctggcctccttcatttttgccgctggctgtgccggccttggcctgatgattggattctggagttggttggcgtggcgttttgtcgcgggcgtcggctgtgccatgatttgggtagtcgttgagagcgcgctgatgtgcagtgggacgtcacgtaaccgtgggcgtttgcttgctgcatacatgatggtttattacgtgggaacgtttttaggccagttactggtcagcaaggtctcaaccgagctgatgagcgtattgccgtgggttacaggtttgacattggcagggatcttaccgctgttgtttacgcgtgtcctgaatcagcaggctgaaaaccatgattcgacgtcaattacggcaatgctaaaactccgtcaggcgcggcttggcgtgaatggctgcattatctcaggaatcgttctgggatctctatatggcctgatgcctctgtacctcaatcacaaaggggtgagcaatgccagtattggtttctggatggcggtactggtcagtgcgggtatcctcggacaatggccgattggacgtctggcggataagtttggtcgactgctggttttgcgtgttcaggtctttgtcgtcattctcggcagtattgcgatgcttagccaggcggcgatggccccagcgttattcatcctcggtgccgctggctttacgctatatccggtggcgatggcatgggcttgcgagaaagttgaacatcatcaactggtggcgatgaaccaagccttactgttgagctatactgtgggaagtctgcttggcccgtcatttaccgctatgctaatgcagaatttctccgataatttattgtttatcatgatcgccagcgtatcgtttatctatttgctgatgctgctgcgcaacgccggtcatacgccgaaacccgttgctcacgtgtaa

SEQ ID NO: 483129 - DNA, 627 bp, Shigella sonnei
atgaccaaaccgtatgttcgtcttgataaaaatgatgctgctgttttgcttgttgatcaccaggctggtttactttcccttgtacgggatatcgaacccgataagtttaaaaataacgtgctggcgctgggtgacctggctaagtatttcaacttaccaactattcttaccaccagttttgaaaccggtcctaacggcccattagttccagaactgaaagcacaattccccgatgcaccttacattgctcgcccgggcaatattaacgcctgggataacgaagattttgtaaaagcagtcaaagcgacaggtaaaaaacagttaattattgccggtgtggtaaccgaagtttgcgtggcattcccggcgctttcagccattgaagaagggtttgatgtgtttgttgtgactgacgcgtcagggacctttaatgaaattacccggcattcggcatgggatcgcatgtcgcaagcaggtgcgcaattgatgacatggttcggcgtggcttgcgagctgcaccgtgactggcgtaatgatattgaaggactggcgacgttgttctctaaccatattcctgattatcgtaatttgatgaccagttatgacacgttaacgaagcagaaataa

SEQ ID NO: 483130 - DNA, 864 bp, Shigella sonnei
atgggaagtggatggcatgaatggccgctgatgatcttcacggtcttcgggcaatgtgtggcgggtggttttatcgttctggctttggcgctgctcaaaggcgacctgcgagcagaagcccagcagcgtgttatcgcctgcatgtttggcttatgggtgctgatgggcattggctttatcgcttctatgctccatcttggttcaccgatgcgcgcttttaactcgctcaaccgggtaggggcttcagcactcagtaacgaaatcgccagcggttcgatcttttttgccgtaggcggcatcggctggttgctggcaatgctgaaaaagctgtcaccggcattgcgtacgctttggctggtggtgacgatggttcttggcgtcgtctttgtctggatgatggtgcgtgtgtataacagcattgataccgttccgacctggtacagcatctggacgccgatgggcttcttcctgacgatgttcatgggcggcccgttactggggtacctgttgctgagtctggctggcgtcgatagctgggcgatgcgtctgctgccagccatttccgtactggcactggtggtgagtggcgtggtgtcagtgatgcagggcgcagagctggcgactattcatagttctgtgcagcaggccgcagcgctggtgccggactatggtgcgctgatgtcctggcggatcgtgcttttggccgttgccctgtgcttgtggattgcaccacagctaaaaggttatcagcctgcggttccgctactatccgtctcattcattctgcttctggcaggggaattaatcggtcgcggcgtattctatggtttgcatatgaccgtggggatggccgtcgcaagctaa

SEQ ID NO: 483131 - DNA, 618 bp, Shigella sonnei
atgacaacccagtatggattttttattgattccagccgttgcaccggttgcaaaacctgcgagctggcttgtaaagactacaaagatttgacgccagaagtcagcttccgccgcatttatgaatatgctggcggcgactggcaggaagataacggtgtctggcaccagaacgtgtttgcctactatctgtcgatttcgtgcaaccactgcgaagatccggcttgtactaaagtctgcccgagcggtgcgatgcataaacgtgaagatggttttgttgtggtcgatgaagatgtgtgcattggctgccgctactgccatatggcttgcccgtatggcgcaccgcaatataacgaaacgaaaggccatatgaccaaatgcgatggttgttatgaccgtgttgcggagggtaaaaagccgatctgtgttgaatcttgtccgctgcgggcgctggatttcggccctatcgacgagctgcgtaaaaaacatggcgatctggcggccgttgcgccgttgccgcgagctcactttaccaaaccgaatattgtgatcaaacccaatgccaatagccgcccgaccggggataccactggctatctggcaaacccgaaggaggtgtga

SEQ ID NO: 483132 - DNA, 2445 bp, Shigella sonnei
atgaaaacgaaaatccctgatgcggtattggctgctgaggtgagtcgccgtggtttggtaaaaacgacagcgatcggcggcctggcaatggccagcagcgcattaacattaccttttagtcggattgcgcacgctgtcgatagcgccattccaacaaaatcagacgaaaaggttatctggagcgcctgtacagttaactgtggtagtcgctgcccgctacgtatgcacgtcgtggacggtgaaatcaaatatgtcgaaacggacaataccggcgatgacaattacgacggcctgcaccaggttcgcgcctgcctgcgtgggcgttccatgcgtcgccgtgtctacaatccggaccgcctgaaatatccgatgaaacgagtcggggcgcgcggtgaaggcaaattcgagcgcattagctgggaagaagcctacgacatcatcgcgaccaatatgcagcgcctgatcaaagagtacggcaacgagtctatctatctgaactatggcaccggtacgctgggcggcaccatgacccgctcctggccgccgggaaataccctggtcgcgcggctgatgaactgctgcggcggctatctgaaccattacggcgactactcctccgcgcaaattgcggaaggtttgaactatacctacggcggctgggcagatggcaacagcccgtcggatatcgaaaacagtaagctggtagtgctgtttggtaataaccctggcgaaacgcgaatgagtggcggtggggtgacttactatcttgaacaggcacgccagaaatctaatgcccgcatgatcatcatcgatccgcgctataccgacaccggtgccgggcgcgaagatgagtggatccctattcgtccgggaacagatgccgcactggttaacggtctggcgtacgtcatgatcactgaaaacctggtggatcaggcattcctcgataaatattgcgttggctacgatgagaaaaccctgccagccagtgcgccgaaaaatggccactataaagcttatattctgggtgaagggccagatggcgtggctaaaacaccggaatgggcctcacaaatcaccggtgttccggcagacaaaatcatcaaactggctcgtgaaatcggcagtaccaaaccggcgtttatcagccagggatggggcccgcagcgtcacgctaacggtgaaatcgcaacccgtgctatctcgatgctggcgattctgaccggtaacgttggtattaatggagggaacagcggcgcgcgtgaaggttcatacagcttaccgtttgtccgtatgccgaccttggaaaacccgatccagaccagcatttcgatgtttatgtggaccgatgccattgaacgtggcccggaaatgacggcgctgcgtgatggtgtacgcgggaaagataagctggatgtgccgatcaaaatgatctggaactatgccggtaactgcctggttaaccagcattctgaaatcaaccgtacccatgaaatccttcaggatgataagaagtgcgagctgattgtggttatcgactgccacatgacctcatcggcgaaatatgctgacatcctgctgcctgactgcaccgcttccgaacagatggactttgcgctggatgcatcctgcgggaatatgtcttacgtgattttcaacgatcaggtgattaaaccgcgctttgaatgtaagaccatctatgaaatgaccagcgaactggcaaaacgtcttggcgttgagcaacagtttactgaaggccgtacccaggaagagtggatgcggcatctgtatgcccagtcgcgggaagcgattcctgaactgccaacgtttgaagagttccgcaagcaggggatctttaaaaagcgcgacccacaagggcatcacgttgcttataaagccttccgtgaagatccgcaggcaaacccactgactacgccatcgggcaaaattgagatttattcgcaggcgctggctgacattgccgctacctgggaattgccagaaggcgatgtgatcgatccactgccgatctacacgccgggctttgaaagttatcaggatccgctgaacaaacagtatccgctgcagcttacgggtttccactataaatctcgcgttcactcaacttacggcaacgttgatgtgctgaaagcagcttgccgtcaggaaatgtggatcaacccgcttgatgcgcaaaaacgcggtatcaacaacggcgataaagtcaggatctttaacgatcgtggtgaagttcatattgaggcgaaagtgacgccacgaatgatgccaggtgtggtcgcactgggtgaaggtgcctggtatgacccggatgcaaaacgtgtcgataagggtggttgtattaacgtactgaccactcaacgtccgtctcctctcgctaaggggaatccgtcacatacaaaccttgttcaggttgaaaaggtgtaa

SEQ ID NO: 483133 - DNA, 1293 bp, Shigella sonnei
atgctcgatcccaatctgctgcgtaatgagccagacgcagtcgctgaaaaactggcacgccggggctttaagctggatgtagataagctgggcgctcttgaagagcgtcgtaaagtattgcaggtcaaaacggaaaacctgcaagcggagcgtaactcccgatcgaaatccattggccaggcgaaagcgcgcggggaagatatcgagcctttacgtctggaagtgaacaaactgggcgaagagctggatgcagcaaaagccgagctggatgctttacaggctgaaattcgcgatatcgcgctgaccatccctaacctgcctgcagatgaagtgccggtaggtaaagacgaaaatgacaacgttgaagtcagccgctggggtaccccgcgtgagtttgactttgaagttcgtgaccacgtgacgctgggtgaaatgcactctggcctcgactttgcagctgcagttaagctgactggttcccgctttgtggtaatgaaagggcagattgctcgcatgcaccgcgcactgtcgcagtttatgctggatctgcataccgaacagcatggctacagtgagaactatgttccgtacctggttaaccaggacacgctgtacggtacgggtcagctgccgaaatttgctggcgatctgttccatactcgtccgctggaagaagaagcagacaccagtaactatgcgctgatcccaacggcagaagttccgctgactaacctggtgcgcggtgaaatcatcgatgaagatgatctgccaattaagatgaccgcccacaccccatgcttccgttctgaagccggttcatatggtcgtgacacccgtggtctgatccgtatgcaccagttcgacaaagttgaaatggtgcagatcgtgcgcccggaagactcaatggcggcgctggaagagatgactggtcatgcagaaaaagtcctgcagttgctgggcctgccgtaccgtaaaatcatcctttgcactggcgacatgggctttggcgcttgcaaaacttacgacctggaagtatggatcccggcacagaacacctaccgtgagatctcttcctgctccaacgtttgggatttccaggcacgtcgtatgcaggcacgttgccgcagcaagtcggacaagaaaacccgtctggttcataccctgaacggttctggtctggctgttggtcgtacgctggttgcagtaatggaaaactatcagcaggctgatggtcgtattgaagtaccagaagttctgcgtccgtatatgaacggactggaatatattggctaa

SEQ ID NO: 483134 - DNA, 1344 bp, Shigella sonnei
gtgagcaatctgtcgctcgatttttcggataatacttttcaacctctggccgcgcgtatgcggccagaaaatttagcacagtatatcggccagcaacatttgctggctgcggggaagccgttgccgcgcgctatcgaagccgggcatctgcattctatgatcctctgggggccaccgggtaccggcaaaacaaccctcgctgaagtgattgcccgctatgcgaacgctgatgtggaacgtatttctgccgtcacctctggcgtgaaagagattcgcgaggcgatcgagcgcgcccggcaaaaccgcaatgcaggtcgccgcactattctttttgttgacgaagtgcaccgattcaacaaaagccagcaggatgcatttctgccacatattgaagacggcaccatcacttttattggcgcaaccactgaaaacccgtcgtttgagcttaattcggcactgctttcccgtgcccgtgtctatctgttgaaatccctgggtacagaggatattgagcaagtactaactcaggcgatggaagacaagacccgtggttatggtggtcaggatattgttctgccagatgaaacacgacgcgccattgctgaactggtgaatggcgacgcgcgccgggcgttaaatacgctggaaatgatggcggatatggccgaagtcaatgatagcggtaagcgggtcctgaagcctgaattattgaccgaaatcgccggtgagcgaagcgcccgctttgataacaaaggcgatcgcttttacgatctcatttccgcactgcataagtcggtacgtggtagcgcacccgatgcggcgctctactggtatgcgcgaattattaccgctggtggcgatccgttatatgtcgcgcgtcgttgcctggcaattgcttccgaagatgtcggcaatgccgacccacgggcgatgcaggtggcaattgcggcctgggattgctttactcgcgttggcccggcggaaggtgaacgcgccattgctcaggcgattgtttacctggcctgcgcgccaaaaagcaacgctgtctacactgcgtttaaagctgcgctggcggatgctcgcgaacgcccggattatgacgtgccggttcatttgcgtaatgcgccgacgaaattaatgaaggaaatgggctatgggcaggaatatcgttacgctcatgatgaagcaaacgcttatgctgccggtgaggtttacttcccgccggaaatagcacaaacacgctattatttcccgacaaacaggggccttgaaggcaagattggcgaaaagctcgcctggctggctgaacaggatcaaaatagccccataaaacgctaccgttaa

SEQ ID NO: 483135 - DNA, 612 bp, Shigella sonnei; identical to SEQ ID NO: 458597

SEQ ID NO: 483136 - DNA, 4068 bp, Shigella sonnei
ttgagccaggaatacactgaagacaaagaagtcacattgacaaagttaagtagcggccgccgccttctggaggcgttgctgatccttattgtcctgtttgccgtctggttgatggctgccttactaagctttaacccttcggaccccagctggtcgcaaacggcctggcatgaacctatccataatttaggtgggatgcccggtgcgtggttggcagatacgctgttctttatttttggcgtgatggcttacaccattcccgtcattattgtcggcggttgttggtttgcctggcgtcatcagtccagcgacgaatacattgattattttgccgtttcgctacgcatcattggcgttttggcgctcatccttacctcctgtggtctggcggcaatcaacgctgacgatatctggtattttgcctccggtggcgtcattggcagcttactaagcactacgctacaaccactgctacacagtagcgggggaactattgcgctgctctgcgtttgggcagcgggcctgacgttgttcaccggttggtcatgggtgaccattgctgaaaaactcggcggctggattttaaacattctcaccttcgccagtaatcgtacccgtcgcgatgatacctgggtcgatgaagatgagtatgaagacgacgaagagtatgaagatgaaaatcacggcaaacagcatgaatcacgccgtgcccgtattcttcgcggcgcgctagcgcgtcgtaaacggttggcggaaaaattcattaatccgatggggcggcaaacagacgctgcgttgttctccggtaagcggatggatgatgacgaagagattacctacactgcacgcggtgtggctgccgaccctgacgacgtcctattttcgggcaatcgtgcaacgcagccagaatatgacgaatacgatccattattaaacggtgcgccaattaccgaacctgtcgctgtagcagctgctgctaccacggcggcacaaagctgggctgcgccggttgaacctgtgactcagacgccgcctgttgcctctgttgatgttccaccttcgcaacctacagtagcctggcagcctgtaccgggtccacaaacgggagagccggttattgctcctgcaccggaaggttacccacagcagccacaatatgcgcagcctgcagtgcaatataatgagccgctgcaacaaccagtacagccacagcagccgtattatgcacctgcagctgaacaacctgtgcaacaaccttactacgctcctgcggcggaacaacctgttcagcaaccgtattacgcccctgcgccagaacaaccggtggcaggtaacgcctggcaagccgaagagcagcaatccacttttgctccacagtctacataccagactgagcaaacttatcagcaaccagccgctcaggagccgttgtaccaacagccgcaacccgttgaacagcagcctgttgtggagcctgaacccgttgtagaagagacaaaacccgcgcgtccgccactttactattttgaagaagtggaagagaagcgagcccgtgaacgtgaacaacttgcggcctggtatcaaccgattccagaaccggttaaagaaccagaaccgatcaaatcttcgctgaaagcaccttctgttgcagcagtacctccagtagaaaccgctgccgctgtttctccgctggcatctggcgtgaaaaaagcgacactggcgacgggggctgccgcaaccgttgccgcgccagtcttcagtctggcaaatagcggtggaccgcgtccgcaggtcaaagaggggattggcccgcagttgccacgaccgaaacgtatccgcgtgccaactcgccgtgaattggcgtcttacggtattaagctgccctcacagcgtgcggcggaagaaaaagcccgtgaagcccagcgcaatcagtacgattctggcgatcagtacaacgatgatgaaatcgatgcgatgcagcaggatgaactggcacgtcagttcgcccagacacagcagcaacgctatggcgaacagtatcaacatgatgtgcccgtaaacgcagaagatgcagatgctgcggcagaggctgaactggctcgtcagtttgcgcaaactcaacaacaacgttattccggcgaacaaccggctggggcgaatccgttctcgctggatgattttgaattttcgccaatgaaagcgttgctggatgatggtccacacgaaccgttgtttacgccaattgttgaacctgtacagcagccgcaacaaccggttgcaccgcagcagcagtatcagcagccacaacagccggttgcgccacagcagcaatatcagcagccgcaacagccggttgcgccgcagccacaatatcagcagccgcaacaaccggttgcgccacagcagcaatatcagcagccgcaacaaccagttgcgccgcagccgcagtatcaacagccgcaacaaccggttgcgccgcagcagcagtatcagcagccacaacagccagttgcgccacaaccgcaggataccctgcttcatccgctgttgatgcgtaatggcgacagccgtccgttgcataaaccgacgacgccgctgccttctctggatttgctgacaccgccgccgagcgaagtggagccggtagatacctttgcgcttgaacaaatggctcgcctggtggaagcgcgtctggctgatttccgtattaaagccgatgttgtcaattactctccggggccggttatcactcgctttgaattgaacctggcaccgggcgtaaaagcggcgcgcatttctaacttgtcacgggaccttgcccgttcactttcgacggtggcggtgcgtgtcgttgaagttattcctggcaaaccctatgtaggtctggagttaccgaataaaaaacgacaaaccgtttatctgcgcgaagttttggataacgccaaattccgcgataatccgtcgccattaaccgtggtgctgggtaaagatatcgccggtgagccggtggttgccgatctggcgaaaatgccgcacttgttggttgcggggactaccggttccggtaaatctgtcggtgtgaacgcgatgatcctgagcatgctttataaagcacagccagaagatgtgcgtttcatcatgatcgacccgaaaatgctggagctttcggtttatgaaggcattccgcatctgttaacggaagtcgttactgatatgaaagatgccgccaacgcgctgcgctggtgtgttaacgagatggagcgtcgttataaactgatgtctgcgctgggtgtgcgtaatctggcgggttataacgaaaaaattgctgaagccgatcgcatgatgcgtccgattccagacccgtactggaagccgggtgacagtatggatgcccagcatccggtgctgaaaaaagaaccatacattgtggtgttggttgacgaatttgccgacctgatgatgacggtaggtaaaaaagtggaagagctgatagcacgtctggcgcaaaaagcccgtgccgcgggtatccacctcgtactggcaactcagcgtccatcggttgatgttattactggtctgattaaagcgaatattccgacccgtatcgcctttaccgtatccagtaagattgactcacgtaccattcttgatcaggctggcgcggaatcactgctggggatgggggatatgctctactctgggccgaactccacgttgccggtacgtgtccatggtgcttttgttcgcgatcaggaagttcatgccgtggtgcaggactggaaagcgcgtggtcgcccacagtatgttgatggcatcacttccgacagtgaaagcgaaggtggcgcgggcggtttcgatggcgctgaagaactggatccgttgttcgatcaggcggtgcagtttgtcactgaaaaacgcaaagcgtcaatttctggcgtacagcgtcagttccgcattggttataaccgtgcagcgcgtattatcgaacagatggaagcgcaggggattgtcagcgaacaggggcacaacggtaatcgtgaagtgctggctccaccgccgtttgactaa

SEQ ID NO: 483137 - DNA, 495 bp, Shigella sonnei
atggtagatagcaagaagcgccttggcaaagatctcgaccgtatcgatcgtaacattcttaatgagttgcaaaaggatgggcgtatttctaacgtcgagctttctaaacgtgtgggactttccccaacgccgtgccttgagcgtgtgcgtcggctggaaagacaagggtttattcagggctatacggcgctgcttaacccccattatctggatgcatcacttctggtattcgttgagattactctgaatcgtggcgcaccggatgtgtttgaacaattcaataccgctgtacaaaaacttgaagaaattcaggagtgtcatttagtatctggtgatttcgactacctgttgaaaacacgcgtgccggatatgtcagcttaccgtaagttgctgggggaaaccctgctgcgtctgcctggcgtcaatgacacacggacatacgttgttatggaagaagtcaagcagagtaatcgtctggttattaagacgcgctaa

SEQ ID NO: 483138 - DNA, 966 bp, Shigella sonnei
atgggcacgaccaaacacagtaaactgcttatcctgggttcaggcccggcgggatacaccgctgctgtctacgcggcgcgcgccaacctgcaacctgtgctgattaccggcatggaaaaaggcggccaactgaccaccaccacggaagtggaaaactggcctggtgatccaaacgatctgaccggtccgttattaatggagcgcatgcacgaacatgccaccaagtttgaaactgagatcatttttgatcatatcaacaaggtggatctgcaaaaccgtccgttccgtctgaatggcgataacggcgaatacacttgcgacgcgctgattattgccaccggagcttctgcacgctatctcggcctgccctctgaagaagcctttaaaggccgtggggtttctgcttgtgcaacctgcgacggtttcttctatcgcaaccagaaagttgcggtcatcggcggcggcaataccgcggttgaagaggcgctgtatctgtctaacatcgcttcggaagtgcatctgattcaccgccgtgacggtttccgcgcggaaaaaatccttattaagcgtctgatggataaagtggagaacggcaacatcattctgcacaccaaccgtacgctggaagaagtgaccggcgatcaaatgggtgtcactggcgttcgtctgcgcgatacgcaaaacagcgataacatcgagtcactcgacgttgccggtctgtttgttgctatcggtcacagcccgaatactgcgattttcgaagggcagctggaactggaaaacggctacatcaaagtacagtcgggtattcatggtaatgccacccagaccagcattcctggcgtctttgccgcaggcgacgtgatggatcacatttatcgccaggccattacttcggccggtactggctgcatggcagcacttgatgcggaacgctacctcgatggtttagctgacgcaaaataa

SEQ ID NO: 483139 - DNA, 1767 bp, Shigella sonnei
atgaataaatctcgtcaaaaagagttaacccgctggttaaaacagcaaagcgtcatctcccaacgttggctgaatatttctcgtctgctgggctttgtaagcggcatattgatcattgcccaggcctggttcatggcgcgaattctgcaacatatgattatggagaatattccccgtgaagccctgctgcttccctttacgttactggttctgacctttgtactgcgcgcatgggcggtctggttacgcgaacgggtgggttatcacgccgggcagcatatccgctttgccatccgccgtcaggttctcgaccgtctgcaacaagcagggccagcgtggattcagggtaaacctgcggggagctgggcgacgctggtactcgagcaaattgacgatatgcatgattactatgcacgctacctgccgcaaatggcgctggcagtgtcggtgccgttgctgattgtggtggcaatcttcccctcaaactgggctgcggcgctcattctgctgggcactgcaccgttaattccgttgtttatggcgctggttggaatgggggctgccgatgctaaccgacgtaactttctcgctcttgctcgcttaagtgggcatttcctcgatcgcctgcgcggcatggaaacattgcgtatttttggtcgtggtgaagctgaaattgaaagtattcgttctgcttcggaagatttccgccaacggacaatggaagtgctacggctggcatttttatcctccggcattctcgaattttttacctcgctgtcaattgctctggtggcggtctactttggtttttcctatctcggcgagctggattttggtcactacgatactggcgtgacgctggctgcgggttttctggccctgatccttgcgccagagtttttccagccattacgcgatctcggtacgttttatcatgctaaagcccaggctgttggtgcagctgacagtctgaaaacgtttatggaaaccccgctcgcccatccgcagcgtggcgaggtggaattagcatcgaccgatccggtgaccattgaggccgaggatctgtttatcacgtcgccggaaggtaaaacgctggccggaccgctgaactttactttgccagcaggccaacgtgccgtgttggttggtcgcagcggttcaggtaaaagttcactgttgaacgcgctttctggttttctctcatatcagggatcgctacgaatcaacgggatagaattacgcgatttatcaccagaatcatggcgtaaacatctctcctgggttgggcaaaatccacaattaccggcagcaacattacgggataacgtactactggcgcgacctgatgccagcgaacatgaattacaagcagcgctggataacgcctgggtcagcgagtttctaccgctcctgccacaaggcgttgatacgcctgttggcgaccaggctgcccgcctttccgtggggcaggcgcagcgcgtggcggtggcccgtgcgttactaaatccctgttcgctattactgttggatgaacccgctgccagccttgatgctcacagtgaacagcgcgtaatggaggcgctgaatgccgcctctctgcgccagacaacgttaatggtcacccaccagttagaagatcttgctgactgggatgtcatttgggtaatgcaggatggtcagattattgagcaaggacgttacgcggaattaagtgtggctggtggcccattcgccacattactggcccatcgtcaggaggagatttaa

SEQ ID NO: 483140 - DNA, 1722 bp, Shigella sonnei
atgcgcgctttgctaccctatctggcactgtataaacgtcataaatggatgttaagtcttggtattgtgctggcaattgtgacgctgctcgccagtatcggtctgttgacactttccggctggttcctctcggcctcagcggttgcggggggtgccggactgtacagcttcaactatatgctacccgctgcgggcgtgcgtggtgccgcaatcacccgtactgccgggcgttattttgaacgtctggtaagtcacgacgcgactttccgcgtgttgcagcatctgcgcatttacaccttcagcaaattgttgcccctctcccctgccggactggcgcgctatcgtcagggcgaattgctcaatcgcgtggtggcggatgttgatacgctcgatcatctttacctgcgcgttatctcgccgctggtgggcgcttttgtggtgattatggtggtgacagtcgggttaagtttccttgatttcaccctcgcctttacgctgggcggcattatgttactgacgcttttcctgatgccaccgctgttttatcgtgcgggaaaaagcaccgggcaaaatctgactcatcttcgcggacagtatcgccaacaactgacggcctggctgcaagggcaagctgagctgaccatttttggtgccagcgatcgttatcgcacgcaactagagaatacagaaattcaatggctggaagcgcaacgccgtcaatctgaactgaccgcattgtcgcaagcgataatgctgctcattggcgcgttagcggtgatcctgatgctgtggatggcgtctggcggcgttggcggcaatgctcaacccggcgcgttaattgccctgtttgtcttctgcgcgttagccgcgtttgaagcactggcaccagtaacgggtgcatttcagcatctggggcaagtcattgcctctgccgttcggatcactgatttaacggatcaaaaaccggaagtcaccttccctgatacccaaactcgtgttgccgatcgcgtttcgctgacattacgggatgttcagttcacttatccggagcaatcccaacaggcacttaaagggatttctcttcaggtaaacgccggggaacatattgcgattctcgggcgaaccggatgcggcaaatcaacactgttacaactgctgacccgcgcttgggacccgcaacagggcgagattttgcttaacgatagccccatagccagcctgaatgaagcggctctacgacagaccatcagcgttgttcctcagcgagtgcatctgtttagcgccacgctgcgtgataatctgttactcgcctcgcctggcagtagtgatgaggctctgtcggagatcttgcgtcgcgttggtctggagaagctgctcgaggacgcaggtctcaacagttggttaggtgaaggcggacgccagctctccggtggtgaactgcgccgtctggctatcgcccgtgcgctgttacatgatgcgccactggtgttgctggatgaacctaccgaaggcttagatgccacaaccgaaagccagatccttgaattgcttgcagaaatgatgcgtgagaaaacggtgttaatggtcacccatcgacttcgcggactctctcgtttccaacaaataatagtgatggacaacgggcaaattattgagcaaggtactcacgcagaactgcttgccagacaggggcgttattaccagtttaagcagggtttgtaa

SEQ ID NO: 483141 - DNA, 705 bp, Shigella sonnei
atgcgcctggttcagctttctcgccattcaatagccttcccttccccggaaggcgcattacgtgagcctaacggcctgctggctctggggggcgatcttagccctgcgcgcctgttaatggcttaccagcgtggtatttttccgtggttttctccaggcgcccccatcctctggtggtcgcccgatcctcgcgcggtgctttggcctgaatcactgcatatcagccgtagtatgaagcgatttcataaacgctcgccctatcgtgtcacgatgaattacgcttttggtcaggtcattgaaggttgtgccagcgatcgcgaagaaggaacctggatcacgcgtggcgtggtcgaagcctaccatcgccttcacgaactcggtcatgcccactccattgaagtctggcatgaagatgagcttgtcggcggtatgtacggcgtggcccagggaacgctattttgtggcgagtccatgttcagccggatggaaaatgcgtctaaaacggcgcttctggtattctgtgaggaatttatcagtcatggcggtaagcttatcgactgccaggtccttaacgatcacacagcatcgcttggtgcctgcgaaattccccgtcgggattatctgaattatctcaatcaaatgcgcctcggacgattgccgaataatttctgggtgccacgatgcttgttttcaccacaaaaatga

SEQ ID NO: 483142 - DNA, 219 bp, Shigella sonnei; identical to SEQ ID NO: 848

SEQ ID NO: 483143 - DNA, 135 bp, Shigella sonnei
gtgaagtccgtaatctcgaaagaggttacggactttttgtttatggggtggaacggtgaaaaccctatttttggaggtgaaggtaatttgttgataattagtgctgctggaaaaggtaaggataaaaaagggtga

SEQ ID NO: 483144 - DNA, 2277 bp, Shigella sonnei
atgctcaatcaagaactggaactcagtttaaatatggctttcgccagagcgcgcgagcaccgtcatgagtttatgaccgtcgagcacttgttactggcgctgctcagtaacccatctgcccgggaggcgctggaagcgtgttctgtggatttggttgcgctccgtcaggaactggaagcctttattgaacaaaccacacccgttctgcctgccagtgaagaggagcgcgacacacagccgacgctgagttttcagcgtgtactgcaacgtgcggtcttccatgtccagtcctccggtcgcaatgaggttaccggtgcaaacgttctggtcgctatctttagcgaacaggagtcgcaggcggcatatctgttgcgtaaacatgaagtcagccgtctcgatgtggtgaattttatctctcatggcacgcgtaaagacgagccgacacagtcttctgatcctggcagccagccaaacagcgaagaacaagctggtggggaggaacgtatggagaatttcacgacgaacctgaatcagcttgcgcgcgtgggcggaatcgacccactgattggtcgtgagaaggagctggagcgtgctattcaggttctctgccgtcgccgtaaaaacaacccgctgctggtgggggaatctggtgtcggtaaaaccgcgattgcggaaggtcttgcctggcgaattgttcagggcgatgtgccggaagtgatggctgactgtacgatttactctctcgatatcggttctctgttagcgggcacaaaatatcgcggcgactttgaaaaacgttttaaagcgttgctcaagcagctggagcaggacactaacagcatcctgtttattgatgagatccacaccattatcggtgcgggggcagcgtctggtggtcaggttgatgcggctaacctaatcaaaccgttgctctccagcggtaaaattcgtgtaattggttcgacaacctatcaggagttcagcaacattttcgagaaagaccgtgctctggcgcgtcgcttccagaaaattgatattactgaaccgtcaatcgaagaaactgttcaaatcatcaatggcctgaaaccgaagtatgaagcgcaccacgacgtgcgttataccgcaaaagcggtgcgtgcggcggtagagctggcggtgaaatacatcaatgatcgtcatctgccggataaagcgattgatgttatcgacgaagcgggcgctcgcgcacgcctgatgccggtaagcaaacgcaagaaaaccgttaatgtggcggatattgagtccgtggtggcccgtattgcacgcattccagagaagagtgtttctcagagtgaccgcgataccctgaaaaacctcggcgatcgcctgaaaatgctggtcttcggtcaggataaagccattgaggcgctgactgaagccattaagatggcgcgtgcaggtttaggtcacgaacataaaccggtcggttcgttcctgtttgccggtcctaccggggtcgggaaaacagaggtgacggtacagctttcgaaagcgttgggcattgagcttctgcgctttgatatgtccgagtatatggaacgccataccgtcagccgtctgattggtgcgcctccgggatacgttggttttgatcagggcggtttgctgaccgatgcggtaatcaagcatccacatgcggtgctgctgctggacgaaatcgagaaagcgcatccggacgtgttcaatattctgttgcaggtgatggacaacggtacgctgaccgataacaacggacgcaaagcggacttccgtaacgtggtgctggtgatgaccaccaacgccggggtacgggaaactgagcgcaaatccattggtcttatccaccaggataacagcaccgatgcgatggaagagatcaagaagatctttacaccggaattccgtaaccgtctcgacaacattatctggtttgatcatctgtcaaccgacgtgatccatcaggtggtggataaattcatcgtcgagttgcaggttcagctggatcagaaaggtgtttctctggaagtgagccaggaagcgcgtaactggctggccgagaaaggttacgaccgggcaatgggcgctcgtccgatggcgcgtgtcatccaggacaacctgaaaaaaccgctcgccaacgaactgctgtttggttcgctggtggacggcggtcaggtcaccgtcgcgctggataaagagaaaaatgagctgacttacggattccagagtgcacaaaagcacaaggcggaagcagcgcattaa

SEQ ID NO: 483145 - DNA, 321 bp, Shigella sonnei; identical to SEQ ID NO: 458588

SEQ ID NO: 483146 - DNA, 282 bp, Shigella sonnei
atgacagaagccgaaatactgggattaatccgccgcgtcgccggaatcagccagcaggttgacgaacaggccatgcaaccggacagcgtgaccgctgaaaattatgcgcgtgtggtggatgaggtaatgcgccgtgacggtattgagcttaacggcgtggatatgcgcaacatacgaaccagagttcttgagttgctggcataccgtcgccgttctcaacaacggagggagagcgcgaaaaatacttaccagtggaggaagccggagcacttacggcggtaa

SEQ ID NO: 483147 - DNA, 219 bp, Shigella sonnei
atgctggcgttgctgctctggattatcgcggaatggtcagagcgatttcttcatgagaacaaggcggcagcagccgccttttttgcgggtcctcctggtggggggggcctgtccacggggcgggtcggcgcggaaaaaagcgcatttttgtggttttatcgtcatcatcatcatgtgtgtaacctgttgtttttaatgtggttgatgcaaaaaagatga

SEQ ID NO: 483148 - DNA, 759 bp, Shigella sonnei
ttgtcaaacttccatgaggcacgtcgtgttggcctgaatggcttctctacattaaacaaagtgccggaaggcgcggaatataaatacatcaccaccagtgaccgtggcgaaccaatcgcgctggcaacttacggaaatattttcagcattacccgacaggcgattattaacgatgacctgaatcagttaacagttatcccacaggcaatggggcgagcagccgccagaacggtgggtaatctggttcatctggtgctgacaggaaacacaaagctttctgacggtataccgctgttcagcaaaaaacacggaaatgatattgataacggagtcagcactacagggcttggcattgcacgccgtgcaatgcgcacacagagggatgaaaacggtgaggtgctgaatattgtgccaaaattccttcttgttcctgcggctctggaagacagagcgttgcaaatggttaactcaaccacgcctttcggtgccgatacaaacagtggttcatataacccgtaccacaaacaactggatattattgtcgatccccgccttgatgaagtcagtgataagcaatggtacatgctttcagcacagggaacggacacaattgaggtggcttatcttgacggtaatgacgagccttaccttgagcagcaggagggctttattgttgacggtgtggcctggaaggtccgcattgatgctggcgttgctgctctggattatcgcggaatggtcagagcgatttcttcatga

SEQ ID NO: 483149 - DNA, 1146 bp, Shigella sonnei
atgaaaacatggttttccattaaggctatggctgatgttgtacatgtacgcatttatgacgagatcggcgggtacggtgtaaaagcatcggcacttactgacgagatcaacgcgtgcggtaatgtgcctgaaatccatcttcgcatccattcacctggtggcgacatctttgaagggctggctatctataacgccctgaaaaatcatccggcaaagaaaattgtacacattgaaggcatggcggcttctatggcctcgtttattgccatgtgtggcgatcacatcgttatgcctgaaaacgcgatgatgatgatacatgccccccgtggtgttactgccggagtgtcgggcgacgttcgccgctttgctgacctgatggacaagctgggcgacacgatggcggaaacctacgccggaagaacgggcaggagcaaacaggaaatcaccgccatgatggaggcggaaacctggatggatggcaatgagtgtaaggctaatggcttcgcagatgaggttatacccgcgattacagcaatggccagaattgaatcaaaacgaatcggagatttttcgaatatgccggaaaatattaaaagcatgatcagccagaaaactggcagcggagaacaggaacgactcaacgggatacgtgaattgtttggcacgttcaatggaagatataacgacctggctataagttgtcttgctgattcaggctgtagcgttgaggatgcacgcgaacgccttttactcactatgggtaaagaatcgacaccgacaaacaaaaccacccccgcaaatctttactacgcgtacacggataacggcaacataaccggcgatgcaatgcgtcaggggcttaatgcgcgtctgggacatgaacaggcagaacgcggcaacccttacgccatgatgagccttttcgatatggcacaggcatcattaacccatcgcggcataagcacaggcagctacagcacacgctcgcagatagtaaacgcggcattcacccacagcagcagcgattttacttatatccttgctggtggtgctgaaaaatccgtgaacacagcggcgaaacgttccgccagtggacgaaaaaaggttcattgtcaaacttccatgaggcacgtcgtgttggcctga

SEQ ID NO: 483150 - DNA, 195 bp, Shigella sonnei
atgccagagaacaacagcagaaaaccggataaaagtgcaacagtgcacatagacgccggaactatggagaagctcgaacgctatcagcagttcattaaaagtcatcaccctggaatgccagtacccacgaaagggcagattgcgagaagcgcggttgaatactggtacagggcaacgttaggagcctggctatga

SEQ ID NO: 483151 - DNA, 423 bp, Shigella sonnei
atgacagcacagatagcggcttacgggcggctggtggctgacccgcagttaaagaccaccagcaagggtacgcaaatgacgatggcgagtatggcggttcccctgccgtgcagccaggcagatgacggaacggcgacgatatggttatccgtcctggcgtttggcagacaggctgacgcactggcaaagcaccagaaaggcgagctggtgagcgtggcgggtaacatgcaggtaagccagtggacaggccagaacggagaaacgcggcagggctggcaggttatcgcagacagtgtaatcagtgccagaacggcgcgaccgggcggtaaaaaaggccaacaggggcaggccactgatgcactgaacagggccaaacaacaggcggggaatgatgatccgtacggggataacataccgttttaa

SEQ ID NO: 483152 - DNA, 246 bp, Shigella sonnei
gtgacaacgaagcacgccaaaaaaccacaatctcacgcccttgatttgacagaacactggctgagggtggcgataaaaatcatcgaccgcaacgccggggaaggatacgcgaaagcacatcccgaactgataagcgcattcatgaccacgacggcggcaaactttgccacgctgacagaacgggagattgccgaagcggaacaggtgacaaccatcaacgttaaaaccggagagcagacagcatga

SEQ ID NO: 483153 - DNA, 1803 bp, Shigella sonnei
atgaaaaaagcgccaaatttaaaacaccagccgcgtgacaaaatgacggaagtcatcatttttgcgggtaatgatgcgtgggcacatgcgaagcagtggcaggaacaggacgggcgactggctggcgacagcgtgcctcctgtctggcttggagaacaacaacttgccgaactggataagctgcaaatcgtaccggacggacgctatcgggtgcgtctctaccaggcggggttattgcgtccggggcttgttaataccatcgggcagaaactggcagcggcaggtgtcagggatgctgattattaccctgaaggaatgcacagccagaaacgggagaactggcgcgaatatctggaacgtgaacgggcagagcaggcggaaaagaaaaaggtagttgaactgcctgtaaagaaaaaagagcgggtaaaagacgataacgcttcatcactggcgcttaaccagatgggagcaagtcaacgcggcgaagttctcctggcacattatggcggtgaactggcgattcatgctgactctgacactgttcaccattacaacggcgttgtatgggagccagtacaggataaagaattacagcgagctatggcacagattttcattgatgcggagatcagctattcgcagaacgccattaaatcggcggtcgataccatgaagttaagtttgcctgtaatggggaatacagcccgtaacctgattggattcagtaacggggtatttgataccagaacaggtaattttcgggagcataacaaaaacgactggttgttaattgccagtgaattacctttcagcccaccagcagagggggaaacgctggcaacacatgcgccgaatttctggaagtggttacgccgttcggtggctgagaatgaccgcaaggcggatcgcgtactggctgtattattcatggtgctggcgaaccggtacgactggcagttattcattgaggtaacaggtccagggggaagtggtaaaagcgtgatggcggagatttgcaccatgctggcgggtaaggccaacacagtatcggcaagcatgaaggcgctggaagatgcaagggaacgcgcgttagtggttggcttttcgctgattatcatgccggatatgacccgctacgctggtgatggggcagggattaaggccattacaggcggtgacaaggtggcaattgacccgaaacacaaagccccctactcaacgcgtattccggcagtagtgctggcggttaacaataacgccatgtcattcagtgaccgcagcggggggatctcacgtcgtcgggtgatattcaatttttcggaagttgtaccggagaacgaacgcgaccccatgctggcagaaaaaatagaaggagagctggcggttgtgattcgccacctgcttactcgtttttctgaccaggacgaagctaaacgcctgctgtatgagcagcagaaatcagaagaagctctggtgataaaacgcgagggcgattcgctggtggacttctgcggctatctcatgtcgtcggtaatgtgtgatggtctgttagtgggtaatgccgaaattattccgttcagtccgcgcaggtatctttatcacgcctatctggcatatatgagggcacacggattcggtaaacctgtaacactgacgcgcttcggtaaagatatgccgggggcaatggcggaatatggcagggagtatatgaaacggaaaacgaagcacggtttgcgttcaaatgtgaccctgacagaggattcagaagactggatgccatcatgtgcaataggtcacaaatga

SEQ ID NO: 483154 - DNA, 300 bp, Shigella sonnei
atgagaacgtatttatctggcttgactgccagcggttatgcacaccccaaaattatccccggcgctatttatctggataagaacggtaacagagtaacggtaaaagaactgatgtttgaccgtgtgtattttattcgtgatggctattcatttcatagttcgctgaacgtggagatctttattagcagattcaggcgggaaatcccgctttccagaaataaccatgtgtcatgtatggatgttgataaaaaactacaggaactgaaaaacatgattgccgcgtggagagagcagaaatga

SEQ ID NO: 483155 - DNA, 321 bp, Shigella sonnei
atgcctgacatgaccaattaccagtacctgattaatccgcattttaactgtgagcatgatattgctaaaaaggtttattccgctgcggatggggctactgacaatatatcaatggctgttgcgtcaattggtagcctgatgtggcatgcgtcagaaaatgaggaatatgacgaaaaggctatgcgcattgacatgggtaatattggcttgttactggcaatgcttgggcagtttgatatttcgttacggtgcaccattgaaaatgccacagatgcattaaatgccatagagaaagcgaatactgattcaaatctgagataa

SEQ ID NO: 483156 - DNA, 198 bp, Shigella sonnei
atggttgccgtaaatcatataccacaccttgtacacacacaaacggcctttgtgtggcgttttctggccctgagtgccggagaatctcaaatcatccacgtaaccgcctggacggaacgcgaagcgcgtaaccgttgcccgtcaggttgtgttgctgtattcgccgcccgtattcgtcaggaggtgtgccatgcctga

SEQ ID NO: 483157 - DNA, 306 bp, Shigella sonnei
atgtccaggagttctgttaacaataagtcacagcaactgaatgccagatttccacatgaagtagtgagtggcattgaggcatccctacagccaggggaaactaaagcgaattttatagttacggctgtacgcggtgagatcgccaggcgccaggcagaaggaagtggagaaaatccccttgtgtcttcactggatgccctagctaatgtcgaacaaatcggcatcaaggcagcggaggaaatcgggcagcttatcaccgttgcacgcgaagaactccagcgccgcaaggccaaagaatcagaataa

SEQ ID NO: 483158 - DNA, 210 bp, Shigella sonnei
atgcgtgaaataaatgaagatcgcgtaatccgtgaggatgaatgtcgtaagttaactggagtgtgccgcactacacgttacgaactggagaaaaaagggcgctttccgtcacgtcttaatctgggcggtcgttctgtagggtggctgctgtccgaggttatggaatgggttaaaagccgggatcgcattaattcaggtaaggcagtgtaa

SEQ ID NO: 483159 - DNA, 939 bp, Shigella sonnei
atgaaagtcgcagtcctcggcgctgctggcggtattggccaggcgcttgcactactgttaaaaacccaactgccttcaggttcagaactctctctgtatgatatcgctccagtgactcccggtgtggctgtcgatctgagccatatccctactgctgtgaaaatcaaaggtttttctggtgaagatgcgactccggcgctggaaggcgcagatgtcgttcttatctctgcaggtgtagcgcgtaaaccgggtatggatcgttccgacctgtttaacgttaacgccggcatcgtgaaaaacctggtacagcaagttgcgaaaacctgcccgaaagcgtgcattggtattatcactaacccggttaacaccacagttgcgattgctgctgaagtgctgaaaaaagccggtgtttatgacaaaaacaaactgttcggcgttaccacgctggacatcattcgttccaacacttttgttgcggaactgaaaggcaaacagccaggcgaagttgaagtgccggttattggcggtcactctggtgttaccattctgccgctgctgtcacaggttcctggcgttagttttaccgagcaggaagtggctgatctgaccaaacgcatccagaacgcgggtactgaagtggttgaagcgaaagccggtggcgggtctgcaaccctgtctatgggccaggcagctgcacgttttggtctgtctctggttcgtgcactgcagggcgaacaaggcgttgtcgaatgtgcctacgttgaaggcgatggtcagtacgcccgtttcttctctcaaccgctgctgctgggtaaaaacggcgtggaagagcgtaaatctatcggtaccctgagcgcatttgaacagaacgcgctggaaggtatgctggatacactcaagaaagatatcgccttgggcgaagagttcgttaataagtaa

SEQ ID NO: 483160 - DNA, 471 bp, Shigella sonnei; identical to SEQ ID NO: 459984

SEQ ID NO: 483161 - DNA, 264 bp, Shigella sonnei
atgaaaatcaaaaccactgtagctgcattaagcgtactttctgttctctctttcggtgcattcgctgccgactccattgatactgcacaagcacaaaatcgtgaagcaatcgggaccgtatccgtaagtggtgtggcgtcttcgccaatggatatgcgtgaaatgctgaacaaaaaagcggaagagaaaggcgcaacggcctaccagattactgaagctcgtagcggtgacacctggcacgctacggctgaactgtacaaataa

SEQ ID NO: 483162 - DNA, 273 bp, Shigella sonnei
atgaatatttatacctttgattttgatgagattgagagtcaggaggatttttatcgtgactttagccaaacctttggtctggctaaagataaggtacgcgatctcgactcactatgggatgtgttaatgaacgatgtcctgccgctaccacttgagattgaatttgttcatctgggagagaaaacgcgtcgccgttttggcgcgttaatattgctgtttgatgaggcagaggaagagctggaagggcatttgcgttttaatgttcgtcattag

SEQ ID NO: 483163 - DNA, 1968 bp, Shigella sonnei
atgggtattttctccattgctaaccaacatattcgctttgcggtaaaactggcgaccgccattgtactggcgctgtttgttggctttcacttccagctggaaacgccacgctgggcggtactgacagcggcgattgttgccgccggtccggcctttgctgcgggaggtgaaccgtattctggcgctattcgctatcgtggctttttgcgcatcatcggcacatttattggctgtattgccggactggtgatcatcattgcgatgatccgcgcaccattattgatgattctggtgtgctgtatctgggccggtttttgtacctggatatcctcgctggtacgaatagaaaactcgtacgcgtgggggctggccggttataccgcgctgatcattgtgatcaccattcagccggaaccattgcttacgccgcagtttgccgtcgaacgttgtagcgagatcgttatcggtattgtgtgtgcgattatggcggatttgctcttttctccgcgatcgatcaaacaagaagtagatcgagagctggaaagtttgctggtcgcgcaatatcaattaatgcaactctgtatcaagcatggcgatggtgaagttgtcgataaagcctggggcgacctggtgcgacgcaccacggcactacaaggcatgcgcagcaacctgaatatggaatcttcccgctgggcgcgggccaatcgacgtttaaaagcgatcaatacgctatcgctgacgctgattacccaatcctgcgaaacttatcttattcagaatacgcgcccggaattgatcactgatactttccgcgaattttttgacacgccggtagaaaccgcgcaggacgtccacaagcagctcaaacgcctgcggagagttatcgcctggaccggggaacgggaaacgcctgtcaccatttatagctgggtcgcggcggcaacgcgttatcagcttctcaagcgcggcgttatcagtaacacaaaaatcaacgccaccgaagaagagatcctgcaaggcgaaccggaagtaaaagtagagtcagccgaacgtcatcatgcaatggttaacttctggcgaaccacactttcctgcattctgggcacgcttttctggctgtggacgggctggacttccggcagtggtgcaatggtgatgattgcggtcgtgacgtcactggcaatgcgtttgccgaatccacgcatggtggcgatcgactttatctatgggacgctggccgcgctgccgttagggctgctctactttttggtgattatccctaatacccaacagagcatgttgctgctgtgtattagcctggcagtgctgggattcttcctcggtatagaagtacagaaacggcgactgggctcgatgggggcactggccagcaccataaatattatcgtgctggataacccgatgactttccatttcagtcagtttctcgacagcgcattagggcaaatcgtcggctgtgtgctcgcgttcaccgttattttgctggtgcgggataaatcgcgcgacaggactggacgtgtactgcttaatcagtttgtttttgccgctgtttccgcgatgactaccaatgtggcacgtcgtaaagagaaccacctcccggcactttatcagcagctgtttttgctgatgaataagttcccaggggatttgccgaaatttcgcctggcgctgacgatgattatcgcgcaccagcgcctgcgtgatgcgccgatcccggttaacgaggatttatcggcgtttcaccgacaaatgcgccgcacagcagaccatgtgatatctgcccgtagcgatgataaacgtcgtcggtactttggccagttgctggaagaactggaaatctaccaggaaaagctacgcatctggcaagcgccaccgcaggtgacggaaccggttcatcggctggcggggatgctccataagtatcaacatgcgttgaccgatagttaa

SEQ ID NO: 483164 - DNA, 933 bp, Shigella sonnei
gtgaaaacactaataagaaaattctcccgtacggccatcacggtcgtattagtcattctagccttcatcgcaatttttaatgcctgggtctattacaccgaatccccctggacgcgtgacgcgcgctttagcgctgacgtcgttgcgatcgcgccggacgtttctggactcattacccaggtgaatgttcatgataaccagctggtgaaaaaaggacagatactgttcaccatcgaccagccgcgctatcaaaaggcgcttgaggaagcgcaagccgatgttgcttattatcaggtactggcacaggagaaacgccaggaggccggacgtcgtaaccgtctcggtgtgcaggcgatgtctcgcgaagagatcgaccaggccaacaacgtactacaaacggttctgcatcagttagcgaaagcgcaggcgacccgcgatctggcaaaactggatcttgaacgcacggtgatccgcgcgccagcagatggctgggtgaccaacctcaacgtctataccggtgagtttattactcgaggatcaacggcggttgcgctggtgaaacagaactccttctatgtactggcctatatggaagaaactaagctggaaggggggcgtccggggtatcgtgcagagatcacgccgcttggcagtaacaaagtgctgaaagggactgttgatagtgttgccgcaggggtcaccaacgccagcagcacgcgtgacgacaaagggatggcgactatagactctaatcttgaatgggtgcgtcttgcgcaacgtgttccggttcgtattcgtctcgacaaccagcaagagaacatctggcctgcgggcaccactgctacagtggtggtcactggcaaacaagatcgcgacgaaagccaggattcgttcttccgtaaaatggcccatcgcctgcgtgagtttggttaa

SEQ ID NO: 483165 - DNA, 204 bp, Shigella sonnei
atgagtctgtttcccgttatcgtggtgtttggactgtccttcccaccgatattttttgaattgcttttatcactggcgattttctggctggtgcgccgggtacttgtgccaacaggtatctacgactttgtctggcatccggcgttgttcaacaccgcgctctattgctgcttgttttatttgatatcgcgactgttcgtttga

SEQ ID NO: 483166 - DNA, 489 bp, Shigella sonnei
atggaacgactaaaacgcatgtcggtgtttgccaaagtagttgaatttggctcttttaccgccgccgccagacagctacagatgagcgtttcgtccatcagtcagacggtgtcaaaactggaagatgagttgcaggtaaagctgttaaaccgtagcacacgcagcattggcctgaccgaagccggcagaatttactaccagggctgccgtcggatgcttcatgaagtgcaggatgttcatgagcaactgtatgccttcaataacacccccatcgggacgctgcgcattggctgttcttcaactatggcacaaaatgttctcgccgggctgacagcaaaaatgctgaaagaatacccaggtttgagcgtcaatctggttaccggaattccagcctgttttcccgccgtctgggcgcgatgccgatggtggtgtgcgccgcgaaaagctatctcacacaatacggcataccggaaaaacccgccgatttga

SEQ ID NO: 483167 - DNA, 276 bp, Shigella sonnei
gtgactaatgatccgatgacgctggtgcgctggctgacggcgggtgccgggatcgcctacgtgccgctgatgtgggtgatcaacgagatcaatcgcggtgagctggagatcctgctgccgcgttatcagtcagatccacgcccggtttatgcgttatataccgaaaaagataagctgccgctgaaggtacaggtcgtgatcaactcgctgacggattattttgttgaggtcggtaaattgtttcaggagatgcacgggcgcgggaaagagaagtaa

SEQ ID NO: 483168 - DNA, 1446 bp, Shigella sonnei
atgagtctgaacctggtaagtgaacaattgctagcggcgaacagcctgaaacatcaggacttgttcgcgatcctcggtcaactggccgaacgtcgccttgattatggcgatctctattttcagtcgagctatcacgaatcctgggttttagaagaccgcattattaaagatggttcttacaacatcgatcagggcgttggcgtgcgtgcaatcagcggtgaaaaaaccggatttgcttacgctgaccaaatcagcctgctggcgctggaacagagtgcgcaagcggcgcgcaccatcgtccgtgatagtggtgatggcaaagtacagacgctgggcgcggtagagcatagcccgttgtatacctcggtagatccgctgcaaagcatgagccgtgaagagaagctggatatcctgcgtcgcgtcgataaggttgctcgcgaagcggacaagcgcgtacaggaagtgactgccagcctcagtggtgtctatgaattaattctggttgcggccaccgacggcacgctagcggcggatgtccgtccgctggtgcgtctttccgtgagcgttctggtcgaagaagatggcaaacgcgaacgcggtgccagtggcggcggcggtcgttttggttatgagttcttccttgccgatcttgacggcgaagtccgtgcggatgcatgggcaaaagaagcagtgcgtatggcgctggtcaatctttctgccgttgctgcaccagcgggcaccatgccggtagtacttggcgcaggttggccgggcgtgctgttgcatgaagcggtaggtcacggtctggaaggcgacttcaaccgccgcggcacttcagtatttagtgggcaggtcggggagctggtggcttcagaactgtgtaccgtggttgatgacggcacgatggtcgatcgccgtggttcggtggcgattgatgacgaaggtacgccaggccagtacaacgtgctgattgagaacggcattctgaaaggctacatgcaggataaactcaacgcgcgtttgatggggatgacgccgactggcaacggtcgccgtgaatcctacgcccatctgcccatgccgcgtatgactaacacctatatgctgccgggtaaatcgaccccgcaggaaattattgaatccgttgagtacggtatctatgcaccgaactttggtggcggtcaggtggatatcacctccggcaaattcgttttctccacttcagaagcatatctgattgaaaacggtaaagtaacgaagccggtgaaaggcgcaacgttgattggttccggtatcgaaaccatgcagcagatttcgatggttggcaacgacctgaaactggataacggcgtgggtgtctgcggtaaagaagggcaaagtttgccggttggcgtgggccagccaacgctgaaagttgataacctgactgttggcggtactgcgtaa

SEQ ID NO: 483169 - DNA, 3801 bp, Shigella sonnei
gtgaggcgattgccggggattttactgcttactggagccgcgctcgttgtgatcgctgccctgctggttagcggcctgcgtattgctttaccgcatcttgacgcctggcgtccggaaatcctcaacaaaatagaatccgcgactggcatgccggtagaagccagtcagctctcagccagctggcagaattttggcccgacgcttgaagcacacgacatccgtgcagaactaaaagatggcggcgaattttcggttaaacgcgttactctggcgctggatgtctggcagagcctgttacatatgcgctggcagtttcgcgacctcactttctggcagctgcgctttcgcaccaacactcctatcaccagcggtggtagcgatgacagtctggaagccagtcacatcagcgatctgtttcttcgtcaatttgaccatttcgatctccgcgacagtgaagtcagtttcctgacgccatccggtcagcgtgccgagctggcgatcccacaactcacctggctgaacgatccacgtcgacaccgtgcggaaggcctggtaagcctctccagccttaccggacagcacggcgtgatgcaggtgcgcatggatttgcgcgatgatgaggggttgttaagcaatggtcgcgtctggctacaggcggatgacatcgacctgaagccgtggctcggtaaatggatgcaggacaatattgctctggaaacggcacagttctcccttgaaggctggatgacgatcgacaaaggcgatgtaaccggcggtgacgtctggctgaaacagggcggtgccagctggttgggcgagaagcaaacgcatacgctgtcggtggataatctgaccgcgcatattacgcgtgaaaatccgggctggcagttctctattcccgatacacggatcacgatggacggcaaaccctggccgagcggagcattgacgctggcctggataccggaacaggacgttggcggcaaagacaataaacgcagtgacgaactccggattcgcgccagtaatctggagctggcaggcctggagggcatacgcccgctggccgcgaaactttcacctgcactgggtgatgtttggcgctccacacaaccgagcggcaagattaacactctggcgctggatatcccgcttcaggcggcagacaagacccgttttcaggcatcgtggagcgatctggcctggaagcaatggaaattattaccgggtgcggaacacttctccgggacgctttccggcagcgttgaaaatggtttgcttaccgcgtcgatgaagcaggcaaagatgccttacgaaacggtattccgtgcgccactggaaatcgccgacggccaggcaactataagctggctgaacaatgacaaaggtttccagctggatgggcgtaatattgacgttaaagccaaagccgtccatgcgcgcggcggttttcgttacctgcaacctgctaacgatgaaccctggctgggtattctggctggcatcagtaccgatgatggttcacaagcctggcactatttcccggaaaacttgatgggtaaagacctggttgattacttaagtggcgcgattcagggcggtgaagcggataacgcgacgctggtttatggtggcaatccgcaactcttcccctataaacacaacgaaggtcagtttgaagtgctggtgccgctgcgcaacgcgaagtttgccttccagccggactggcctgcattaactaaccttgatattgaactggactttattaacgacggtttatggatgaaaaccgatggcgttaatctgggcggcgtgcgcgcgagtaatctcaccgcagtgatccctgactactcgaaagaaaaactgctgattgacgctgacattaaaggtccgggtaaagccgttggcccttactttgatgagacaccgctgaaagattctctgggtgcgaccctgcaagaactccagctcgacggcgatgtgaatgctcgcttacatcttgatatcccgctgaacggcgagctggtaaccgcgaaaggtgaagtgacgctgcgtaataacagtctgtttatcaaaccactcgacagcaccctgaaaaatttgagcggtaaattcagctttatcaatggcgatctgcaaagtgaaccactgacagcaagctggtttaatcagccgttgaacgtggatttttccaccaaagaaggggcaaaagcctaccaggttgcggtgaatctcaacggtaactggcaaccggcgaaaaccggcgttctgcctgaagcggtgaacgaagcattgagtggcagcgtggcgtgggatggtaaagtgggcattgatctgccttatcatgctggcgcgacctataacgtagagctgaacggcgatctgaataatgtgagtagtcacttaccttcaccgttagccaaacctgcgggtgaaccactagcggtaaacgttaaggttgatggcaatctcaacagctttgaattaaccggacaggctggtgcggataaccatttcaatagccgctggttgcttggtcaaaagctgacgctcgatcgtgctatttgggcggcagacagtaaaacgctcccgccgttgccggaacaaagtggcgttgaactcaatatgccgccgatgaatggtgccgagtggctggccctgttccagaaaggcgctgcggagagtgtcggtggtgcagcgagtttcccacaatacataacgttacgtacgcctatgttgtcactgggaaatcagcaatggaataacctgagtattgtttcgcaaccgacggcaaatggcaccctggttgaggcgcaagggcgtgaaatcaacgccacgctagcgatgcgtaataacgcgccgtggctggcgaatatcaaatatctttattacaacccgagcgtggcgaaaactcgtggtgattcaacgccgtcatcacctttcccgacaacggagcgcattaacttccgtggctggccggacgcacaaatacgatgcacagagtgctggttctgggggcaaaaattcggtcgcattgacagtgatatcaccatttctggcgatacgttaacgctgaccaatggactgattgatactggtttctcgcggcttactgccgatggtgaatgggttaataatccggggaatgaacgtacctcgctgaaaggaaaactgcgcgggcagaaaattgatgccgccgcagaattttttggtgtcacgacgcccatacgccagtcgtcatttaatgtggattacgatttacactggcgcaaagcaccctggcagccagatgaagcgacgttgaatggcatcattcatactcaactgggtaaaggcgaaattaccgaaatcaataccggacatgccgggcaattgctgcgcttattgagcgtagatgccctgatgcgtaagctgcgttttgatttcagagacacttttggcgaagggttctattttgactccattcgcagcaccgcgtggattaaagacggggttatgcacaccgacgacacgctggtggatggcctggaggcggatatcgccatgaaagggtcggtaaatctggtacgtcgcgacctgaatatggaagcggttgtcgcaccagagatttctgcgacggtgggcgtggctgcggcttttgcggttaaccccattgttggcgcggcagtttttgccgctagtaaagtgctggggccgctgtggagcaaagtctccattttgcgctatcacatttcgggtccgctggacgatccgcaaatcaacgaagtgttgcgccaaccgcgtaaagaaaaagcgcaatga

SEQ ID NO: 483170 - DNA, 1470 bp, Shigella sonnei
atgacggctgaattgttagtaaacgtaacgccttcggaaacgcgagtggcgtatattgatggcggtattctgcaggaaattcatattgaacgtgaggcgcgacgcggaatagtaggcaatatctacaagggtcgtgtaagtcgtgtacttccgggtatgcaggcggcttttgtagatattgggctggataaagccgcgtttcttcatgcatccgatatcatgccgcacaccgaatgtgtggcgggtgaagaacaaaagcaattcacggtgcgcgacatctcggaactggttcgtcaggggcaagatctgatggtgcaggtggtgaaagatccgcttggcactaaaggtgcgcgcctgaccaccgatatcacgctgccttctcgctatctggtctttatgccaggggcttctcacgttggggtttcccaacgtattgaaagcgaatcagaacgtgaacgcctgaaaaaagtggtcgcagagtattgcgacgagcagggcgggtttatcatccgtaccgcagcggaaggggttggcgaggctgaactggcctccgatgccgcttatctgaaacgcgtctggaccaaagttatggagcgtaaaaagcgcccgcagacccgttatcagctgtacggcgaactggcgctggctcagcgtgttctgcgtgatttcgccgacgccgaactggaccgcattcgcgttgactcacgcctgacttacgaagcattacttgagttcacctcggagtacattcccgagatgaccagcaagctggagcattacaccggacgccagccgattttcgatctctttgatgtcgaaaacgaaatccagcgagcgctggaacgcaaagtagaactgaaatccggtggttatctcattatcgaccagaccgaagcgatgaccaccgtggacatcaataccggagcgtttgtcggtcatcgcaatctggacgacaccattttcaataccaatattgaagcgacgcaggctatcgctcgccagttacggttgcgtaatctgggcgggattatcattattgatttcatcgatatgaataatgaagatcaccgccgccgcgtgctgcactcgctggagcaggcgttgagcaaagaccgggtgaaaaccagcgttaatggtttttcggcgctggggctggtggagatgacgcgtaaacgcacccgcgaaagcattgagcacgtactgtgtaacgaatgcccaacctgccacggtcgcggaacggtgaaaaccgtggaaacggtatgctatgaaatcatgcgcgagattgttcgtgtccaccatgcttacgactccgaccgtttcctggtctatgcttctccggcagtagccgaagccttgaaaggcgaagagtcacactcgctggcggaagtggaaattttcgttggcaaacaggttaaagtacaaattgaaccgctctataaccaggagcagtttgacgtcgtaatgatgtaa

SEQ ID NO: 483171 - DNA, 594 bp, Shigella sonnei
atgacttctctgtatttagcttccggttctccgcgtcgtcaggagttacttgcgcaacttggtgtgacctttgaacgtattgttacgggcattgaggagcagcgtcagccgcaggagagcgcgcagcagtatgttgtgcgtctggcgcgcgagaaagcacaggcgggtgtcgcgcaaacggcgcaggatctcccggtgctgggtgcggatactatcgttatcctgaatggagaagtgctggagaaaccgcgcgacgcagagcatgcggcgcagatgttgcgcaaattatcgggtcagacccatcaggtgatgacggcagtggcgttggccgacagccagcacattctcgattgcctggtggtcaccgatgtgactttcagaacgttaacagacgaagacatcgcgggctatgtcgccagcggtgaaccgttagataaagcaggtgcatacggtattcaggggctgggtggctgttttgtcaggaagataaatggcagctatcacgccgtagtcggcttacctctggttgaaacgtatgaattattaagtaattttaacgcactgcgtgagaaaagggataaacatgacggctga

SEQ ID NO: 483172 - DNA, 489 bp, Shigella sonnei
gtggcgagctatcgtagccagggacgttgggtaatctggctctctttcctcattgcgctgttgctgcaaatcatgccctggccggataacctgattgttttccggccaaactgggtgttactcatcttgttgtattggatcctggccttgcctcatcgcgtaaatgtgggcacaggttttgtgatgggtgccatactggatctgatcagcggctcgacgcttggcgtacgcgtattggcgatgagcatcattgcttacctggtggcgctgaaataccagcttttccgcaacctcgcattatggcagcaggcgctggtcgtcatgttgctttcgctggtggtggatattattgttttctgggcagagtttttagtgattaacgtctctttcagaccggaagtgttctggagtagtgtagtcaatggggtgctctggccgtggattttcttgctgatgcgtaaagtccgtcagcagtttgcagtgcaataa

SEQ ID NO: 483173 - DNA, 1104 bp, Shigella sonnei
atgaagccaatttttagccgtggcccgtcgctacagattcgccttattctggcggtgctggtggcgctcggcattattattgccgacagccgcctggggacgttcagtcaaatccgtacttatatggataccgccgtcagtcctttctactttgtttccaatgctcctcgtgaattgctggatggcgtatcgcagacgctggcctcgcgtgaccaactagaacttgaaaaccgggcgttacgtcaggaactgttgctgaaaaacagtgaactgctgatgcttggacaatacaaacaggagaacgcgcgtctgcgcgagctgctgggttccccgctgcgtcaggatgagcagaaaatggtgactcaggttatctccacggttaacgatccttatagcgatcaagttgttatcgataaaggtagcgttaatggcgtttatgaaggccagccggtcatcagcgacaaaggtgttgttggtcaggtggtggccgtcgctaaactgaccagtcgcgtgctgctgatttgtgatgcgacccacgcgctgccaatccaggtgctgcgcaacgatatccgcgtaattgcagccggtaacggttgtacggatgatttgcagcttgagcatctgccagcgaatacggatattcgtgttggtgatgtgctggtgacctccggtctgggcggtcgtttcccggaaggctatccggtcgcggttgtctcttccgtaaaactcgatacccagcgcgcttatactgtgattcaggcgcgtccgactgcaggactgcaacgtttgcgttatctgctgctgctgtggggcgcggatcgtaacggcgctaacccgatgacgccggaagaggtgcatcgtgttgctaatgaacgtctgatgcagatgatgccgcaggtattgccttcgccagacgcgatggggccaaagttacctgaaccggcaacggggatcgctcagccgactccgcagcaaccgacgacaggaaatgcagctactgcgcctgctgcgcccacacagcctgctgctaatcgctctccacaaagggctacgccgccgcaaagtggtgctcaaccgcctgcgcgtgcgccgggagggcaatag

SEQ ID NO: 483174 - DNA, 1044 bp, Shigella sonnei
atgttgaaaaaatttcgtggcatgttttccaatgacttgtccattgacctgggtactgcgaataccctcatttatgtaaaaggacaaggcatcgtattgaatgagccttccgtggtggccattcgtcaggatcgtgccggttcaccgaaaagcgtagctgcagtaggtcatgacgcgaagcagatgctgggccgtacgccgggcaatattgctgccattcgcccaatgaaagacggcgttatcgccgacttcttcgtgactgaaaaaatgctccagcacttcatcaaacaagtgcacagcaacagctttatgcgtccaagcccgcgcgttctggtttgtgtaccggttggcgcgacccaggttgaacgccgcgcaattcgtgaatccgcgcagggcgctggtgcccgtgaagtcttcctgattgaagaaccgatggctgccgcaattggtgctggcctgccggtttctgaagcgaccggttctatggtggttgatatcggtggtggtaccactgaagttgctgttatctccttgaacggcgtggtttactcctcttccgtgcgcattggtggtgatcgtttcgacgaagctatcatcaactatgtgcgtcgtaattacggttctctgatcggtgaagccaccgcagaacgtatcaagcacgaaatcggttcggcttacccgggcgatgaagtccgtgaaatcgaagttcgtggccgtaacctggcagaaggtgttccacgcggttttaccctgaactccaacgaaatcctcgaagcactgcaggaaccgctgaccggtattgtgagcgcggtaatggttgcactggaacagtgcccgccggaactggcttccgacatctccgagcgcggcatggtgctcaccggtggtggcgcactgctgcgtaaccttgaccgtttgttaatggaagaaaccggcattccagtagttgttgctgaagacccgctgacctgtgtggcgcgcggtggcggcaaagcgctggaaatgatcgacatgcacggcggcgacctgttcagcgaagagtaa

SEQ ID NO: 483175 - DNA, 1941 bp, Shigella sonnei
atgagattaacgacgaaattttcggcctttgttacgctgctcaccgggttaacaatttttgtgactttgctgggctgttcgctaagtttctacaacgcaattcagtataagtttagtcatcgcgttcaggcggtggcgacggcgattgatacccaccttgtgtcgaatgacttcagcacattaaggccacaaattaccgaattaatgatgtcggcagatatcgttcgtgtagacctgctccatggtgataaacaggtttataccctggccagaaatggtagttatcgtccggttggctccagcgatctgtttcgcgaactgagtgttccgttgataaagcatccggggatgtcgctgcgtctggtttatcaggatccgatgggcaactatttccattctttaatgactaccgcgccgctcacgggggcgattggctttatcattgttatgctcttcctggcggtacgctggttacaacggcaacttgccgggcaagaattgctggaaacccgggctactcgtatcttaaacggtgagcgtggctctaatgtgttgggaaccatctatgaatggccgcccagaaccagcagtgcgctagatacgctgcttcgtgaaattcagaacgcacgcgaacaacacagccgtcttgatacgctgatccgctcttatgccgcccaggacgtgaaaaccggcctcaataaccgactctttttcgataatcagttagcaacgttactggaagatcaggagaaagtaggtacccacgggatcgtgatgatgattcgtctgccggatttcaatatgttgagcgatacttgggggcacagccaggttgaagaacagttcttcactctgactaatctgctgtcgacatttatgatgcgctaccctggcgcactgctggcgcgttaccaccgcagtgattttgctgcgctgttaccgcaccggacgttaaaagaggcagagagcatcgccggtcagttaatcaaagccgtcgataccttgccgaacaataaaatgctcgatcgcgacgatatgatccacattggtatctgcgcctggcgtagtggtcaggataccgagcaggtaatggaacatgcagagtctgccacgcgtaatgcgggattgcagggcggcaatagctgggctatttacgatgactcgttgcctgaaaaaggacgcggtaatgttcgctggcgtacgcttatcgagcaaatgctcagtcgcggcggcccgcgcctttatcaaaaaccggcggttactcgcgaaggtcaggttcatcatcgcgaactcatgtgccgtatcttcgatggtaatgaagaggttagctcggcggagtatatgccgatggtcttgcagtttggcttatcggaagagtatgaccgtctgcaaatcagccgtcttattccactattgcgttactggccagaggaaaatctggcgattcaggttaccgttgagtcgctgattcgcccgcgttttcagcgttggctgcgcgatacgttaatgcaatgtgaaaaatcacaacgaaaacgcataattattgaacttgcagaggccgatgtaggtcaacatatcagtcgtttacaacctgttattcgtttagtgaatgctttaggggtacgggtagccgtcaaccaggctggtttgacgctggtaagcaccagttggatcaaagaacttaatgttgagttactcaagctccatccggggctggtcagaaacattgagaagcgaacggagaaccagctgctggttcaaagcctggtggaagcctgctccgggaccagcacccacgtttacgccaccggcgtgcgttcgcgaagcgagtggcagaccctgattcagcgcggtgttacaggcgggcaaggggattttttcgcgtcctcacagccacttgatactaacgtgaaaaaatattcacaaagatactcggtttaa

SEQ ID NO: 483176 - DNA, 975 bp, Shigella sonnei
atgcaggcgttacttttagaacagcaggacggcaaaactctcgcatcagtacagactctggacgaaagtcgcctgccggagggcgatgtcacggtcgatgttcactggtcgagcctgaactataaagatgcgctggcgattaccggtaagggaaaaatcatccgtaattttccgatgattcctgggatcgattttgccggaactgtacgcaccagcgaagatccgcgttttcatgccggtcaggaggtgttactcactggctggggcgttggtgaaaaccactggggtgggctggcggagcaggcgcgagtgaaaggtgactggctggttgccatgccgcaagggctggacgcgcgtaaagcaatgattatcggtactgccggttttaccgccatgctgtgtgtgatggcgctggaagatgccggtgttcgcccgcaggacggggagattgtcgtgacgggtgccagtggtggcgtcggcagtaccgccgtggcgctgctgcataagttgggttatcaggtcgttgccgtttccggtcgcgaaagtacccatgaatatctgaaaagtttaggtgccagccgtattctccctcgtgatgagtttgccgaatcccgtcctctggaaaaacaagtctgggctggggcaattgacactgttggcgacaaagtgctggcaaaagtgctggcgcaaatgaattacggcggctgcgtggcggcctgtggtctggcgggtggttttactctgccaaccacggtcatgccatttattctgcgtaatgtccgtttgcaaggggtggattcagtaatgacgccaccagaacgccgcgcacaagcctggcagcgactggtcgccgatttaccggaatcattctatacccaggcggcaaaagagatatctctgtcagaggcaccgaactttgccgaggccatcattaataaccagatccagggtcgcacgctggtgaaggttaactaa

SEQ ID NO: 483177 - DNA, 471 bp, Shigella sonnei; identical to SEQ ID NO: 1037

SEQ ID NO: 483178 - DNA, 1350 bp, Shigella sonnei
atgctggataaaattgttattgccaaccgcggcgagattgcattgcgtattcttcgtgcctgtaaagaactgggcatcaagactgtcgctgtgcactccagcgcggatcgcgatctaaaacacgtattactggcagatgaaacggtctgtattggccctgctccgtcagtaaaaagttatctgaacatcccggcaatcatcagcgccgctgaaatcaccggcgcagtagcaatccatccgggttacggcttcctctccgagaacgccaactttgccgagcaggttgaacgctccggctttatcttcatcggcccgaaagcagaaaccattcgcctgatgggcgacaaagtatccgcaatcgcggcgatgaaaaaagcgggcgtcccttgcgtaccgggttctgacggcccgttgggcgacgatatggataaaaaccgtgccattgctaaacgcattggttatccggtgattatcaaagcctccggcggcggcggtggtcgcggtatgcgcgtagtgcgcggcgacgctgaactggcacaatccatctccatgacccgtgcggaagcgaaagctgctttcagcaacgatatggtttacatggagaaatacctggaaaatcctcgccacgtcgagattcaggtactggctgacggtcggggcaacgctatctatctggcggaacgtgactgctccatgcagcgccgccaccagaaagtggtcgaagaagcgccagcaccgggcattaccccggaactgcgtcgctacatcggcgaacgttgcgctaaagcgtgtgttgatatcggctatcgcggtgcaggtactttcgagtttctgttcgaaaacggcgagttctatttcatcgaaatgaacacccgtattcaggtagaacacccggttaccgaaatgatcactggcgttgacctgatcaaagaacagctccgtatcgctgccggtcaaccgctgtcgatcaagcaagaagaagttcacgttcgcggccatgcggtggaatgtcgtatcaacgccgaagatccgaacaccttcctgccaagcccaggcaaaatcacccgtttccacgcacctggcggttttggcgtacgttgggagtctcatatctacgcgggctacaccgtaccgccgtactatgactcaatgatcggtaagctgatttgctacggtgaaaaccgtgacgtggcgattgcccgcatgaagaatgcgctgcaggagctgatcatcgacggtatcaaaaccaacgttgatctgcagatccgcatcatgaatgacgagaacttccagcatggtggcactaacatccactatctggagaaaaaactcggtcttcaggaaaaataa

SEQ ID NO: 483179 - DNA, 243 bp, Shigella sonnei
atggacactcgttttgttcaggcccataaagaggcgcgctgggcgctggggctgacccttttgtatctggcagtttggttagtagccgcttacttacctggcgttgcccccggttttaccggctttccgcgctggtttgagatggcctgcatcctgacgccgctactgtttattggactgtgctgggcgatggtgaaatttatctatcgcgatatcccactggaggatgacgatgcagcttga

SEQ ID NO: 483180 - DNA, 1452 bp, Shigella sonnei
atgcagcttgaagtaattctaccgctggtcgcctatctggtggtggtgttcggtatctcggtttatgcgatgcgtaaacggagcaccggcaccttccttaatgagtatttcctcggcagccgctctatgggcggtattgtgctggcgatgacgctcaccgcgacctatatcagtgccagttcgtttatcggcgggccaggagctgcttataaatacgggctgggctgggtattgctggcgatgattcagcttcctgcagtctggctttcactcggtattctcggcaagaagtttgcgattcttgcgcgccgctacaatgcagtgacgctgaacgacatgctgtttgcccgctaccagagtcgtcttctggtgtggctggcgagtttgagtttgctggttgcgttcgttggggcaatgaccgtgcagtttatcggcggtgcgcgcctgctggaaaccgcggcgggtattccttatgaaaccgggctgctgattttcggtatcagcattgcgttgtataccgcctttggcggctttcgcgccagcgtgctgaacgacaccatgcaagggcttgtgatgctgattggcaccgttgtgctgcttattggcgtggtacatgccgctggcggcttaagcaacgcagtacagaccttgcaaaccatcgatccgcaactggttacgccacaaggcgctgacgatattctgtcgcctgcctttatgacgtcgttctgggtactggtgtgctttggcgtgattggcctgccgcatactgcggtgcgctgtatctcttataaagacagcaaagcggtacaccgggggatcatcatcggtacgattgtagtcgcaatcctgatgttcggtatgcacctagccggagcgttaggtcgtgcagtgatccccgatctcaccgtaccggatctggtgatcccgacgttaatggtaaaagtgctgccaccgtttgctgccgggatctttctggctgcacctatggctgcgatcatgtcgacaattaacgcccaattgctacaaagttccgctacgatcattaaagatctctatctgaatatccgtccggatcaaatgcaaaacgagacgcgtctgaagcggatgtcggcggtaattacgttagttctcggcgcgttgctgctgcttgccgcctggaagccgccagaaatgatcatctggctgaatttgctggccttcggtgggctggaagccgttttcctgtggccgctggtgctgggtctttactgggaacgcgccaacgccaaaggcgcgctaagtgcgatgatcgttggcggcgtgctgtatgccgtactcgcgacgctgaatattcagtacctgggcttccaccctatcgtgccctcgttactactaagtttgctggctttcctggtcggaaaccgtttcggtacatccgtcccgcaagctaccgttttgactactgataaataa

SEQ ID NO: 483181 - DNA, 882 bp, Shigella sonnei
atgccttggatccaactgaaactgaacaccaccggcgcgaacgctgaagatcttagcgatgcgctgatggaagcgggtgccgtttctatcacttttcaggatacccacgatacgccagtatttgagccgctgccgggcgaaacgcgcctgtggggcgacaccgatgtgattggtctgttcgacgctgaaaccgatatgaacgacgtggtggcgattctggaaaaccatccgctgctcggcgcaggcttcgcgcataaaatcgaacaactggaagataaagactgggagcgcgaatggatggataatttccacccgatgcgctttggtgaacgactgtggatctgccctagctggcgtgatgtgccggacgaaaacgccgtcaacgtgatgttagatccagggctggcgtttggtacgggtacccatccaactacctctctgtgcctgcagtggctcgacagcctcgatttaaccggtaaaatagtcatcgactttggctgtggttccggcattctggctatcgcggcgctgaaactgggtgcagcaaaagccattggtattgatatcgatccgcaggcgattcaggctagccgcgacaacgccgaacgtaatggcgtttctgaccgtctggaactctacttaccgaaagatcagccagaagaaatgaaagccgacgtggtggtcgctaacatccttgcaggcccattacgtgaactggcaccgttaatcagcgtcctgccggtttcaggcggtttgctgggcctttccggtattctggcaagccaggcagagagcgtttgtgaagcttatgtcgacagcttcgcactggacccggtcgtggaaaaagaagagtggtgccgcattaccggtcgtaagaattaa

SEQ ID NO: 483182 - DNA, 966 bp, Shigella sonnei
atgcgcatcggacaatatcagctcagaaatcgcctgatcgcagcgcccatggctggcattacagacagaccttttcggacgttgtgctacgagatgggagccggattgacagtatccgagatgatgtcttctaacccacaggtttgggaaagcgacaaatctcgtttacggatggtgcacattgatgaacccggtattcgcaccgtgcaaattgctggtagcgatccgaaagaaatggcagatgcagcacgtattaacgtggaaagcggtgcccagattattgatatcaatatgggttgcccggctaaaaaagtgaatcgcaagctcgcaggttcagccctcttgcagtacccggatgtcgttaaatcgatccttaccgaggtcgtcaatgcagtggacgttcctgttaccctgaagattcgcaccggctgggcaccggaacaccgtaactgcgaagagattgcccaactggctgaagactgtggcattcaggctctgaccattcatggccgtacacgcgcctgtttgttcaatggagaagctgagtacgacagtattcgggcagttaagcagaaagtttccattccggttatcgcgaatggcgacattactgacccgcttaaagccagagctgtgctcgactatacaggggcggatgccctgatgataggccgcgcagctcagggaagaccctggatctttcgggaaatccagcattatctggacactggggagttgctgcccccgctgcctttggcagaggttaagcgcttgctttgcgcgcacgttcgggaactgcatgacttttatggtccggcaaaagggtaccgaattgcacgtaaacacgtttcctggtatctccaggaacacgctccaaatgaccagtttcggcgcacattcaacgccattgaggatgccagcgaacagctggaggcgttggaggcatacttcgaaaattttgcgtaa

SEQ ID NO: 483183 - DNA, 297 bp, Shigella sonnei; identical to SEQ ID NO: 459552

SEQ ID NO: 483184 - DNA, 885 bp, Shigella sonnei
atgagaacaggatgtgaaccgacccggtttggtaatgaagctaagaccattattcacggtgatgcccttgccgaacttaaaaagctacctactgaaagcgtcgatctgatctttgccgacccaccgtataacatcggtaaaaattttgatggtctgatcgaagcctggaaagaagatctgtttatcgactggctgtttgaagtgattgtagagtgccaccgcgttctgaaaaagcagggcagcatgtacattatgaacagtacggaaaacatgccctttatcgatctccagtgccgcaagctttttaccatcaaaagtcgcatcgtctggtcatatgacagttctggagtacaggcgaaaaaacactacggctccatgtacgaacccatcctgatgatggtgaaagacgcaaagaactacacattcaacggtgatgctattctggtagaagccaaaaccggatcgcagcgcgcgttgatcgattatcgcaaaaatcctccacagccatacaatcatcaaaaagtaccgggtaacgtctgggattttccgcgcgtgcgttatttgatggatgaatatgagaaccacccgacgcaaaaaccggaagccttactgaaacgcattattctcgcctcttccaacccaggcgatatcgttctcgacccgtttgccggtagctttactaccggtgccgtagccatcgccagcggacgaaaattcattggtattgagatcaacagcgagtacatcaaaatggggcttcgacggctggatgtcgcgtcgcattactccgcggaagaactggcgaaagtgaaaaaaagaaagaccggcaacctgtcaaaacgaagccggttaagcgaagttgaccccgatctcattgcaaagtaa

SEQ ID NO: 483185 - DNA, 180 bp, Shigella sonnei
atgattcgcaagtattggtggctcgtcgttttcgctgtcttcgtttttctgtttgatactttactgatgcagtggattgaactgctgacaacagaaacagacaaatgccgtaatatgaactcagtttatccactaaaactggttaactgtgacgaactgaattttcaggacagaatgtga

SEQ ID NO: 483186 - DNA, 663 bp, Shigella sonnei
atggcaaaaagaaccaaagccgaagctctgaagacccggcaagaactgattgaaactgccatcgcccagtttgcgcaacatggcgtaagcaagacgacgttcaacgacattgccgatgccgctaacgttacgcgtggcgctatctactggcacttcgagaacaagacccaactgtttaatgagatgtggttgcaacagccttcattgcgggagttaatccaggaacacttgacggctggattagagcatgacccgtttcaacaattgcgtgaaaaattgattgtcggcttgcaatatattgccaaaattccccgccagcaggcgttgctgaaaatcttatatcacaaatgtgaatttaatgatgggatgctggccgagggagtgatacgcgaaaagatgggctttaatccgcagactctccgcgaagtattgcaggcgtgtcagcaacaaggttgtgtagcaaataacctcgatttagatgttgtgatgattattattgatggtgccttcagcggaattgttcaaaactggttaatgaatatggcgggttatgatctttataaacaagcacccgcgctggtcgataacgtattaagaatgttcatgccagatgaaaacataacgaaattaattcatcaaacaaatgaattaagtgtcatgtaa

SEQ ID NO: 483187 - DNA, 1158 bp, Shigella sonnei
atgacgaaacatgccaggtttttcctcctgccctcctttattctgatctccgcggctttaatcgtcggttgtaacgataagggagaagagaaagctcacgtcggtgaaccgcaggttaccgttcatattgtgaaaacggccccgttagaagttaagactgaattaccaggccgcaccaatgcttaccgtatagccgaagttcgcccacaggttagcgggatcgtactgaatcgtaatttcactgaaggcagcgatgtacaagcaggccagtccctgtaccagatcgatcccgcgacctatcaggcaaattatgacagcgcgaaaggcgaactggcgaaaagtgaagccgccgccgccatcgcgcatttgacggtaaaacgttacgttccgctcgtgggtacgaaatacatcagccagcaggagtacgaccaggccattgctgatgctcgccaggccgatgccgccgtgattgccgcaaaagccacagtcgaaagcgctcgcatcaatctcgcttataccaaagtgactgcgccaattagcggacgtatcggcaaatcgaccgtgaccgaaggcgctcttgtcactaatgggcaaacgactgaactggcgactgtccagcagctcgatcctatctacgttgatgtgacccaatccagcaacgattttatgaggctgaagcaatccgtagagcaaggaaatttgcataaggaaaacgccaccagcaacgtagagttggtcatggaaaacggtcaaacctatcccctgaaaggtacgctgcaattctctgatgtgaccgttgatgaatgcaccggctccataaccctacgtgctgtcttccctaacccgcaacatacgcttttgccgggtatgtttgtgcgtgcacggattgatgaaggcgtccaacctgacgccattcttatcccgcaacaaggcgttagccgcacaccgcgtggtgatgcaaccgtgctgattgttaacgataaaagtcaggtggaagcgcgccctgtcgttgccagtcaggcgattggcgataaatggttgattagcgaaggtctgaaatctggcgatcaagtcattgtcagcggcctgcaaaaagcgcgtccgggagagcaggttaaagccactaccgatacccccgcagatactgcatcgaagtaa

SEQ ID NO: 483188 - DNA, 138 bp, Shigella sonnei
atggcaaacttttttattcgacgaccgatatttgcatgggtgctggccattattctgatgatggcgggcgcactggcgatcctacaattgcccgtcgctcagtatccaaccattgcaccgcctgcggtttctgtttag

SEQ ID NO: 483189 - DNA, 2925 bp, Shigella sonnei
gtgacgcaggttatcgaacagaatatgaatggtatcgataacctgatgtatatgtcctccaccagcgattccgccggtagcgtgacaattacccttaccttccagtccgggaccgatcctgatatcgcgcaagtgcaggtgcagaacaaactccagctcgccacgccgttgctgccgcaggaggttcagcagcaggggatcagtgttgaaaagtccagtagcagctatttgatggtggcgggctttgtctctgataacccagacaccacacaggacgatatctcggactatgtggcctctaacgttaaagatacgcttagccgtctgaatggcgtcggtgacgtacagcttttcggcgcacagtatgcgatgcgtatctggctggacgccgatctgctaaacaaatataaactgacaccggttgatgtgattaaccagttgaaggtacagaacgatcagatcgctgccgggcagttgggcggaacgccagcgttaccagggcaacagttgaacgcctcgattattgctcagacgcggttaaaaaatccggaagaattcggcaaagtaaccctgcgcgtaaacagtgacggctcggtggtacgcctgaaagatgtcgcacgagttgaacttggcggtgaaaactataacgttatcgctcgtatcaacggaaaaccggcggcgggcctggggattaagctagcaaccggcgcgaacgctctcaataccgcgaaagccattaaggcaaaactggcggaattacagccattcttcccgcagggaatgaaggttctctacccttatgacaccacgccattcgtccagctttctattcacgaagtggtaaaaacgctgttcgaagccattatgctggtgttcctggtgatgtatctgttcttgcagaatatgcgagcaacgctgatccccaccattgcggtacccgtggtgttgttagggacgtttgccatcctcgccgcttttggttactccatcaacacactaacgatgttcgggatggtgcttgccatcgggctgctcgtcgatgatgcgatagtggtggtggagaacgtcgagcgcgtgatgatggaggataagctcccgccaaaagaagcgacggaaaaatcgatgtcgcaaattcagggcgcactggtgggtatcgcgatggtgctgtcagcggtatttattccgatggcattcttcggcggttctactggggcaatttatcgccagttctctatcaccatcgtttcggcaatggcgctttctgttctggtggcattgattcttacccctgcgttatgtgcaacgctgcttaaacccgtctctgctgagcatcacgaaaataagggcggtttcttcggctggtttaataccaccttcgatcatagcgttaaccactacaccaacagcgtcggcaaaatcctcggttccacaggacgatatttactgatctatgcgctgattgttgcaggaatggtggtgttgtttttacgtcttccgtcttccttcttacctgaagaggatcagggtgtctttctgaccatgattcagttacccgctggagcgacgcaagagcggacgcaaaaagtgttggatcaagtgacggattactatctgaataacgagaaagcgaacgtagaaagtgtctttacggttaacggctttagcttcagcggccaggcacaaaacgccggtatggctttcgtcagtctgaaaccgtgggaagagcgtagtggtgacgaaaacagtgcggaagcggtaatccatcgtgccaaaatggaattgggcaagatccgcgacggttttgtcattccattcaatatgccagccattgttgaactgggcacggcaacgggtttcgactttgagttaattgatcaggctgggctgggtcacgatgccctgacccaggcccgtaaccagttgcttggcatggcggcgcaacatcctgccagcttagtcagcgtgcgtcctaatggtctggaagacaccgcgcagtttaaactggaagttgaccaggaaaaggcgcaggcattaggtgtttcactttctgacatcaatcagaccatttcaacggcgctgggtgggacttacgttaacgacttcatcgaccgtggtcgcgtgaaaaaggtgtatgttcaggcggatgccaaattccgtatgctgccagaagatgtcgataaactttatgtccgcagcgccaacggcgaaatggtgccattctctgcctttaccacttcacattgggtgtatggctctccgcgactggaacgctacaacggtctgccgtcaatggagattcagggggaagccgcgccaggaaccagttccggcgatgccatggcattgatggaaaaccttgcgtcaaaattacctgcgggcattggttatgactggacaggtatgtcgtatcaggaacgcttatcgggaaaccaggctcccgctctggtagcaatttcctttgtggttgtcttcctgtgccttgctgcactctatgaaagctggtcaattcctgtctcggttatgttggtcgtgccgttagggattgtcggcgtgctactggcggcaacactctttaatcaaaaaaatgacgtctactttatggtgggcttgctaacgacaattggcttgtcggccaaaaacgctattttgattgttgagttcgctaaagatctcatggagaaaaagggtaaaggtgttgttgaagcgacactgatggcagtacgtatgcgtctgcgtcctatcctgatgacctctctcgcctttattctcggcgtattaccgctagctatcagtaacggtgccggcagtggcgcgcagaacgcagtgggtatcggggtaatgggaggaatggtctctgcaacgttgctggcaatcttcttcgtaccggtgttctttgtggtgatccgccgttgctttaaaggataa

SEQ ID NO: 483190 - DNA, 1245 bp, Shigella sonnei
atgactacgcaacgttcaccggggctattccggcgtctggctcatggcagcctggtaaaacaaatcctggtcggccttgttctggggattcttctggcatggatatcaaaacccgcggcggaagctgttggtctgttaggtactttgttcgtcggcgcactgaaagccgttgcccccatcctggtgttgatgctggtgatggcatctattgctaaccaccagcatgggcagaaaaccaatatccgccctattttgttcctctatctgctgggtaccttctctgctgctctggccgcagtcgttttcagcttcgccttcccttctaccctgcacttatccagtagcgcgggtgatatttcgccaccgtcaggcattgtagaagtgatgcgcgggctggtaatgagcatggtttccaaccccatcgacgcgctgctgaaaggtaactacatcgggatcctggtgtgggcaattggcctcggtttcgcactgcgtcacggtaacgagaccaccaaaaacctggtcaacgatatgtcgaatgccgtcacctttatggtgaaactggtcattcgcttcgcaccgattggtatttttggtctggtttcttctaccctggcaaccaccggtttctccacactgtggggctacgcgcaactgctggtcgtgctggttggctgtatgttactggtggcgctggtggttaacccattgctggtgtggtggaaaattcgtcgtaacccgttcccgctggtgctgctgtgcctgcgcgaaagcggcgtgtatgccttcttcacccgcagctctgcggcgaacattccggtgaatatggcactgtgtgaaaagctgaatctggatcgcgatacctattccgtttctattccgctgggtgccaccatcaatatggcgggcgcagcaatcaccattaccgtgttgacgctggctgcggttaatacgctgggtatcccggtcgatctgcccacggcgctgctgttgagcgtggtggcttctctgtgtgcctgtggcgcatccggcgtggcggggggttctctgctgctgatcccgctggcctgtaatatgttcggtatttcgaacgatatcgccatgcaggtggttgccgtcggctttatcatcggcgtattgcaggactcttgcgaaaccgcgctgaactcttcaactgacgtgctgttcactgcggcagcttgccaggcggaagacgatcgtctggcaaatagcgccctgcgtaattaa

SEQ ID NO: 483191 - DNA, 552 bp, Shigella sonnei
atgaccgcgtattggctggcccagggcgtgggtgtcatcgcctttctgattggtatcacaacatttttcaatcgtgacgaacgtcgcttcaaaaagcagctttcggtctatagcgccgttattggcgtacatttttttcttctgggcacctatcccgctggtgccagtgccatccttaatgccattcgtacattgattaccttacgcacgcgcagcttatgggtaatggcgatttttattgtgctgactggcggaattggcctcgcgaagttccatcatcctgtcgaactattgccggttatcggtacgattgtcagtacctgggcgctgttccgctgtaaagggctcaccatgcgctgcgtgatgtggttttcaacgtgttgctgggtgattcacaacttctgggcggggtcgataggcggcacaatgattgagggtagttttctgcttatgaatggcttgaatatcattcgtttctggcggatgcagaaaaggggaattgatccgtttaaagtagagaaaacccctcccgccgtagacgaaaggggttaa

SEQ ID NO: 483192 - DNA, 1488 bp, Shigella sonnei
atgcaatacatcaagatccatgcgctggataacgtcgcggtcgctttagcagatttggctgaaggcacagaagtcagtgtcgataaccagactgttacgctgcgccaggatgttgctcgtggacataaatttgcgttaacggatatcgcaaaaggggccaacgtcatcaaatatggcctgccgattggttatgcattggcggatattgcggcgggggaacacgtccacgcccacaatacgcgcacgaatctgagcgatctggatcagtatcgctatcaacctgattttcaggatctgcctgcgcaagcggcagatcgtgaagtgcagatctatcgtcgcgctaacggcgatgtcggggtgcgtaacgagctgtggatcctgccaaccgtgggctgtgtcaacggcatcgcgcggcaaatccagaaccgtttcctgaaagagaccaacaacgccgaaggtaccgacggcgtgttcctcttcagccacacctacggctgctcacaactgggcgacgatcacatcaacatccgcaccatgctgcaaaacatggtgcgccacccgaacgcgggcgcagtgctggtgattggtctgggctgtgaaaacaaccaggttgccgcattccgtgaaacgttgggcgatatcgatcctgaacgcgttcatttcatgatctgccaacagcaggatgatgagatcgaagccgggatcgagcatttgcatcagctgtataacgtgatgcgcaacgataaacgcgagccaggcaaactcagcgaactgaagtttggtctggagtgcggtggttctgacggtctttctggtattactgctaacccgatgctggggcgtttctctgactacgtgattgctaacggcggtactaccgtactgaccgaagtgccggagatgtttggcgcagagcagttgctgatggaccattgccgcgacgaagcaacgtttgaaaaactggtcaccatggtcaacgactttaaacagtactttattgcccatgatcagccgatctacgaaaacccatcaccggggaacaaagcgggcggtatcaccacgctggaagacaaatcacttggctgtacccagaaagcgggttccagtgtcgtggttgacgtgctgcgttacggcgagcgtctgaaaacgcctgggctgaacttgttaagtgcgccgggtaacgatgccgtagcgaccagcgccctggcgggtgcgggctgccatatggtgctgttcagtactggtcgcggcacgccatacggtggatttgtgccgacggtgaaaatcgccaccaacagtgaactggcggcgaagaaaaaacactggatcgactttgacgcgggtcagctgatccacggtaaagcgatgccgcagttgctggaagaatttatcgacaccatcgttgagtttgccaacggtaagcaaacttgcaacgagcgtaacgacttccgcgaactggcgatcttcaaaagcggcgtaacgctataa

SEQ ID NO: 483193 - DNA, 1413 bp, Shigella sonnei
atgactccgtttatgactgaagatttcctgttagataccgaatttgcccgccgtctgtatcacgactacgcaaaagaccagccgattttcgattaccattgccatttgccgccgcagcagattgcggaagactatcgttttaaaaacctgtatgacatctggctgaaaggcgatcactacaaatggcgcgctatgcgtaccaacggtgtggccgagcgtctgtgtaccggtgatgcatctgaccgtgaaaaatttgacgcctgggcggcgactgttccgcacactatcggcaacccgttataccactggacgcaccttgaactgcgtcgtccgtttggtatcactggcaaattgctttctccgtcaactgccgatgaaatctggaacgaatgtaacgaactgctggcgcaggataacttctccgcgcgcggcatcatgcagcagatgaacgtgaaaatggtcggcaccaccgatgacccgatcgattctctggagcatcacgcagagatcgccaaagacggctctttcaccatcaaagtgctgccgagctggcgtccggacaaagccttcaacatcgaacaggcgacctttaacgactacatggcgaagctgggcgaagtttccgataccgacattcgccgctttgctgacctgcaaactgccttgaccaaacgtctggatcacttcgccgctcacggctgtaaagtgtctgaccatgcgctggacgtggtgatgtttgctgaagcgaacgaagcggaactggacagcattctggcgcgccgtctggctggcgaaaccctgagcgagcacgaagtggcacagttcaaaactgcggtactggtgttccttggtgccgaatatgcacgtcgcggctgggtacagcagtaccacattggcgcgctgcgtaataacaacctgcgtcagttcaaactgctggggccggatgtaggctttgactccatcaacgaccgtccgatggcggaagagttgtctaagctgctgagcaagcagaacgaagaaaacctgctgccgaaaaccattctctactgcctgaacccgcgcgataacgaagtgctgggcaccatgatcggtaacttccagggcgaaggtatgccgggaaaaatgcagttcggttccggctggtggtttaacgatcagaaagacggtatggaacgtcagatgacccaactggcgcagctcggtctgctgagccgctttgtcggtatgctgactgacagccgtagcttcctgtcatacacccgtcacgaatacttccgccgcattctgtgccagatgatcggtcgctgggtggaagcgggcgaagcaccggcggacatcaacctgctgggcgagatggtgaaaaatatttgctttaacaatgcgcgtgactacttcgccattgaactgaactaa

SEQ ID NO: 483194 - DNA, 477 bp, Shigella sonnei
atgcgtaaaattaaagggttacgttggtatatgatcgcactggtgacgctcggcaccgtgcttggttacctgacgcgtaacactgtggcggcagctgcgccaactctgatggaagagttaaacatctccacccaacagtattcctatatcatcgcagcctattctgctgcttatacggtcatgcaaccggtagcaggttatgtactggatgtgctgggtacgaaaatcggttatgcaatgtttgctgtgctgtgggccgtgttctgtggtgcaaccgcgctggcaggtagctggggtggcctggctgttgctcgtggtgcggtcggtgccgcggaagcagcgatgatcccggcgggtctgaaagccagctccgaatggttcccggcgaaagagcgttccatcgcagtaggctactttaacgtaggttcttcgattggtgcgatgattgcgccgccgctggtggtatggcaatcgtga

SEQ ID NO: 483195 - DNA, 822 bp, Shigella sonnei
atgcacagctggcagatggcatttatcatctccggtgcattgagctttatctgggcgatggcatggctgattttctataaacatccgcgcgaccagaagcatctgaccgatgaagaacgcgactatattattaatggtcaggaagcccagcaccaggtgagcacggcgaagaaaatgtccgttggtcagatcctgcgtaaccgtcagttctggggtatcgcactgccgcgtttcctggcagaaccggcctggggtacttttaacgcgtggatcccgctgttcatgtttaaagtttacggctttaacctgaaagagatcgcgatgttcgcctggatgccgatgctgtttgctgacctcggttgtatcctcggtggttacctgccgccgctgttccagcgttggtttggtgtgaacctgatcgtttcccgtaagatggtcgtaacgctgggtgctgtgctgatgattggcccgggtatgatcggtctgttcaccaacccgtatgtcgcaattatgctgctgtgtatcggtggttttgcccaccaggcactgtctggcgcgctgattacgctctcttctgacgtgttcggtcgtaacgaagtggcgacggcgaacggtttaaccgggatgtccgcatggctggcaagtacgctgtttgcgctggttgtcggtgcactggctgacaccatcggcttcagcccgctgttcgcagttctggcagtatttgacctgctgggtgcgctggttatctggaccgtattgcagaacaaaccggcgattgaggtggcgcaggaaacacataacgatcccgcaccgcaacattaa

SEQ ID NO: 483196 - DNA, 1089 bp, Shigella sonnei
atgagaaatcgattgattgcggcgatattgggcttgtttggcacgctcactggcgttcaggcagctcctgacgtgaccagtgaaattacgtatgatttggcatctggtagagcggattattacttctggaaggatgaagcgtcggcaggaaataatggatatatgtggtatgaatgttcgtatcctgacctccaacaaacctgtacagctaatggaaatatatcgacagtacaaatctatttaactgaacaacgcagtgggatgcgttggccggtaaaactcaaaggatttaaaacagccattgtaagtagcgatgaagcgccgccaggatgcaaggggggcaaagggcttcagacgaatcttaaggattctaatagatcttcatgtacagaagatggtcaacattattatatatacgatacaaagtttcttacgctctaccttgagcagacagagatgaagaatttgccgattggtggcgtctggaaggggaaagttaaattacattcgaacagcccggcccaggactatttcgcaaatattaccctgaatacgctcgaccccaaccatattgacgtgttcttcccggagttcgcccacgccacgccaagggtgcagttagacttgcatccaacaggaagcgttaacggcagcaactacgcgcaagatctgaccatgttggacatgtgcctgtacgatggttttaacggtaatgccatcagttatgaaatcatgctcaaagatgaagggcgaccagctgcagggcgcagagacggtgacttctctatctatcgtcaaggagggaccaccaccgacgagggagaacgcattgattaccgggtcaaaatgtacaacccggaaaccggtgggcaaattgatgtgcgcaataatgaaaatatggtctggaacagcattaacctgaaacgtgtgcgtccggtggtactgcccggtattcgctatgccgtgatgtgtgtgccgacacccttgactctggcagtcgataaattcagcgtgatggataaacaggccgggtactacatgggcaaattgtcagtaatctttacgccttccttgccaaccatcaattga

SEQ ID NO: 483197 - DNA, 2685 bp, Shigella sonnei
atggataaaaaattactggctcttttgatcctggcgagtctcagcccggcagaggcgacattaaccgaaattcccgcagggtttgaggttattgctcagggacagcaggagtatatcgaggtttatttttcagggaaaagtctcggtaaatattatgcaatggttaatcttgataccgtaacatttcttgatccagcaagtctatataacaagctggaactggatgtagacgatcagaaaatcgcgcatatagtgaaagaaaaattatcgcagccgctagctcaccacggtgaattggcttgcggttatgtacgtactgactcagggtgtggttttctgaataccgatacgctggaaataatctataatgatgaagaaagttcggcaacgttgtttattaatccgcaatggaattcagctttcgatgcgaagtcattatatttaaatccagacaaaaatactgttaatgcttttatacatcagcaagacatcaatgttctggcacaggatgattaccaatcgttgtctattcagggaaacggtgcgctgggaataacagaaaatagttatattggtgcacactggaatttcaacggttatgatgcagatgatgtcagtgacagtaatgctgacgtcagcgatctctattatcgttatgattttttacgtcgttattatgtgcaggcgggtcgcatggacaaccgcacactatttaatgcacaaggcgggaactttacctttaactttctgccactcggtgcaattgatgggatgcgtatcgggtcgacactgagctatttaaaccaggcgcaaagccagcaaggaaccccagtaatggttctgctttcgcgcaattctcgtgttgacgcttatcgtaatgagcaacttttgggatcgttttatctcaatagtggttcgcaatttattgataccagttcctttccgccaggcagctacagcgtggcattaaaagtctacgaaaataaccaactcacccgcaccgagcttgtgccgtttaccaaaaccggcggtctgactgacggaaatgcgcaatggttcttacaggcaggtaaaactacatcacaggtttctgatgatgaaagttcagcttatcagctaggagtacgcctgccattacatccgcaatatgagctctacgcagggctggcgaatgccgatgatgtgagtgctttcgagttaggtaataactggacggcagatttaggcggggtggggaatcttgcaatcagcgccagcgtgttccgtaacgatgacggcggcaaaggtgatatgcaacaggccaactggagtaatccgggatggccgacgttgggcttttatcggaccaactctgacggcgatgcttgtacaaccgacagcagagagagctataacgccttaagctgttatgaaagtatttccgcgacggtttcacagaattttgtcggctggaatatgatgctgggttatacccgcacacaaaataacactgatgatagtttgcgttgggataaacagcagagctttgaaaataactatcttcgccagacaacagcgcaaagtatctctgaaactgtacaacttagcgcttcccgcgcttttgtgatgcgtgactggattttgagtacgtcagtcggtgttttccatcgtaatgacaacggtggcgataacgacgacaacggcttgtacttatcgttttcgttatctgacacgccaacgatggatagcaataacaacagccattcaacaaatgtgtctacggattatcgttatagcgaacaggatggcgatcaaacgtcatggcagttatcgcataccttttataacgattcattcagccataaagaacttggcgtaaccgtcggaggcctgaacaccgataccataaacagcgcggttaacgggcgttgggatgggcaatacggaaatgtctacgctaccgtatctgatagttatgaccgtaagaatcatgatcatctttcggcctttacgggcacttatagctctacgctggctgtcagttgctatggcgttaatttgggagccagtggtacagacgatttgctgggtgcggtactggtggatgtgaaaggcttctctgaacaggatgaagagagtcaggatctgcaactcgaagcgcgggtggcaggcagccgaactttgcagcttggtcaaagtgacagtgtgttgttcccttatcctggatttcagtctggttttgttgaggttaacgacagtagccagggcaatcagcaggggacaacaaacatcattaacggtgcagggaatcgtgaattaatgttgttgcctggcaagctgcgctatcgcgaagtgtctgccagctttaactacaactatatcggtcgtttattactgccggcagcggtgaaaaaattcccgattgtggggctgaacagcgccatgttactggtagctgaagatggaggatttacacttgaaattaacggcagcgaaaaagagctctatctgctttccgggcagcaattccttaagtgtccactgagtgttgtaaagaaacgcgccagcattcgttacagcggagatgttacttgtagtgtggtgacttattcacaattaccggagtcgattcaggttcaggcacagttgaaacagcctaaattacgtggaaacgttcagacggcgcaaagggaggttgcaccatga

SEQ ID NO: 483198 - DNA, 501 bp, Shigella sonnei
atgaaaaaggtatttgcaaaatctcttctggtcgcagcgatgttttctgttgcaggctccgcattggcagtacaaaaggatattactgtaacggccaacgttgatgccgctctggatatgacacagaccgataacaccgcgttgccgaaagcagtagaaatgcaatatctgccggggcagggtctgcaatcttaccagttgatgaccaaaatctggtctaacgacgttaccaaagatgtaaaaatgcagttagtttccccggcgcaactggttcaaagcctggatgctagcaagattgttccgctgacagtaacctggggcggtgaagaaattaaagctgatgcggcaaccacttttaccgcaaccaaaatctttgcttccgatgcgttaactaacggttctctggctaaaaacctgatgtttgctcaaaccaccaaaggtgttctggagacaggcatctaccgtggtgtagtaagcatttatctgtctcaggatatctaa

SEQ ID NO: 483199 - DNA, 717 bp, Shigella sonnei
atggtggcgaaaattaatctcttatcacggcttacgccgcttttattcgtgttcgctccttttttggcacagtcaaatatgactgtttatcctatggctgtttccattaatagtcagggtgaaggcaacgttcgcgtaatatctaaaagtaatgaagttcagtacatcaaggcgacagtattccgtatcgataatccatcgacgcctcaggaaaatgaagttgagattaaatccggtgatgcaaatcatctggttgttatgccacctaaattcgctttaccagccggtagtagcaaaactgtgcgctttgttgcaatggaaccagagcaaaaagaaaaaaattatcgcgttaaatttgaagcggttcccagtattgatgacgttgccacagataaaaaagatctctctatgcagttaacagttaacttaatttgggggattgttgttagtgttccacctcagcaacctattgctaagttagaagtaaatgctgcccaaaaattagttaatgcagggaatcaacgcttaaagattttaacgatcgcttattgtaaaaataatagcaaagaaaattgtaagatacagaccgtaaataaaaacatcttccttggtcaggaaagaaatcttgaaagcatatctggctacgacaaaatcgttgtcaaatataataactggatcaccaaagataatggcgagtttgaactggcggtccattaa

SEQ ID NO: 483200 - DNA, 777 bp, Shigella sonnei
atggaaatcactgaaccacgccgtttgtatcaacaacttgccgctgacctgaaagagcgcattgaacagggcgtctatctggtgggtgataaactgcctgccgaacgctttattgccgatgaaaagaacgtcagccgaacggtagttcgtgaagccatcatcatgctggaagttgaaggctatgtggaggtgcgtaaaggttcaggtattcatgtggtttccaaccagccgcgccatcagcaggcggctgacaataatatggaattcgccaattacggtccgtttgagttgcttcaggctcgccagctcatcgaaagtaatattgccgagttcgcggcaactcaggtaacgaaacaagacatcatgaaactgatggccattcaggaacaggcgcgcggcgaacaatgcttccgtgattccgagtgggatttacagttccacattcaggtagccctggcgacgcagaactccgccctggcggccatcgttgaaaaaatgtggacccagcgtagccataacccgtactggaaaaaactacacgaacacattgattcccgtaccgttgataactggtgtgatgaccacgatcaaattctcaaggcgttaattcgcaaagatccccatgctgctaagctggcaatgtggcagcatctggaaaacaccaaaatcatgttatttaacgaaaccagcgacgatttcgagttcaatgccgaccgctatctattcgccgaaaacccggtagtgcatctcgatacggccaccagtggcagtaaatga

SEQ ID NO: 483201 - DNA, 663 bp, Shigella sonnei
atggaacttttgacccaattgctgcaagccctgtgggcgcaggattttgaaaccctggccaatccatcgatgattggcatgttgtattttgtcttgtttgtaattttgttccttgaaaacggcttgcttccagcggcctttttaccgggcgacagtttactggtattggtcggcgtgttgattgcgaaaggcgcgatgggttacccgcaaacgattctgctgctgaccgttgccgccagcctcggctgctgggtcagctatattcaggggcgatggctgggcaatacccgcaccgtacaaaactggctatctcatttacccgcgcattatcatcaacgcgcacaccatctttttcataaacacggtttatcggcgctgttaattggtcgctttattgcgtttgtcagaacactgctgccgacgattgccgggttatcagggctgaataacgcgcgctttcagtttttcaactggatgagcggtctgctgtgggtattgatcctgacaactctgggttacatgctcggcaaaacgccgatatttttaaagtacgaggaccagctgatgtcatgcctgatgctgctcccggtggtgctgctggtgtttggcctggcaggttctctggtcgtgttatggaaaaagaaatatggaaatcgggggtaa

SEQ ID NO: 483202 - DNA, 384 bp, Shigella sonnei; identical to SEQ ID NO: 460922

SEQ ID NO: 483203 - DNA, 369 bp, Shigella sonnei
atgaaataccgcatcgctttagctgtttctctctttgctcttagtgccggtagttatgccactaccctgtgtcaggaaaaggagcaaaatatccttaaggagatcagctatgccgaaaaacaccaaaaccagaatcgtattgacggtctgaataaagccctgagtgaagtccgggccaactgttcagatagccagctgcgtgccgatcatcacaagaaaatcgcaaagcagaaagatgaggtggcggaacgccagcaagatttagccgaggcgaagcaaaaaggcgatgccgataagattgccaaacgcgaacggaaactggcagaagcgcaggaagagctgaaaaagctggaagcgcgcgactactaa

SEQ ID NO: 483204 - DNA, 306 bp, Shigella sonnei; identical to SEQ ID NO: 460924

SEQ ID NO: 483205 - DNA, 405 bp, Shigella sonnei; identical to SEQ ID NO: 471969

SEQ ID NO: 483206 - DNA, 300 bp, Shigella sonnei; identical to SEQ ID NO: 460926

SEQ ID NO: 483207 - DNA, 483 bp, Shigella sonnei
atgattctctccatcgacagcaacgacgctaataccgcgcccttgcacaaaaaaacaatcagcagcctgagtggcgcagtggagagtatgatgaaaaaattagaagatgttggtgtactggtagcgcgcattttaatgccgattctgtttattaccgcaggctggggaaaaatcaccgcttactctggtacccaacaatatatggaagcaatgggtgtcccgggttttatgctgccgctggtgattctgcttgagttcggtggtggtctggcaatcctgttcggtttcctgactcgcaccacagccctgtttactgcgggctttacgctgctgacggcatttttatttcacagcaactttgctgaaggcgtcaactcgctgatgttcatgaaaaacctgacaatttctggcggattcctgctgctggcaattaccggtccgggcgcgtatagcatcgaccgcctgctgaataaaaagtggtaa

SEQ ID NO: 483208 - DNA, 1014 bp, Shigella sonnei
atgggtcaactgattgacggcgtctggcatgacacctggtacgataccaaatctaccggcggtaaatttcaacgttcagcttccgcatttcgtaactggctcactgccgatggcgcacctggccccactggcacaggcggttttatcgcagagaaagatcgttatcatctctatatttcactcgcctgcccgtgggcgcaccgcacgctgatcatgcgcaaactcaaaggactggaaccgtttatttccgtttccgtagtgaacccgctgatgctggaaaacggctggacctttgatgacagttttccgggagcaaccggagatacgctctatcaacatgaatttctgtatcagctttatctccacgccgatccacactacagcggacgagttactgttcccgtactgtgggacaaaaagaaccacaccatcgtcagcaacgaatcaacagaaatcatccgcatgttcaataccgcgtttgatgcgctgggcgcgaaagcgggtgattactacccaccagccctgcaaacgaaaattgacgaacttaacggctggatttatgacaccgttaacaacggcgtgtataaagctggttttgccaccagccagcaagcctacgacgaggcggtggcgaaagtgtttgaatcgctggcgcgactggagcagattttaggccagcatcgttacctgaccggcaaccagctaaccgaagccgatattcgcctgtggactacgctggtgcgttttgatccagtgtatgtgacccacttcaagtgtgataagcaccgcatcagcgattacctgaatctgtatggcttcctgcgcgatatctaccagatgccggggatcgccgaaactgtcaatttcgatcacatccgtaatcattacttccgcagccataagaccatcaaccctacggggattatttcaattggtccgtggcaggatctcgatgaaccgcaggacgagatgttcgcttcggttaaaaaaaggcaccttacgaagtgcctctga

SEQ ID NO: 483209 - DNA, 366 bp, Shigella sonnei
atggactggtatctgaaagtaataaaaaattatgtcggtttccggggtcgtgcgcggcgcaaagagtactggatgtttattctggtcaacatcatctttacgttcgtgctggggctgctggataaaatgttaggctggcaacgcgctggtggcgaaggcatcctgacgacaatctacggtattctggtgtttttaccgtggtgggcagttcagttccgccgcctgcacgacaccgaccgctcggcgtggtgggcactgctattcttaatcccgtttatcggctggcttattatcatcgtctttaactgccaggcgggtacgccaggcgaaaaccgctttggacctgatccaaaactggaaccttaa

SEQ ID NO: 483210 - DNA, 357 bp, Shigella sonnei
atgcagtggtatttatccgtattaaaaaattatgttggtttctctggtcgcgcacgtcgtaaagagtactggatgtttactctgattaacgccatcgtcggcgctattatcaatgtcattcaattgattttaggtctggagcttccatatctgtctatgctttatttgctggcaaccttccttcccgtccttgcgcttgctatccgtcgcttacacgataccgaccgttcaggtgcctgggccttgctcttttttgttccgtttattggctggctcgtgcttctggtttttttctgcacagaaggtacttctggcagcaatcgttacggaaacgatccgaagtttggttcaaattaa

SEQ ID NO: 483211 - DNA, 438 bp, Shigella sonnei
atgcattttcgttcctcgtcggagatcaactcgcgcaagctctatacgttaatgaacgtctacgttgccgcgcctgatcacccgattcatcaggagccggaaccgttatctgaagtgacgcgcgtgaaatatcgtggaattgcggtagcggataccgctcgtgagcgcccggtgttgaccgtacaactgctggacaaacagccgcgcttaacggtgagcacgattgaagataaacgtcaggcattactggcggggcttggcgtggcgacgatgccgtatccgatggtcgaaaaagatattgcggaagggcggttgcgtgtcgtcagcccggaatcgaccagtgagatcgatattattatggcctggcgtcgtgacagtatgggggaagcgaaatcctggtgtctgcgggaaattcccaaactttttagcggaaaataa

SEQ ID NO: 483212 - DNA, 414 bp, Shigella sonnei
atggccaaagaaagggcattaacgctggaagcactacgggttatggatgcgatcgatcgccggggcagttttgcggcggcggcggatgagctgggacgcgtgccttccgcacttagctacaccatgcaaaaactggaagaagagctggatgtggtgctgtttgaccgctcgggccatcgcaccaaattcaccaatgtcgggaggatgttgctggagcgagggcgcgttttgctggaagccgcagataaactgactaccgatgcggaagccctcgcgcgcggttgggaaacgcatctcaccattgtgaccgaagcgctggtaccgacacctgcctttttcccgttaatcgacaaactggcggcaaaagccaatacccaactggcaatcatcaccgaagtgctggcgggggcgtag

SEQ ID NO: 483213 - DNA, 702 bp, Shigella sonnei; identical to SEQ ID NO: 461159

SEQ ID NO: 483214 - DNA, 165 bp, Shigella sonnei; identical to SEQ ID NO: 461160

SEQ ID NO: 483215 - DNA, 1311 bp, Shigella sonnei
atgtttgattcgactttaaatccgttatggcagcgttacatcctcgccgttcaggaggaagtaaaaccggcgctgggatgtactgaaccgatttcactggcgctggcggcggcggttgctgcggcagaactggaaggtccggttgaacgtgtagaagcctgggtttcgccaaatctgatgaagaacggtctgggcgtcaccgttcccggcacgggaatggtggggctgccgattgcggcggcgctgggggcgttaggtggaaatgccaacgccgggctggaagtgctgaaagacgcaactgcgcaggcaattgccgatgccaaagcactgctggcggcggggaaagtctccgttaagatccaggaaccttgcaatgaaatcctcttctcacgcgccaaagtctggaacggtgagaagtgggcgtgtgtcaccatcgtcggcgggcataccaacattgtgcgtattgagacgcacaatggtgtggtgtttacccagcaggcgtgtgtggcagagggcgagcaagagtctccgctgacggtgctttccagaacgacgctggctgagatcctgaagttcgtcaatgaagtcccgtttgcggcgatccgctttattctcgattccgcgaagctaaattgtgcgttatcgcaggaaggtttgagcggtaagtgggggctgcatattggcgcgacgctggaaaaacagtgcgagcgcggtttgctggcgaaagatctctcttcatccattgtgattcgtaccagcgcggcatccgatgcgcgtatgggcggcgctacgcttccggctatgagtaactccggctcgggtaaccaggggatcaccgcaacaatgcctgtggtggttgtagcagaacacttcggagcggatgatgaacgactggcgcgtgcgctgatgctttctcatttgagcgcaatttacatccataaccagttaccgcgtttgtctgcactttgtgccgcaacgaccgcagcaatgggggccgccgccgggatggcatggctggtggatgggcgttatgaaactatctcgatggcgatcagcagtatgatcggcgatgtcagcggcatgatttgcgatggtgcgtcgaacagctgcgcgatgaaggtttcgaccagtgcttcggctgcgtggaaagcggtgttaatggcgctggatgataccgccgtgaccggcaatgaagggatcgtggcgcatgatgttgagcagtcgattgccaacctgtgtgcgttagcaagccattcgatgcagcaaacggatcggcagattatcgagattatggcgagcaaggccagataa

SEQ ID NO: 483216 - DNA, 1332 bp, Shigella sonnei
atggaaatcgcatcgaataaaggcgtcattgcagacgcttcgaccccggcgggtcgtgctggaatgagtgagagcgagtggcgagaagcgatcaaattcgacagtactgacaccggctgggtgattatgagtatcgggatggcgattggcgcggggattgtttttctcccggtgcaggtcggtttgatgggattgtgggtatttttgctctcatcggtgattggttacccggcaatgtatctgtttcagcggttgtttattaatacgctggcagaatcaccagaatgtaaagattacccgagtgtcattagcggttatttaggtaaaaactggggcatcctgttaggtgcgctctatttcgtaatgctggtgatttggatgttcgtctattccaccgccatcaccaacgatagtgcttcctatctgcataccttcggcgtgacggaagggttgctgtcagacagtcccttttatggtctggtactgatttgcattctggtggcgatctcttcacgcggcgagaaattgttattcaaaatttcgaccggcatggtgctgaccaagctgctggtggtcgcggcgctgggcgtgtcgatggtgggaatgtggcatctgtataacgtcggttcgctaccgccgctggggctgctggtgaaaaacgccattattacgctgccgtttaccctgacgtcgattttgtttatccagacgttaagcccgatggtgatctcttatcgctcgcgggaaaaatctattgaagtggcgcggcataaagcattgcgggcaatgaatatcgcgtttggcattttgtttgtcaccgtctttttctacgccgtgtcgttcacgctggcgatggggcatgacgaagcggtaaaagcctacgagcagaatatttccgcgctggcgattgccgcacagtttattagcggtgacggcgcagcgtgggtgaaagtggtcagcgtcattctcaatatctttgctgtcatgactgcattctttggcgtctatttaggctttcgcgaagcaacgcaagggatcgtaatgaacatcctgcgtcgcaagatgcctgccgagaagattaacgaaaatcttgttcagcgcggcatcatgattttcgccattttgctggcctggagcgctatcgtactgaacgcaccggtgttgagcttcacctctatctgtagcccgattttcggcatggtagggtgcctgatcccggcgtggctggtttacaaagtaccggcattgcacaaatacaaagggatgtctctgtacctgattatcgtcactggtttgttgctttgtgtttctccgttcctggcattttcttga

SEQ ID NO: 483217 - DNA, 1365 bp, Shigella sonnei
atgattagtgcattcgatattttcaaaattgggattggtccctccagttcgcataccgtggggccaatgaatgccggaaaaagttttattgatcggctggaaagtagcggcttattaaccgcgacgagccatattgtggtcgatctgtatgggtcgttgtcactgacgggcaaaggccatgccacggatgtcgccattatcatgggactggcaggaaacagtccgcaggatgttgtcattgatgagatccctgcatttatagagttagtaacgcgcagcgggcggctgccagtggcatctggtgcgcatattgttgattttcctgtagcaaagaacattatcttccatcccgaaatgttgcctcgccatgagaacggaatgcggatcactgcctggaagggacaggaagcgctattaagtaaaacctattactctgtcggcggcgggtttattgtcgaagaagaacacttcggcctgtcgcacgatgtcgaaacgtccgtaccttacgatttccactcagcaggtgaactgctgaaaatgtgtgattacaacggcctgtctatatctggcctgatgatgcacaacgagctggcgctgcgcagcaaagcggaaattgacgcaggatttgcccgtatctggcaagtgatgcatgacggtattgaacgcgggatgaacactgaaggcgtgctgcctggtccgctcaatgtgccgcgtcgtgccgtagcgctgcgtcgtcagctggtttctagcgataacatctctaacgatccgatgaatgtcatcgactggatcaacatgtacgcgctggcggttagtgaagaaaacgcagctggcgggcgcgtggtaacggcaccgactaacggtgcgtgcggcattattccggcagtgctggcttattacgataagttccgtcgtccggtaaacgagcggtcaattgcccgctattttctggcagcgggggctattggcgcgctgtataaaatgaacgcctccatctctggcgcggaggtcggctgtcagggggagattggcgtggcctgttcaatggcggcggcagggttaactgaactactgggcggcagtccggcgcaggtatgcaatgcggcggaaatcgcgatggagcataaccttgggctgacctgcgatccggttgccggacaggtacaaatcccgtgcattgaacgtaatgccattaatgccgtgaaagcagtaaacgccgcgtggatggcgatgcgccgcacctcggcaccgcgtgtttcactcgataaagtgatcgagacgatgtatgaaaccggcaaagatatgaacgataaataccgcgaaacatcacgcggaggactggccattaaagtggtctgcggctga

SEQ ID NO: 483218 - DNA, 390 bp, Shigella sonnei
atgaaaaagattatcgaaacgcaacgtgccccaggcgcaatcggcccttatgttcagggcgttgatttaggcagcatggtcttcacctccgggcaaattccggtttgcccgcagaccggtgagatcccggctgatgtgcaagatcaggcgtgtttaagcctcgaaaacgtcaaagcgatcgtggttgctgccgggctgagcgtgggcgatatcatcaagatgaccgtgttcatcaccgatctgaatgattttgccaccatcaatgaagtctataagcagttcttcgatgagcatcaggcgacctacccgacccggagctgtgtgcaggttgcgcgtttgccgaaagatgtgaagctggaaattgaagctatcgcagtacgtagtgcgtaa

SEQ ID NO: 483219 - DNA, 2295 bp, Shigella sonnei
atgaagatagatattgataccagcgataagctgtacgccgacgcatggcttggctttaaaggtacggactggaaaaacgaaattaatgtccgcgattttattcaacataactatacaccgtatgaaggcgatgaatctttcctcgccgaagcgacgcctgccaccacggaattgtgggaaaaagtaatggaaggcatccgtatcgaaaacgcaacccacgcgccggttgatttcgataccaatattgccaccacaattaccgctcatgatgcgggatatattaaccagccgctggaaaaaattgttggtctgcaaacggatgcgccattaaagcgcgcgctgcatccgttcggtggcattaatatgattaaaagttcattccacgcctatggccgtgaaatggacagtgaatttgaatatctgtttaccgatctgcgtaaaacccataaccagggcgtatttgatgtttactcaccggatatgctgcgctgccgtaaatctggcgtgctgaccggtttaccagatggctatggccgtgggcgcattatcggtgactatcgccgcgtagcgctgtatggcatcagttatctggtgcgtgaacgcgaactgcaatttgccgatctccagtcccgtctggaaaaaggcgaagatctggaagccaccatccgtctgcgtgaggagctggcagagcatcgtcatgcgctgttgcagattcaggaaatggcggcgaaatatggctttgatatctctcgcccggcgcagaatgcgcaggaagcggtgcagtggctctacttcgcttatctggcggcagtgaaatcacagaacggcggcgcgatgtcgctggggcgcacggcgtcgttcctcgatatctacattgagcgcgactttaaagcaggcgtactcaatgagcagcaggcacaggaactgatcgatcacttcattatgaagatccgtatggtgcgcttcttgcgtacgccggaatttgattcgctgttctccggcgacccaatctgggcgacggaagtgatcggcgggatggggctggacggtcgtacgctggtgaccaaaaactccttccgctatttgcacaccctgcacactatggggccggcaccggaacctaacctgaccattctttggtcggaagaattaccgattgccttcaaaaaatatgccgcgcaggtgtcgatcgtcacctcttccttgcagtatgaaaacgacgatctgatgcgtactgacttcaacagcgacgattacgcaattgcttgttgcgtcagcccaatggtgattggtaagcaaatgcagttctttggtgcacgcgctaacctggcgaaaacactgctgtacgcaattaacggcggggtggacgagaagctgaagattcaggtcgggccgaaaacagcaccgctgatggacgacgtgctggattacgacaaagtgatggacagcctcgatcacttcatggactggctggcggtgcagtacatcagcgcgctgaatatcattcactacatgcacgacaagtacagctacgaagcttcgctgatggcgctgcacgatcgtgatgtctatcgcactatggcatgcggcatcgcgggcctgtcggtggcgacggactccctgtctgccatcaaatatgcccgcgtgaaaccaatccgtgacgaaaacggcctggcggtggactttgaaatcgacggtgaatatccgcagtacggcaacaacgacgagcgcgtagacagcattgcctgcgacctggttgaacgctttatgaagaaaattaaagcgctgccaacctatcgcaacgccgtccctacccagtcgattctgactatcacttctaacgtggtgtacggccagaaaaccggtaatacgccggacggtcgtcgcgccggaacaccgttcgcgccgggcgctaacccgatgcatggtcgtgaccgcaaaggtgccgtggcctcattgacttcggtggcgaaactgccgttcacctacgccaaagatgggatctcgtacaccttctcaatcgttcctgcggcgctgggcaaagaagatccagtacgtaaaaccaaccttgtcggcctgctggatgggtatttccaccacgaagcggatgtcgaaggcggtcaacacctcaacgtcaacgtaatgaatcgggaaatgctgctggatgccatcgagcacccggaaaaatatcctaacctgacaatccgtgtctctggctacgccgtgcgcttcaacgcactgacccgtgaacagcaacaggatgttatttcacgtacttttacccaggcgctctga

SEQ ID NO: 483220 - DNA, 1209 bp, Shigella sonnei
atgaatgaatttccggttgttttggttattaactgtggttcgtcttcgattaagttttccgtgctcgatgccagcgactgtgaagtattaatgtcaggtattgccgacggtattaactcggaaaatgcattcttatccgtaaatgggggagagccagcaccgctggctcaccacagctacgaaggtgcattgaaggcaattgcatttgaactggaaaaacggaatttaaatgacagtgtggccttaattggccaccgcatcgctcacggcggcagtatttttaccgagtccgccattattaccgatgaagtcattgataatatccgtcgcgtttctccactggcacccctgcataattacgccaatttaagtggtattgaatcggcgcagcaattatttccgggcgtaactcaggtggcggtatttgataccagtttccaccagacgatggctccggaagcttatttatacggcctgccgtggaaatattatgaagagttaggtgtacgccgttatggtttccacggcacgtcgcaccgctatgtttcccagcgcgcacattctctgctgaatctggcggaagatgactccggcctggttgtggcgcatcttggcaatggcgcgtcaatctgcgcggttcgcaacggtcagagtgttgatacttcaatgggaatgacgccgctggaaggcttgatgatgggaacccgcagtggcgatgtcgactttggtgcgatgtcctgggtcgccagccaaaccaaccagagcctgggtgacctggaacgcgtagtgaataaagagtcgggattattaggtatttccggtctttcttcggatttacgtgttctggaaaaagcctggcatgaaggtcacgaacgcgcgcaactggcaattaaaacctttgttcaccgaattgcccgtcatattgccggacacgcagcttcattacgtcgcctggatggaattatattcaccggcggaataggagagaattcaagtttaattcgtcgtctggtcatggaacatttggctgtattaggcgtagtgattgatacagaaatgaataatcgctctaactcttttggagagcgaattgtttccagtgaaaatgcgcgtgtcatttgtgccgttattccgactaacgaagaaaaaatgattgctttggatgccattcatttaggcaaagttaacgcgcccgcagaatttgcataa

SEQ ID NO: 483221 - DNA, 1332 bp, Shigella sonnei
atgagtacttcagatagcattgtatccagccagacaaaacaatcgtcctggcgtaaatcagataccacatggacgttaggcttgtttggtacggcaatcggcgccggggtgctgttcttccctatccgcgcaggttttggcggactgatcccgattcttctgatgttggtattggcataccccatcgcattttattgccaccgggcgctggcgcgtctatgtctttctggctctaacccttccggcaacattacggaaacggtggaagagcattttggtaaaactggcggcgtggttatcacgttcctgtacttcttcgcgatttgcccactgctgtggatttatggcgttactattaccaatacctttatgacgttctgggaaaaccagctcggctttgcaccgctgaatcgcggctttgtggcgctgttcctgctgctgctgatggctttcgtcatctggtttggtaaggatctgatggttaaagtgatgagctacctggtatggccgtttatcgccagcctggtgctgatttctctgtcgctgatcccttactggaactctgcagttatcgaccaggttgacctcggttcgctgtcgttaaccggtcatgacggtatcctgatcaccgtctggctggggatttccatcatggttttctcctttaatttctcgccaatcgtctcttccttcgtggtttctaaacgtgaagagtatgagaaagacttcggtcgcgacttcaccgaacgtaaatgttcccaaatcatttctcgtgccagcatgctgatggttgcagtggtgatgttctttgcctttagctgcctatttacgctgtctccggccaacatggcggaagccaaagcgcagaatattccagtgctttcttatctggctaaccactttgcgtccatgaccggtaccaaaacaacgttcgcgattacactggaatatgcggcttccatcatcgcactcgtggctatcttcaaatctttcttcggtcactatctgggaacgctggaaggtctgaatggcctggtcctgaagtttggttataaaggcgacaaaactaaagtgtcgctgggtaaactgaacactatcagcatgatcttcatcatgggctccacctgggttgttgcctacgccaacccgaacatcctcgacctgattgaagccatgggcgcaccgattatcgcatccctgctgtgcctgttgccgatgtatgccatccgtaaagcgccgtctctggcgaaataccgtggtcgtctggataacgtgtttgttaccgtgattggtctgctgaccatcctgaacatcgtatacaaactgttttaa

SEQ ID NO: 483222 - DNA, 990 bp, Shigella sonnei
atgcatattacatacgatctgccgattgctattgatgatattattgaagcgaaacaacgactggctgggcgaatttataaaacaggcatgcctcgctccaactattttagtgaacgttgcaaaggtgaaatattcctgaagtttgaaaatatgcagcgtacgggttcatttaaaattcgtggcgcatttaataaattaagttcactgaccgatgcggaaaaacgcaaaggcgtggtggcctgttctgcgggcaaccatgcgcaaggggtttcgctctcctgcgcgatgctgggtatcgacggtaaagtggtgatgccaaaaggtgcgccaaaatccaaagtagcggcaacgtgcgactactccgcagaagtcgttctgcatggtgataacttcaacgacactatcgctaaagtgagcgaaattgtcgaaatggaaggccgtatttttatcccaccttacgatgatccgaaagtgattgctggccagggaacgattggtctggaaattatggaagatctctatgatgtcgataacgtgattgtgccaattggtggtggcggtttaattgctggtattgcggtggcaattaaatctattaacccgaccattcgtgttattggcgtacagtctgaaaacgttcacggcatggcggcttctttccactccggagaaataaccacgcaccgaactaccggcaccctggcggatggttgtgatgtctcccgcccgggtaatttaacttacgaaatcgttcgtgaattagtcgatgacatcgtgctggtcagcgaagacgaaatcagaaacagtatgattgccttaattcagcgcaataaagtcgtcaccgaaggcgcaggcgctctggcatgtgctgcattattaagcggtaaattagaccaatatattcaaaacagaaaaaccgtcagtattatttccggcggcaatatcgatctttctcgcgtctctcaaatcaccggtttcgttgacgcttaa

SEQ ID NO: 483223 - DNA, 939 bp, Shigella sonnei
atgagcactattcttcttccgaaaacgcagcacctggtagtctttcaggaagtcattagaagtggctctatcggctcggctgcaaaagaattagggttaactcaaccggccgtcagtaaaatcattaacgatattgaagattattttggtgtggaattagtggtgcggaaaaataccggtgtaacattaacacctgccggtcaattgttactctcccgttccgaatccattacccgtgaaatgaaaaatatggttaatgagataagcggtatgtcttctgaggcggtggtggaagtctcatttggttttccttcattgattggttttacttttatgtcagggatgatcaacaagttcaaagaggtgttcccgaaagcgcaggtttctatgtatgaagcgcaactgtcttcgttcttaccggcaatccgcgacggtcgactggattttgcgattggtacattaagtgcagaaatgaagcttcaggatttacatgttgagccgctgttcgagtccgagtttgtgctggtagccagtaagtcccgaacatgcaccggcaccaccacgctggagtcgttgaagaacgaacagtgggtgttgccacaaactaatatggggtactacagcgaactgcttactacgttacaaagaaatggcatcagtattgaaaacatcgttaaaaccgactcagtcgtgacaatttataatcttgttctcaatgctgatttcttaactgtaattccttgtgatatgacgtcaccttttggttctaatcaatttattactattccggttgaagaaacattacctgtggcacaatatgccgcggtatggtcgaaaaattatcgtattaaaaaagcagcatcggttttggtggaattagccaaagagtattcatcttataatgggtgtagacgaaggcaattaatagaagttggttag

SEQ ID NO: 483224 - DNA, 621 bp, Shigella sonnei
atggcttttcgcatgatgcgttattccattgcggcaatgcaaaaccatcttgatgcgggctataaagagcttccattggtgatcccgatgctgttttatcatggttgcagaagtccttatccttattcactctgctggcttgatgaatttgccgagcctgctatagcccgcaaaatatattcatcagcgtttccgttggtggatattaccgtggtgccggatgacgagattatgcaacaccgcaaaatggcgctgttggagttaattcagaaacatattcgtcagcgcgatctgttgggattagtcgaccaaattgtttcgctgctagttacagggaacactaatgacagacagctaaaagccctgtttaattacgtattacaaacaggggatgcccagcgtttccgtgcatttattggtgagataacagaacgcgcaccacaagaaaaggagaaactgatgaccattgctgacagattacgtgaagaaggcgcaatgcagggcaaacacgaagaagccctgcgtattgctcaggagatgctggatagaggtttagacagagagttagttatgatggtgacccgactttcaccagacgatcttatcgcgcaaagccactaa

SEQ ID NO: 483225 - DNA, 894 bp, Shigella sonnei
atgaacatagtgatcaccggagggacgggattaattggtcgccatttgattccgcgtttgctggagctgggccatcaaatcacggtagtgacgcgtaacccacagaaagccagttccgttctcggccctcgggtgacgctatggcaagggctagccgatcaaagcaacctcaacggcgttgatgcggtaatcaacctggccggagaaccgattgctgataaacgctggactcacgagcaaaaagagcgtctctgccaaagccgctggaatatcacgcaaaaactggtcgatttgattaatgccagcgacacgccgccgtcggtattcatttccggctcggcaacgggctattatggcgacttaggtgaagtggtggttaccgaagaggaaccgccgcataacgaatttactcataaactctgcgcccgctgggaagagattgcctgccgggcgcaaagtgacaaaacgcgagtgtgcctgctgcgaaccggcgtggtactggcaccggacggcggtattctcggtaaaatgctgccaccgtttcgtcttggcctgggcgggccgattggttccggtcggcagtatctggcctggattcatattgatgatatggtcaacggcattctctggctgctggataacgacctgcgcgggccatttaatatggtttcgccctacccggtacgcaatgaacaatttgcccatgcgctcggtcaagcgctgcatcgcccggccattttgcgcgtccccgcaaccgccattcggctgttaatgggcgaatcttcaatactggtattaggtggacaacgcgcgctgcctaaacggctggaagaagcgggttttgcgtttcgctggtacgatttagaagaggcgctggcggatgtcgttcgctga

SEQ ID NO: 483226 - DNA, 363 bp, Shigella sonnei; identical to SEQ ID NO: 458284

SEQ ID NO: 483227 - DNA, 648 bp, Shigella sonnei
atgatcgatctctatttcgccccgacacccaatggtcacaaaattacgctgtttctcgaagaagcagagcttgattatcgcttgattaaggtagacctggggaaaggcggtcagtttcgtccggaatttttgcgcatttcgcccaacaacaaaattccggcaattgttgatcattctcctgccgatggcggcgaaccgctaagcctctttgagtctggtgccattttgttgtatctgactgagaaaacaggactctttttgagtcatgaaacgcgtgagcgcgccgccacattacagtggttattctggcaggtaggcggactggggccgatgcttgggcaaaatcatcattttaatcacgcagccccccaaaccattccttacgctattgaacgttatcaggttgaaactcagcgtctttaccatgtactaaacaagcggctggaaaactcgccctggctgggaggcgagaactacagcattgcggatattgcctgctggccgtgggttaatgcctggactcgccagcgaattgacctcgcaatgtatccggcagtcaagaactggcatgagcggatccgttcgcgccctgccaccgggcaggcactgctaaaagcacaactcggtgatgagcgttcggatagttaa

SEQ ID NO: 483228 - DNA, 645 bp, Shigella sonnei
atgagtaaacccgctatcacgctttggtcagatgcccactttttctccccttatgtgttatccgcctgggtggcgttgcaggaaaaaggcctgtcgtttcatatcaagaccatcgacctcgacagcggtgaacatttgaagccgacgtggcaaggttacggtcagacacgccgtgtgccgttattacaaatcgatgattttgagttgagtgaatcttctgccattgcggagtatctggaagatcgatttgcgccaccgacctgggaacgtatttatccgcttgatttagaaaatcgtgcgcgtgcacgacggattcaggcctggctgcgcagcgatctgatgcccatccgcgaagagcgtccgacggatgttgtctttgcgggggcgaaaaaagcgccactaacggccgagggaaaagccagtgcagagaaactgttcgcgatggcagaacatttgttagcactgggtcagccgaatttatttggtgaatggtgcattgctgatactgatctggcgctaatgattaaccgcctggtactacatggcgatgaggtgccagaacgcctggtggattatgcgacattccagtggcagcgagcgtctgtccagcgttttattgcactttcggcgaagcaatctggctga

SEQ ID NO: 483229 - DNA, 552 bp, Shigella sonnei; identical to SEQ ID NO: 458281

SEQ ID NO: 483230 - DNA, 543 bp, Shigella sonnei; identical to SEQ ID NO: 458280

SEQ ID NO: 483231 - DNA, 1479 bp, Shigella sonnei
atgcccgatacgttggtgattatcttttttgttgctattttaaccagccttgccacctgggtagttccggtggggatgtttgacagtcaggaagtgcagtatcaggttgatggtcaaacaaaaacacgcaaagtcgtagatccacactcatttcgcattctgactaacgaagcaggcgaacctgagtatcaccgcgtacagctgttcacgacgggcgatgaacgcccgggcctgatgaacttcccgtttgaaggattaacctcaggatcgaaatacgggacagctgttggcatcatcatgtttatgctggtgattggcggcgcgtttggcattgtgatgcgtacaggaaccattgataacggtatcctggcgcttattcgccatacccgcgggaatgaaattctctttattcctgcgctgtttattctgttttcacttggcggcgcggtatttggtatgggagaagaggccgtcgcctttgccattatcatcgcaccgctaatggtccggctgggctatgacagtattaccaccgtcctggtgacctatattgccacgcaaatcggttttgccagttcgtggatgaacccgttttgtgtggtcgttgctcaggggattgccggcgttccggtgctttctggctccgggttgcgcatcgtggtgtgggttatcgccactatgattggcctgatctttaccatggtgtacgcctcacgagtgaaaaagaatcctcttctgtcacgcgtgcatgagtccgaccgcttctttcgtgaaaagcaggcggatgttgaacaacgtccgtttacctttggtgactggctggtattgattgtcctgaccgccgtaatggtctgggtgatttggggcgtgatcgttaatgcctggtttattccagaaattgccagccagttcttcaccatgggtctggtgattggcatcatcggcgttgttttccgccttaacggcatgacggttaataccatggcttcatcctttaccgaagggacgcgaatgatgatcgcccctgccctgctggtgggtttcgccaaagggattttgctgctggtcggtaatggtgaagcgggtgatgccagcgtgttaaataccatcctcaacagcattgccaatgccattagcggtctggacaacgcggtcgcggcctggtttatgttgctcttccaggcggtatttaatttcttcgtgacgtccggttctggtcaggcggcgttaaccatgccgttactggcaccgcttggcgatctggtcggtgttaaccgtcaggttaccgtgctggcattccagtttggtgatggcttcagtcacatcatttacccaacctcagcttcgttaatggcaactctcggtgtgtgcagggtggacttccgtaactggctgaaggtgggcgcgaccctacttggactgctgtttattatgtccagcgtcgtagtgatcggcgctcagttgatgggctaccactaa

SEQ ID NO: 483232 - DNA, 2145 bp, Shigella sonnei
gtgtcccgtattattatgctgatccctaccggaaccagcgtcggtctgaccagcgtcagccttggcgtgatccgtgcaatggaacgcaaaggcgttcgtctgagcgttttcaaacctatcgctcagccgcgtaccggtggcgatgcgcccgatcagactacgactatcgtgcgtgcgaactcttccaccacgacggccgctgaaccgctgaaaatgagctacgttgaaggtctgctttccagcaatcagaaagatgtgctgatggaagagatcgtcgcaaactaccacgctaacaccaaagacgctgaagtcgttctggttgaaggtctggtcccgacacgtaagcaccagtttgcccagtctctgaactacgaaatcgctaaaacgctgaatgcggaaatcgtcttcgttatgtctcagggcactgacaccccggaacagctgaaagagcgtatcgaactgacccgcaacagcttcggcggtgccaaaaacaccaacatcaccggcgttatcgttaacaaactgaacgcaccggttgatgaacagggtcgtactcgcccggatctgtccgagattttcgacgactcttccaaagctaaagtaaacaatgttgatccggcgaagctgcaagaatccagccctctgccggttctcggcgctgtgccgtggagctttgacctgatcgcgactcgtgcgatcgatatggctcgccacctgaatgcgaccatcatcaacgaaggcgacatcaatactcgccgcgttaaatccgtcactttctgcgcacgcagcattccgcacatgctggagcacttccgtgccggttctctgctggtgacttccgcagaccgtcctgacgtgctggtggccgcttgcctggcagccatgaacggcgtagaaatcggtgccctgctgctgactggcggctacgaaatggacgcgcgcatttctaaactgtgcgaacgtgctttcgctaccggcctgccggtatttatggtgaacaccaacacctggcagacctctctgagcctgcagagcttcaacctggaagttccggttgacgatcacgaacgtatcgagaaagttcaggaatacgttgctaactacatcaacgctgactggatcgaatctctgactgccacttctgagcgcagccgtcgtctgtctccgcctgcgttccgttatcagctgactgaacttgcgcgcaaagcgggcaaacgtatcgtactgccggaaggtgacgaaccgcgtaccgttaaagcagccgctatctgtgctgaacgtggtatcgcaacttgcgtactgctgggtaatccggcagagatcaaccgtgttgcagcgtctcagggtgtagaactgggtgcagggattgaaatcgttgatccagaagtggttcgcgaaagctatgttggtcgtctggtcgaactgcgtaagaacaaaggcatgaccgaaaccgttgcccgcgaacagctggaagacaacgtggtgctcggtacgctgatgctggaacaggatgaagttgatggtctggtttccggtgctgttcacactaccgcaaacaccatccgtccgccgctgcagctgatcaaaactgcaccgggcagctccctggtatcttccgtgttcttcatgctgctgccggaacaggtttacgtttacggtgactgtgcgatcaacccggatccgaccgctgaacagctggcagaaatcgcgattcagtccgctgattccgctgcggccttcggtatcgaaccgcgcgttgctatgctctcctactccaccggtacttctggtgcaggtagcgacgtagaaaaagttcgcgaagcaactcgtctggcgcaggaaaaacgtcctgacctgatgatcgacggtccgctgcagtacgacgctgcggtaatggctgacgttgcgaaatccaaagcgccgaactctccggttgcaggtcgcgctaccgtgtttatcttcccggatctgaacaccggtaacaccacctacaaagcggtacagcgttctgccgacctgatctccatcgggccgatgctgcagggtatgcgcaagccggttaacgacctgtcccgtggcgcactggttgacgatatcgtctacaccatcgcgctgactgcgattcagtctgcacagcagcagtaa

SEQ ID NO: 483233 - DNA, 1203 bp, Shigella sonnei
atgtcgagtaagttagtactggttctgaactgcggtagttcttcactgaaatttgccatcatcgatgcagtaaatggtgaagagtacctttctggtttagccgaatgtttccacctgcctgaagcacgtatcaaatggaaaatggacggcaataaacaggaagcggctttaggtgcaggcgccgctcacagcgaagcgctcaactttatcgttaatactattctggcacaaaaaccagaactgtctgcgcagctgactgctatcggtcaccgtatcgtacacggcggcgaaaagtataccagctccgtagtgatcgatgagtctgttattcagggtatcaaagatgcagcttcttttgcaccgctgcacaacccggctcacctgatcggtatcgaagaagctctgaaatctttcccacagctgaaagacaaaaacgttgctgtatttgacaccgcgttccaccagactatgccggaagagtcttacctctacgccctgccttacaacctgtacaaagagcacggcatccgtcgttacggcgcgcacggcaccagccacttctatgtaacccaggaagcggcaaaaatgctgaacaaaccggtagaagaactgaacatcatcacctgccacctgggcaacggtggttccgtttctgctatccgcaacggtaaatgcgttgacacctctatgggcctgaccccgctggaaggtctggtcatgggtacccgttctggtgatatcgatccggcgatcatcttccacctgcacgacaccctaggcatgagcgttgacgcaatcaacaaactgctgaccaaagagtctggcctgctgggtctgaccgaagtgaccagcgactgccgctatgttgaagacaactacgcgacgaaagaagacgcgaagcgcgcaatggacgtttactgccaccgcctggcgaaatacatcggtgcctacactgcgctgatggatggtcgtctggacgctgttgtattcactggtggtatcggtgaaaatgccgcgatggttcgtgaactgtctctgggcaaactgggcgtgctgggctttgaagttgatcatgaacgcaacctggctgcacgtttcggcaaatctggtttcatcaacaaagaaggtacccgtcctgcggtggttatcccaaccaacgaagaactggttatcgcgcaagacgcgagccgcctgactgcctga

SEQ ID NO: 483234 - DNA, 456 bp, Shigella sonnei
atgtcaacgccggataatcgttctgttaatttttttagcttgtttcgccgcggacagcattactcaaagacgtggccactggaaaaacgccttgccccggtctttgtcgaaaatcgcgttatcaagatgacgcgttatgcgatccgttttatgccgccgatcgccgtatttactctctgctggcagattgccctgggcggtcagcttgggccggcagttgccactgcactgttcgccttaagtttacccatgcagggattgtggtggctgggcaagcgttctgtaacgccattaccccctgcaatccttaactggttttatgaagttcgcggtaaattgcaggagtctggacaggtgttggcacccgttgaaggcaagcctgattaccaggcattagctgacacgcttaagcgcgccttcaaacaactggataaaactttccttgatgatttgtaa

SEQ ID NO: 483235 - DNA, 495 bp, Shigella sonnei
atggaaatgaccaacgcgcaacgtcttattttgtctaatcagtacaagatgatgactatgctcgatccggcaaatgctgaacgttaccgtcgcctgcaaacaattattgagcgaggttacggattacagatgcgtgaattggatcgcgagtttggcgagctgaaagaagaaacctgccgcactatcatcgacattatggagatgtatcatgcgttgcatgtttcctggtctaatttgcaggaccagcaatccatcgatgaacgtcgtgtcaccttcctcggctttgacgccgccactgaagcacgttacctcggttatgtccgctttatggttaatgtggaagggcgctatacccattttgacgccggaactcacggttttaacgcccagacgccaatgtgggaaaaatatcagcgcatgcttaatgtgtggcatgcctgcccgcgtcagtaccatttgagcgccaacgaaattaatcaaattatcaatgcctga

SEQ ID NO: 483236 - DNA, 285 bp, Shigella sonnei
gtgcggtgcaaaggttttctgtttgatcttgatggaacgctggtggattccctgcctgcggtagaacgggcgtggagcaactgggccagacgtcatgggttagcgccggaagaggtgctggctttcattcacggtaaacaggcgatcacctctctgcgccattttatggcgggcaaatccgaggctgatattgccgccgagtttacgcgtctggagcacatcgaggccacggaaaccgaaggtattacccgcttccgggggcaatcgccttactcagtcatttga

SEQ ID NO: 483237 - DNA, 1833 bp, Shigella sonnei
gtgaacggtgaattgatttgggttctttcattactggccgttgccattgtcttgtttgcgacgggcagagtgcgtatggatgcggtcgctttgtttgttattgtcgcgtttgcattaagcggaacgctgacagtccccgaagtattttccggcttttctgatcctaacgttgtcctgattgccgccttgtttattattggcgatggtttggtccgtaccggtgttgccaccgtaatgggaacatggctggtcaaagttgcgggcaacagtgaaatcaaaatgttggttttgttgatgctgaccgtcgcggggcttggcgcgtttatgagttcaaccggcgttgtcgctatctttattcccgtggtgttaagcgttgccatgcgtatgcaaacttcgccgtcacgtctgatgatgccgttgagttttgccgggctgataagcggcatgatgacgctggtggcgacgccgccgaacctggtagtcaacagtgaattgctgcgtgaaggctatcacggcttcagtttctttagcgtaacacctattggcctggtcgtgctggtgctgggtattttgtatatgttagtgatgcgtttcatgctgaaaggggatacccagaccccgcagcgcgaaggctggacgcgtcgaacctttcgcgatcttatccgtgaatatcgactgaccgggcgtgcgcgacgtctggctattcgccccggatcgccaatgattggtcaacggctggatgatctcaaattacgtgagcgttatggcgctaacgtcatcggtgttgaacgctggcggcgttttcgtcgcgttatcgtgaacgttaatggggtttctgaatttcgcgcgcgtgacgttttgcttattgatatgtctgcggctgatgtcgatctccggcaattttgtagtgagcaattgctggagccgatggtactgcgcggcgagtatttttctgaccaggcccttgatgtgggcatggcagagatttcattaattcctgagtcagaactgattggtaaatcggtgcgcgaaattggttttcgtacccgctacggactgaatgtggtggggctaaagcgcaatggcgtggcgctggaaggttcgctggcggatgagcctctgctgctgggcgatatcatcctggttgtgggtaactggaaactgatcggtatgctggccaaacagggccgcgacttcgtagcgctgaacttaccggaagaggtgagtgaagcatcgcccgcgcacagccaggcaccccatgccattttctgtctggtgctaatggtggcgttaatgctgacagatgaaattcctaatcctgttgccgctatcatcgcctgcctgctgatggggaaattccgctgtatagatgctgaaagcgcctataaatccattcactggccgagcattattttgatcgttgggatgatgccgtttgctgtggcattacagaaaacgggaggtgtcgcgctggcggtgaaagggctgatggacattggcggtggttacgggccacatatgatgctggggtgtttgtttgtcttgtcggcggttattgggctatttatctctaataccgcgacggcggtgttgatggctccgattgcgctggctgctgccaaaacgatgggggtgtcgccttatccattcgcgatggtcgtggcgatggcagcatccgccgcctttatgacaccggtttcttcacctgttaacacactggttttaggtccgggaaattacagcttcagtgactttgtgaagttgggggtaccgttcaccattatcgtgatggcggtttgtgtggtgatgatcccgatgctgtttccgttttga

SEQ ID NO: 483238 - DNA, 600 bp, Shigella sonnei
atgaaacagagccatttttttgcccatctctcccgcctgaaactcattaaccgctggccgctaatgcgcaacgtgcggacggaaaatgtgtccgaacacagtttgcaggtagcgatggtcgcccatgcgctggcagctatcaaaaatcgaaaatttggcggtaatgtcaacgccgaacgtatcgctttactggcgatgtaccacgatgcctcagaagtgctcaccggcgatctccctactccggtgaaatacttcaattcgcaaatcgctcaggagtacaaggctattgaaaaaatcgctcagcaaaaactggtcgatatggttccggaagagctgcgggatatctttgcgccgttaattgacgagcatgcatatagcgatgaagaaaaatcgctggtgaaacaggcagatgcactgtgtgcatatctgaaatgtctggaagaactcgcggccggaaataatgaattcttgctggcaaaaacgcgactggaagcgacgcttgaagcgcgtcgcagccaggagatggactacttcatggaagtatttgttcccagcttccatctttcgctcgatgagattagccaggattcaccgctgtaa

SEQ ID NO: 483239 - DNA, 1218 bp, Shigella sonnei
atgtcccccattgaaaaatccagcaaattagagaatgtctgttatgacatccgtggtccggtgctgaaagaagcaaaacgcctggaagaagaaggtaacaaggtactgaaactgaacatcggcaacccagccccattcggttttgacgcgccagatgaaatcctcgttgacgtgatacgcaacctgcctaccgctcaagggtattgcgattccaaagggctttactccgcgcgtaaagccatcatgcagcactaccaggctcgtggcatgcgtgatgttaccgtggaagatatttacatcggcaatggtgtatcggagcttatcgttcaggcaatgcaggcattgctgaacagcggggacgaaatgttggttcctgcaccagattacccactctggaccgcggcggtttcgctttccagcggtaaagcggtgcattatctttgcgatgaatcctctgactggttcccggacctcgatgatattcgcgctaaaattacgcctcgtacgcgtgggatcgttattatcaacccaaataacccaaccggcgcggtatattccaaagagcttttaatggagattgtggagattgcacgtcagcataatctcattatcttcgccgatgaaatttatgacaaaattctctacgacgatgctgagcatcactcaattgcgccactggcacctgacctgctgaccattacctttaacggactgtcgaaaacgtaccgcgttgcaggcttccgtcaggggtggatggtgttgaacgggccgaaaaaacacgccaaaggctacatcgaaggtctggaaatgctggcttcaatgcgcctgtgtgctaacgttcctgcgcaacacgccattcagaccgcgctgggtggttatcagagcatcagtgaatttattacccctggcggtcgtctttatgagcagcgtaaccgcgcgtgggaactgatcaacgatattccgggcgtttcctgcgtgaaacctcgtggtgcgctgtatatgttcccgaaaatcgacgccaaacgctttaacattcacgacgatcagaaaatggtgctggatttcctgttgcaggaaaaagttctgttggtgcaagggacggcattcaactggccgtggccggatcacttccgcattgtcacgctaccgcgtgtcgatgatatcgagctgtctttgagcaagttcgcgcgtttcctttctggttatcatcagctgtaa

SEQ ID NO: 483240 - DNA, 939 bp, Shigella sonnei
atgataagtgcaaatcgtccgataattaacctcgacctcgatctgctgagaacatttgttgctgttgccgatctgaacacttttgctgccgcagctgccgctgtgtgtcgtactcagtccgccgtaagtcagcaaatgcagcgtctggaacaactcgttgggaaagaactgttcgctcgtcacggtcgcaacaaactgttaactgaacatggcattcaacttcttggttacgccaggaaaatactgcgttttaatgatgaggcctgctcatcattaatgttcagtaatcttcagggcgtgttaactatcggtgcttcagatgaatctgccgatacgatcttacctttcctgttaaatcgcgtgagttcggtttatccgaaattagcgctggatgtccgcgttaaacgtaatgcctatatggcagaaatgctggaatcccaggaagtggatttgatggtaaccacccatcgtccttcagcgtttaaggcattgaacctgcgtacctcgccaacacactggtactgcgcagcggaatacgtattgcaaaaaggcgagccgatccctcttgtattgctggatgatccaagtccgtttcgcgatatggtgctggcgacgcttaataaagcagatattccatggcgactggcttatgtcgcctcgacgcttccggccgttcgtgcggcagtgaaagccggtcttggcgtgacggcaaggccgattgaaatgatgagcccgtacctgcgtgtgctgagtggagtagatggcttaccgccgctacctgataccgaatatttgctgtgctatgacccgtccagtaataatgagctggcccaggtgatctatcaggcgatggagagctaccataatccgtggcaatacagcccaatgtctgctccggaaggggatgattcattgttgattgaaagggatatcgagtaa

SEQ ID NO: 483241 - DNA, 219 bp, Shigella sonnei
atgttgttgaatcgtgtccgttgtgaagcaatggaaaaaatacgggtctattttgacaggaatttgtgtcgattcctccccccaaaagagagtattttcttgatctgtgacacgcttttgtcattccataacaaaaacgcagcaacaaatttacgcatttttaacatcattgtagcaggtgatttttttcaggcgattatttgtgcgttcgggacgtga

SEQ ID NO: 483242 - DNA, 444 bp, Shigella sonnei; identical to SEQ ID NO: 470501

SEQ ID NO: 483243 - DNA, 663 bp, Shigella sonnei; identical to SEQ ID NO: 458267

SEQ ID NO: 483244 - DNA, 1803 bp, Shigella sonnei
atggtgaacaatatgaccgacttaaccgcgcaagaacccgcctggcagacccgtgatcatcttgatgatccggtgattggcgaactgcgcaaccgttttgggccggatgcctttactgttcaggcgactcgcaccggggttcccgttgtgtggatcaagcgtgaacaattactggaagttggcgatttcttaaagaaactgccgaaaccttacgtcatgctgtttgacttacacggcatggacgaacgtctgcgcacacaccgcgaagggttacctgccgcggatttttccgttttctaccatctgatttctatcgatcgtaaccgcgacatcatgctgaaggtggcgctggcagaaaacgacctgcacgtaccgaccttcaccaaactgttcccgaacgctaactggtatgagcgtgaaacctgggatctgtttggcattactttcgacggtcacccgaacctgcgccgcatcatgatgccgcaaacctggaaaggtcacccgctgcgtaaagattacccggcgcgcgctaccgaattctcgccgtttgagctgaccaaagccaaacaggatctggagatggaagccctgaccttcaaaccggaagagtgggggatgaagcgcggcaccgaaaacgaggacttcatgttcctcaacctcggtccgaaccacccgtcggcgcacggggctttccgtatcgttttacaactcgacggcgaagagattgtcgactgcgtaccagacatcggctaccaccaccgtggtgcggagaaaatgggcgagcgccagtcctggcacagctacattccgtataccgaccgtattgaatacctcggcggctgcgttaacgaaatgccttacgtgctggcggtagagaaactggccgggatcaccgtgccggatcgcgttaacgtcattcgcgttatgctctccgaactgttccgtatcaacagccacctgctgtacatctcgacctttattcaggacgtcggcgcaatgacgcccgtgttcttcgcctttaccgatcgtcagaaaatttacgatctggtggaagcgatcacgggtttccgtatgcacccggcgtggttccgtattggcggcgtagcgcacgacctgccgcgcggctgggatcgcctgctgcgtgagttcctcgactggatgccgaaacgtctggcgtcttacgagaaagcggcgctgcaaaataccattctgaaaggtcgttcccagggcgttgccgcctatggcgcgaaagaggcgctggagtggggcaccactggcgcgggcctgcgtgctaccgggatcgacttcgacgtgcgtaaggcgcgtccttattctggctatgaaaacttcgactttgaaatcccggttggaggtggtgtttctgactgctacacccgcgtaatgctgaaagtggaagagctgcgccagagtctgcgcattcttgagcagtgcctcaacaacatgccggaaggcccgttcaaagcggatcacccgctgaccacgccgccgccgaaagagcgcacgctgcaacatatcgaaaccctgatcacccacttcctgcaagtgtcgtgggggccggtgatgcctgccaatgaatctttccagatgattgaggcgaccaaggggatcaacagttactacctgaccagcgacggtagcaccatgagttatcgcactcgtatccgcacgccgagttatgcgcatttgcagcaaattccggcggcgatccgcggcagcctggtgtctgacctgattgtttatctgggcagtatcgattttgttatgtcagatgtggaccgctaa

SEQ ID NO: 483245 - DNA, 501 bp, Shigella sonnei; identical to SEQ ID NO: 470498

SEQ ID NO: 483246 - DNA, 1338 bp, Shigella sonnei
atgaaaaacattatccgtactcccgaaacgcatccgctgacctggcgtctgcgcgatgacaaacagccagtgtggctggacgaataccgcagcaaaaacggttacgaaggggcgcgtaaggcgctgaccgggctgtctccggacgaaatcgttaatcaggtaaaagacgctggtctgaaagggcgcggcggagcgggcttttcgactggcctgaagtggagcctgatgccgaaagacgaatccatgaacatccgttacctgctgtgtaacgccgatgaaatggagccgggcacctataaagaccgcctgttgatggagcaactgccgcacctgctggtggaaggtatgctcatctccgcgtttgcgctgaaagcttaccgtggctacatcttcctgcgtggcgaatatatcgaagcggcagtaaatctgcgccgcgccattgccgaagccactgaagcgggcttgcttggcaaaaacattatgggaacaggtttcgacttcgaactgttcgtccataccggggcagggcgctacatctgcggggaagaaacagcgttaatcaactccctggaagggcgtcgtgctaacccacgctcgaaaccccccttcccggcaacctccggcgtatggggcaaaccgacctgtgtcaacaacgtcgaaaccctgtgtaacgttccggcgatcctcgctaacggcgtggagtggtatcagaacatctcgaaaagtaaagatgctggcaccaagctgatgggcttctccggtcgggtgaaaaatccgggactgtgggaactgccgttcggcaccaccgcacgcgagatcctcgaagattacgccggtggtatgcgtgatggtctgaaatttaaagcttggcagccaggcggcgcggggactgacttcctgaccgaagcgcaccttgatctgccgatggaattcgaaagtatcggtaaagcgggcagccgtctgggtacggcgctggcgatggcggttgaccatgagatcaacatggtgtcgctggtgcgtaacctggaagagtttttcgcccgtgagtcctgcggctggtgtacgccgtgccgcgacggtctgccgtggagcgtgaaaattctgcgtgcgctggagcgtggcgaaggccagccgggcgatatcgaaacacttgagcaactgtgtcgattcttaggcccgggtaaaactttctgtgcccacgcacctggtgcagtggagccgttacagagcgccatcaaatatttccgcgaagaatttgaggcgggaatcaaacagccgttcagcaatacccatttgattaatgggattcagccgaacctgctgaaagagcgctggtaa

SEQ ID NO: 483247 - DNA, 2727 bp, Shigella sonnei
atggctacaattcatgtagacggcaaagaatacgaggtcaacggagcggacaacctgctggaagcttgtctgtctctgggccttgatattccttacttttgctggcatccggcgctgggaagcgtcggtgcttgccgccagtgtgcggtgaagcaataccaaaacgcggaagacacgcgtggtcgcctggtgatgtcctgtatgacaccggcttccgatggcacctttatttccattgacgacgaagaagcgaaacagttccgtgaaagtgtggtcgagtggttaatgaccaaccacccgcacgactgtccggtatgtgaagaaggcggtaactgccatcttcaggatatgactgtgatgaccggacacagcttccgtcgctaccgtttcaccaaacgtacccaccgtaatcaggatttggggccattcatctctcacgaaatgaaccgctgcatcgcctgctaccgctgtgtgcgttactacaaagattacgctgacggtacagatctgggcgtttacggtgcgcacgacaacgtctacttcggtcgcccggaagacggcacgctggaaagcgaattttctggtaacctggtcgaaatttgcccgaccggcgtatttaccgacaaaacgcactccgagcgttacaaccgtaaatgggatatgcagtttgcgccgagcatctgccagcaatgttccatcggctgtaacatcagccccggtgaacgttacggcgaactgcgtcgtatcgaaaaccgttacaacggtacggtaaaccactacttcctctgcgaccgtggtcgtttcggttacggttacgtcaacctgaaggatcgtccgcgtcagccagtacagcgtcgtggcgatgatttcattaccctcaacgccgaacaggcaatgcagggcgcggcagatattctgcgtcagtcgaagaaagtgatcggtattggttctccgcgtgccagcgtggaaagcaactttgcgctgcgtgaactggtgggcgaagaaaacttctacaccggtatcgctcacggtgagcaggaacgtctgcaactggcgctgaaagtgctgcgtgaaggcggcatttatactccggctctgcgcgaaatcgaatcttacgatgcggtactggtgctgggcgaagacgttacccagaccggcgcgcgcgtcgcgctggcagtgcgtcaggctgtgaaaggtaaagcgcgcgaaatggcggcagcacagaaagtggctgactggcagattgcggcaatcctcaacatcggtcaacgtgcgaagcatccgctgtttgttaccaacgttgatgacacccgtctggatgatatcgcggcgtggacttaccgcgcaccggttgaagatcaggcgcgtttaggttttgccatcgcccatgcgctggataactctgcgccagcggttgacggtatcgaacctgagctgcaaagcaaaatcgacgtcatcgtgcaggcactggcaggtgcgaagaaaccgttgattatctccgggacgaacgccggtagcatagaggtgattcaggctgcggctaacgtcgcgaaagccctgaaaggtcgcggcgctgacgttggtatcaccatgattgcccgttccgtcaacagcatggggctgggcattatgggtggcggttcgcttgaagaagcgttgaccgaactggaaaccggacgcgccgacgcggtggtggtgctggaaaacgatctgcatcgtcacgcttccgctacccgcgtgaatgctgcgctggctaaagcgccgctggtgatggtggttgatcatcaacgcacagcgattatggaaaacgcccatctggtactttctgctgccagttttgctgaaagcgacggtacggtgatcaacaacgaaggccgcgcccaacgtttcttccaggtttacgatcctgcttattacgacagcaaaactgtcatgctggaaagctggcgctggttacactcgctgcacagcaccctgctgagccgtgaagtggactggacgcagctcgaccatgtgattgacgctgttgtggcgaaaatcccggaactggcaggtatcaaagatgctgcgccggatgcgacattccgtattcgtgggcagaaactggcccgtgaaccgcaccgttacagcggtcgtaccgccatgcgcgccaatatcagcgttcatgagccgcgtcagccgcaggatattgacaccatgttcaccttctcgatggaaggtaacaaccagccgactgcgcaccgttcgcaagtgccgtttgcctgggcgccgggctggaactccccgcaggcgtggaacaaattccaggacgaagtgggcggcaaactgcgctttggcgatccgggcgtgcgtctgtttgaaaccagcgaaaatggtctggattacttcaccagcgtaccggcacgcttccagccgcaggacgggaaatggcgtatcgcgccgtattaccacctgtttggcagcgatgaattgtcacagcgtgctccggtcttccagagccgtatgccgcagccgtacatcaaactcaacccagcggatgccgcgaagttaggtgtgaacgcaggtacacacgtctcctttagttacgatggcaatacggtcacgctgccggttgaaatcgctgaagggctgacggcagggcaggtgggcttgccgatgggtatgtccggtattgctccggtgctggctggcgcgcatcttgaggatctcaaggaggcacaacaatga

SEQ ID NO: 483248 - DNA, 978 bp, Shigella sonnei
atgagttggatatcaccggaactgattgagatcctgctgaccatcctcaaagcggtggtgatcctgctggtggttgtcacctgcggggcattcatgagctttggcgaacgtcgcctgctgggtctgttccagaaccgttacggacctaaccgtgttggctggggcggttcgctccagctggttgcggacatgatcaaaatgttctttaaagaagactggatcccgaaattctcggatcgcgtcatctttaccctggcaccgatgattgcctttacctcgctgctgctggcctttgcgattgtgccagtcagtccgggttgggtggttgccgacctgaacatcgggattttgttcttcctgatgatggcaggtctggcggtttacgcggtgctgtttgcgggctggtcaagtaacaacaaatactcgttgctgggtgcgatgcgtgcttctgcgcagaccctgagctacgaagtgttcctcgggctttccctgatgggcgtggtggcgcaggccggttcattcaacatgaccgacatcgtcaacagccaggcgcatgtgtggaacgttatcccgcaattctttggttttattacctttgccatcgcgggcgtggcggtatgtcaccgtcacccgtttgaccagccggaagccgagcaggaactggcggatggttaccacattgaatattccggtatgaagttcggtctgttcttcgtgggtgagtacatcgggattgtgaccatctctgcattgatggtgacgctgttcttcggtggctggcaaggcccgttgttaccgccattcatctggttcgcgctgaaaaccgcgttctttatgatgatgttcattttgattcgtgcgtcgttaccgcgtccgcgttatgaccaggtaatgtccttcggctggaaaatctgcctgccgctgacgctgatcaacttgctggtaacggcggctgtcattctctggcaggcgcaataa

SEQ ID NO: 483249 - DNA, 543 bp, Shigella sonnei
atgaccttaaaagaattgttagtaggtttcggcacccaggttcgtagtatctggatgatcggcctgcacgcgttcgccaaacgcgaaacgcgaatgtacccggaagagccgatctatctgccgccccgttatcgtggtcgtatcgttctgacccgcgacccggacggcgaagagcgttgcgtagcctgtaacctctgcgcggtagcctgcccggtcggctgtatctcgctgcaaaaagcagaaaccaaagacggtcgctggtatccggaatttttccgcatcaacttctcacgctgcattttctgtggtctgtgcgaagaagcctgtccgaccacggcgattcagttaaccccggatttcgaaatgggggaatacaagcgccaggatctggtttacgaaaaagaggatctgctgatctccggtccgggcaaatacccggaatataacttctaccggatggcaggtatggcaatcgacggcaaagataagggcgaagcagagaacgaagccaagcctatcgacgtcaagagcctgttaccgtaa

SEQ ID NO: 483250 - DNA, 555 bp, Shigella sonnei
atggagttcgctttttatatctgtggcctgatagccatacttgcgaccttgcgagtgatcacccataccaatccggtacacgcactgctgtacctgattatttcgctgctggcgatttccggggtgttcttctcactgggcgcttacttcgccggtgcgctggaaattatcgtctacgcgggtgccattatggtgctgttcgtgttcgtggtgatgatgctcaacctgggcggttcagaaatcgaacaggaacgccagtggctgaaaccgcaggtgtggattggtccggcaattttgtcggccatcatgctggtggtgattgtttacgccatcctcggtgttaacgatcagggtatcgacggtacgccaatcagtgctaaagcagtgggtattacgctgttcgggccttacgtactggcggtggaactggcttctatgctgctgctcgcaggtctggttgtggccttccacgtcggtcgtgaagagcgtgcgggtgaagtgctgagcaatcgtaaagacgacagcgcgaaaagaaaaacggaggagcacgcatga

SEQ ID NO: 483251 - DNA, 303 bp, Shigella sonnei
atgatccccttacaacatggactgatcctcgcggcaatcttattcattcttggcttaaccggtctggttatccgtcgcaatctgctgtttatgctgattggtctggaaatcatgattaacgcctccgcgctggcctttgttgtcgccggaagctactggggtcagaccgacggtcaggtgatgtacattctcgccatcagcctcgcggcggcagaagcgagtatcggccttgcgctgctgctgcaacttcaccgtcgtcgccagaacctgaacatcgattcagtaagtgagatgcgcggatga

SEQ ID NO: 483252 - DNA, 1842 bp, Shigella sonnei
atgaacatgcttgccttaaccattattttgccattgattggcttcgtcctgctggcgttctcccgtgggcgctggtctgaaaacgtttcggcgatcgtcggcgttggctctgtgggcctggcggcgctggtaaccgcctttatcggcgttgatttcttcgctaacggcgagcaggcatacagccagccgctgtggacgtggatgtcggtaggcgactttaacatcggttttaacctggtgctggacggcctgtcgctgaccatgctctcggtggtcactggtgtgggtttccttattcacatgtacgcctcctggtacatgcgcggtgaagagggctactctcgcttcttcgcctacaccaacctgttcatcgccagcatggtagttctggtgcttgccgacaacctgctgctgatgtacctcggctgggaaggcgtgggcctgtgctcctatctgctgatcggtttctattacaccgatccgaagaatggcgcagcggcaatgaaagcgttcgtcgtgacccgtgtgggtgacgttttcctcgctttcgcactgttcattctttacaacgaactgggcaccctgaacttccgcgaaatggtggaactggcaccagcgcactttgctgacggcaataacatgctgatgtgggcgacgctgatgctgctgggcggtgcggtcggtaaatctgcgcagttgccgttgcagacatggcttgccgacgcgatggcgggcccgacgcctgtctccgcgctgatccacgccgcaaccatggtaaccgcgggtgtctacctgatcgcccgtacccacggcctgttcctgatgacgccggaaattctgcatctggtgggcattgtcggggcggttacgctgctgctggccggttttgccgcgctggtacagaccgacatcaaacgtgttctcgcttactctaccatgagccagattggctacatgttcctcgcgcttggcgtgcaggcatgggatgcggcgattttccacttgatgactcacgcgttctttaaagcgctgctgttcctggcatccggttccgtcattctggcctgccatcacgaacagaacatcttcaagatgggcggtctgcgtaaatctattccgctggtttatctctgcttcctggtgggcggcgcagcactgtcggcactgccgctggtcactgcgggcttcttcagtaaggatgagatcctcgcgggtgcgatggcgaatggtcatatcaatctgatggtggcaggtctggtcggtgcgtttatgacctcgctctacaccttccgtatgattttcatcgtcttccacggaaaagaacaaattcacgctcacgccgtgaaaggggtaactcacagcctgccgctgattgtgctgctgatcctttccaccttcgttggcgcactgattgtaccgccgctgcagggcgtgcttccgcaaacgacggaactggcgcacggcagcatgttgaccctggaaattacctctggcgtggtcgcgattgtcggcattctgctggcagcttggctgtggctgggtaaacgtactctggtgacctccatcgccaacagtgcgccgggccgcctgctgagtacctggtggtacaacgcctggggctttgactggctgtacgacaaagtgttcgtcaggccgttcctgggtattgcctggttgctgaaacgcgatccgctgaactcaatgatgaacattccggctgtcctttcccgctttgcaggtaaaggtctgctgttaagtgagaacggctatctgcgctggtatgtggcatccatgagcatcggtgcggtcgtggtgctggcactgttgatggtactgcgttga

SEQ ID NO: 483253 - DNA, 1530 bp, Shigella sonnei
atgttactaccctggctaatattaattccctttattggcggcttcctgtgctggcagaccgaacgctttggcgtcaaggtgccacgctggatcgcgctgatcaccatgggattgacgctggcgctgtcgctgcaactgtggttgcagggcggttattcactgacgcaatccgccggaattccgcagtggcagtctgaattcgacatgccgtggatcccgcgtttgggtatctctattcatctcgccattgacgggctgtcgctgctgatggtcgtgctgaccggtctgctcggtgtgctggcggtactatgttcgtggaaagagatcgaaaaatatcagggcttcttccacctcaacctgatgtggatcctgggcggcgttatcggcgtgttccttgccatcgacatgttcctgttcttcttcttctgggaaatgatgctggtgccgatgtacttcctgatcgcactgtgggggcataaagcctctgacggtaaaacgcgtatcacggcggcaaccaagttcttcatttacacccaagcgagtggtctggtgatgttgattgccatcctggcgctggtttttgttcactacaatgcgaccggcgtctggaccttcaactatgaagagctgctgaatacgccaatgtccagtggtgcggaatacctgttaatgctgggcttcttcatcgccttcgcagtcaaaatgccggtggttccgctgcatggctggctgccggatgcgcactcccaggctccgaccgccggttccgttgacctcgcggggatcttgctgaaaactgccgcttacggtttgctgcgtttctccctgccgctgttcccgaacgcgtcggcagagttcgcgccaattgctatgtggctgggtgttatcggcatcttctacggtgcgtggatggccttcgcccagaccgatatcaaacgtctgatcgcctacacctcggtttcccacatgggcttcgtgctgattgctatctacaccggcagccagttggcctaccagggcgcggtaatccagatgattgcgcacggcttgtcggcggcgggtctgtttattctttgtggtcagctttatgaacgtatccatacccgcgacatgcgcatgatgggcggtctgtggagcaagatgaaatggctgccagcactgtcgctgttctttgcggtggcaacgcttgggatgcctggcaccggtaacttcgtcggcgaatttatgattctgttcggcagcttccaggttgtcccggtgattaccgttatctctacctttgggctggtctttgcatctgtttattcgctggcgatgttgcatcgcgcttacttcggtaaagcgaaaagcgagattgccagccaggaactgccagggatgtcgctgcgtgagctgtttatgatcctgttgctggtggtgctgctggtactgctgggcttctatccgcagccgattctggatacctcgcactccgcgattggcaatatccagcagtggtttgttaattccgttactactacaaggccgtaa

SEQ ID NO: 483254 - DNA, 1458 bp, Shigella sonnei
atgacaataactccacaaaacctgatcgcactgctaccgttgctgatcgtcggcttgacggtggtggttgtgatgctctccattgcgtggcgacgcaatcatttcctcaacgctacgctctcggttattgggcttaacgcggcgctggtttcgctctggtttgtcggccaggcaggcgctatggacgttacgccgctgatgcgcgttgatggtttcgccatgctttacaccgggctggtattgttggcgagcctcgccacctgtactttcgcctacccgtggcttgaaggctataacgacaacaaggacgagttctacctgttggtgttaattgccgcgctgggcgggatcctgctggcgaatgccaaccatctggcgtctctgttcctcggtatcgaactgatctctttgccgctgtttggcctggtcggttacgctttccgccagaaacgttcactggaagccagtatcaaatacaccatcctttctgccgcagcgtcttctttcctgctgtttggtatggcgctggtgtatgcgcagtctggcgacctgtcgtttgtcgcgttgggtaaaaaccttggcgacggtatgctcaacgagccgctgttgctggcaggtttcggcctgatgattgttggcctcggcttcaaactctctctggtgccgttccacctgtggacgccagacgtataccagggcgcgcctgcgccggtttccactttcttggcgacggcgagcaaaatcgctatcttcggtgtggtgatgcgtctgttcctctacgcaccgatgggtgacagcgaagcgattcgcgtggtgctggcgattatcgcctttgcctccatcatcttcggtaacctgatggcgctgagccagaccaatatcaaacgtctgctcggttactcatctatctctcacctcggctatctgctggtggcgctgattgcgctgcaaactggcgagatgtcgatggaagcggtaggggtttacctggccggttatctgtttagcagcctcggcgcgttcggcgtggtcagcctgatgtccagcccgtatcgtggcccggatgctgattccctgtactcttaccgcggactgttctggcatcgcccgatcctcgcggcggtgatgacggtgatgatgctgtctctggccggtattccgatgacgctgggctttattggtaagttctacgtgctggcggtcggtgtccaggcacacttgtggtggctggtgggcgccgtggttgtcggttcggcaagcggcctttactactacctgcgcgtggcggtgagcctgtacctgcacgccccggaacaaccgggtcgcgatgcaccgtcaaactggcagtacagcgcaggcggtatcgtggtgctgatctctgcactgttggtactggtgctgggtgtatggccacaaccgctgattagcattgtgcggttagcaatgccgctgatgtaa

SEQ ID NO: 483255 - DNA, 441 bp, Shigella sonnei
atgggaatgattggttattttgcagaaattgactcagaaaagattaaccaactgcttgagtctactgaaaaacctttgatggataatatacatgacacgctttcaggattacgccgactggatattgataaacgctgggattttttacactttgggctgacaggcacccctgcttttgatcccgcgaagaatgatccgctgagtcgtgccgtgcttggtgaacacagcctcgaagatggcatagatggcttcctgggattgacctggaatcaggagttagccgcgacaatcgaccgactggaatcactggatcgaagtgagctgcgtaaacagttttccattaagcgactcaatgaaatggagatttatccgggagtgaccttttcagaagagttagaggggcaactctttgcttcgatcatgctgatatggaaaagctga

SEQ ID NO: 483256 - DNA, 987 bp, Shigella sonnei
atgccactgcataatttaacccgttttccacggttggagtttatcggcgcgccaacgccgctcgaatatctgccgcgcttttctgattatctaggacgggaaattttcatcaaacgggatgacgtcacccccatggcaatgggcggcaataaattacgtaagctagaatttctcgcggcagatgctctgcgcgaaggtgccgatacgctgattactgccggggtgatccagtctaaccatgtgcggcagactgccgcagttgcggcgaaactcggtctgcactgtgtggcgctgctggaaaatcctattggcacaaccgcagaaaactatttaaccaacggcaatcgcttgttgctggatctgttcaatacccagattgaaatgtgcgaagcactgaccgatcccaatgcccaactggaagagctggcgacgcgagtcgaagcacaaggctttcgcccgtatgtcattccggttggcggttctaatgctcttggcgcgctaggttatgtggagagtgcgctggaaatcgcgcaacagtgtgaaggggcggttaatatttcgtcggtggtagtcgcatcgggcagtgccggaactcacgccggactggctgttgggctggaacacctgatgcctgaaagcgaactgattggcgtgaccgtgtcgcgttccgttgccgatcagttgccgaaagtggttaacctacaacaggcgattgcgaaagaactggagctgaccgcatcagcggaaattatactctgggatgactattttgcacctggctacggcgtgccgaacgacgaaggcatggaagcagtgaaattgctggcgcggctggaaggcattctgcttgatcctgtgtataccggaaaagcgatggcggggctgattggctgtatcagtcagaaacgcttcaaagatgaagggccgattctgtttattcataccggcggtgcgcctgcgctgttcgcctatcatccccacgtttag

SEQ ID NO: 483257 - DNA, 669 bp, Shigella sonnei
atgcaagaaagtatacaactggttattgattccttgccgttcctgctgaaaggggctgggtatacgctgcaactcagtatcggcggcatgttttttggcttactgctcgggtttattctcgcgctgatgcgcctgtcgccaatctggcccgtgcgctggctggcgcgtttttatatctctatttttcgtggtacaccgctcatcgcacaactgtttatgatctattacggcctgccgcagtttggtatcgaattagatcccattccgtcagcaatgattggtctgtcgctgaacactgccgcctatgccgccgaaacactgcgcgccgccatttcttctattgataaaggtcagtgggaagcagctgccagtattggtatgacgccatggcagactatgcgtcgcgcgattttgccacaggcggcgcgggtggcgttgccgccgctgtcgaacagctttatcagcctggtaaaggatacgtcgctggccgcgacaatccaggtgccggagctgttccgtcaggcgcagttgattacctcgcgcacgctggaggtgttcaccatgtacctggcggcttcgctcatctactggatcatggcgacagtattatcgacgttgcagaaccattttgagaatcaacttaatcgccaggagagagaaccaaaatga

SEQ ID NO: 483258 - DNA, 753 bp, Shigella sonnei
atgagtgccattgaagttaagaacctggtgaaaaaatttcacggtcagacggtgctgcacggtatcgacctcgaggtaaagcctggcgaagtggtggcaattatcggtccgagtggttccggcaaaaccacgttgctacgcagcataaatctgctggaacaaccggaagcgggaacgatcaccgttggcgatatcactattgatactgcacgttcattaagtcagcaaaaatcgctgatccgccagttgcgtcagcacgtcgggtttgtcttccagaactttaatttgtttccgcatcgtacggtgctggaaaacattattgaagggccggtgatcgtcaaaggcgaaccgaaagaagaggccacggcgcgcgctcgcgagctgctggcgaaagttgggctggccggtaaagaaaccagctatccacgtcgtttgtctggcggtcaacagcagcgtgtagcgattgcgcgtgcgctggcaatgcgtcctgaggtgattttgtttgacgagccaacgtcagcgctggatccagagctggtgggcgaagtcctgaacacaatccgccagctggcgcaggaaaagcgcacgatggtgattgtgacgcacgaaatgagctttgcccgggatgttgcggaccgggcgatttttatggaccaggggcggatagtcgagcagggggcagcaaaagcgttatttgctgatccccagcagcctcgcacccgccagttcctcgagaagtttctactgcaataa

SEQ ID NO: 483259 - DNA, 723 bp, Shigella sonnei; identical to SEQ ID NO: 458483

SEQ ID NO: 483260 - DNA, 225 bp, Shigella sonnei
atgagtacgcctgatttttctactgccgagaataatcaagaactggcaaatgaagtctcctgcctgaaagcgatgctgacgctgatgctacaggcgatgggacaagctgacgcgggccgcgtgatgttaaagatggaaaaacagcttgcgctgatcgaagacgaaacccaggctgcagtattttccaaaacggttaagcaaattaaacaagcctaccgtcagtaa

SEQ ID NO: 483261 - DNA, 657 bp, Shigella sonnei
ttgatcaacgttctacttgttgatgaccacgaactggtgcgcgcagggatacgacgcattctggaagatataaagggtataaaagtcgtcggtgaggcatcgtgcggtgaagacgccgttaagtggtgccggacaaatgccgttgacgtggtgctaatggacatgagtatgccgggcattggcggtcttgaggcgacgcgtaaaatcgcgcgttccacagctgatgtcaaaatcatcatgcttaccgtccatacagaaaaccctttaccagcgaaagtcatgcaggccggtgctgcgggctacctcagcaaaggcgcggctccgcaggaagtcgtgagtgcgattcgttctgtctattcagggcagcgttacattgcttctgatatcgctcaacaaatggcgttaagccagatcgaaccagaaaaaacagaaagcccatttgccagtttgtctgaacgtgaattgcagattatgctgatgatcaccaagggccagaaggtcaatgagatctcagaacagctcaatctcagtccgaaaacggtgaacagctaccgctatcgtatgttcagtaaactaaacattcatggcgatgttgagctgactcacctggcaattcgccatggtctgtgtaatgcggagacattatcaagtcagtga

SEQ ID NO: 483262 - DNA, 1767 bp, Shigella sonnei
atgtacgatgctggtggtacggttatctatgtcggcaaagcgaaagacctgaaaaaacggctttccagctatttccgcagcaacctcgcttcgcgcaaaaccgaagcgctggtcgcccagatccagcaaattgatgtaacggttacgcatacagaaaccgaagcgctgttgctggaacacaactacatcaaactctatcagccgcgttacaacgttttgctacgcgatgataaatcttatccttttatcttcctgagtggcgatacccacccgcgtctggcgatgcatcgtggtgcgaagcatgccaaaggtgaatatttcggcccgttcccgaatggctatgccgtacgtgaaacactggcgctactgcaaaagattttccccattcgccagtgcgaaaatagtgtttatcgcaatcgctcgcgtccgtgtctgcaatatcagatagggcgctgtctgggaccgtgcgttgaaggactggtgagtgaagaagaatacgctcagcaggttgagtatgtgcgcctgtttttgtctggcaaagatgatcaggtgcttacgcaactcattagtcgtatggaaactgccagccagaatctggagtttgaagaagctgcacgtattcgcgaccaaattcaggcggtgcgacgcgtcaccgaaaaacaattcgtttccaataccggcgacgacctcgacgttattggtgtggcgttcgatgcgggcatggcttgtgtccacgtattgttcattcgtcagggcaaagtgctcggcagccgcagctatttcccgaaagtgcctggcggtacggaactgagcgaggtggtagaaaccttcgtaggccagttctatttacaaggcagccagatgcgcaccttaccgggtgagatcctgctcgattttaatcttagcgataaaacgctgctcgccgattccctttcagaactggcgggacgcaagattaatgttcaaaccaaacctcgcggcgatagggcgcgttatctgaaactcgcgcgcaccaatgcggcgacggccttaaccagcaaactttcgcagcaatctaccgttcaccagcgactgaccgcgcttgccagcgtgttgaaattgccggaagtgaagcggatggagtgctttgacatcagccataccatgggcgaacaaaccgtcgcttcctgtgtggtgtttgatgctaacggcccgctgcgtgcggagtatcggcgctataacattacaggcatcacgccgggcgatgattatgcggcgatgaatcaggtgctgcgtcggcgttatggtaaagccattgacgacagtaagatcccggatgtgatccttatcgacggcggcaaaggccagcttgcgcaggcgaaaaatgtcttcgccgaactggatgtctcatgggataaaaatcatccgctgctacttggcgttgccaaaggagcagatcgtaaggctgggctggaaacgctgttctttgagccggaaggtgagggattcagtttgccgccagattctcccgcgctgcatgttatccagcatattcgcgatgaatcacatgatcacgcgattggcgggcaccgtaaaaaacgggcgaaggtcaaaaataccagttccctggaaaccattgaaggcgtcgggccaaaacgtcggcaaatgttgttgaaatatatgggcggtttgcaaggtttacgtaacgccagcgtcgaggaaattgcaaaagtgccgggtatttcgcaaggtctggcagaaaagatcttctggtcgttgaaacattga

SEQ ID NO: 483263 - DNA, 549 bp, Shigella sonnei
atgcaatttaatatccctacgttgcttacactgttccgtgtcatccttatcccattctttgtattggtcttttatctgcctgtcacctggtcgccgtttgccgccgcgctcattttctgcgtcgcggcggtgactgactggttcgatggttttctggcacgccgctggaaccagagtacccggtttggtgctttccttgaccctgtagcagataaagttctcgtggctatcgccatggtgctggtaaccgagcattaccacagctggtgggtgaccttaccggcagcaacgatgatcgcccgtgaaattattatttctgcgctacgcgaatggatggcggagttgggtaaacgcagtagcgtggctgtctcctggattgggaaagtgaaaaccactgcccagatggtggcgttggcatggctgctgtggcgtccgaacatttgggttgagtacgccggtattgcacttttctttgtggctgcggtactgactctgtggtcaatgttgcaatatttgagcgctgcgcgtgcagatttgcttgatcagtga

SEQ ID NO: 483264 - DNA, 666 bp, Shigella sonnei
atgaaaacgggaccgttaaacgaaagtgagttggaatggctggacgatattctgaccaaatacaacactaaccacgccatccttgatgtggcggagctggacggtttattgacggcggtgttgagttctccgcaagagattgaaccggaacagtggctggttgccgtgtggggtggggctgactatgtgccgcgctgggcgtcagagaaagagatgacgcgctttatgaacctggcttttcaacatatggccgataccgcagagcgtctgaacgaattcccggagcagtttgagccgttattcggcttgcgagaagttgatggcagcgagctgacgattgttgaggagtggtgctttggctatatgcggggcgtggcactttctgactggtcaacgttgcccgattcgttaaaaccagcgctggaggcgattgcgctgcacggtactgaggaaaacttcgagcgggtagaaaagatgtcgccagaagcgtttgaagagagcgtagatgccattcgactggcggcgcttgatctacatgcgtactggatggcgcatccgcaggaaaaagctgttcagcaaccgatcaaagcagaagagaaaccggggcgtaacgatccttgcccgtgcggtagtggtaagaaatttaagcagtgctgcctgcattaa

SEQ ID NO: 483265 - DNA, 1212 bp, Shigella sonnei
gtgaaaaacagaaccctgggaagtgtttttatcgtggcgggaaccacaattggcgcaggcatgctggcaatgccgctggctgcggccggtgttggttttagcgttacgttaatcttgttgattgggctttgggcgttgatgtgctacacggcgctattactgctggaggtgtaccagcatgttccggcagataccggtctgggcacgctggcaaaacgctatctgggacgctacggtcaatggctgacgggcttcagtatgatgttcttaatgtatgctctgactgcggcatacatcagcggtgtcggtgaattgttggcctccagcatcagcgactggacaggtatttcaatgtcggcaaccgctggcgtgctgttgttcacttttgttgccggtggcgtggtttgtgttggaacatcgctggtcgatttatttaaccgttttctgttcagcgccaaaattatttttctggtggtgatgctggtattgctgctaccgcatattcacaaagtgaatcttttaaccctgccgttgcaacaggggctggctctgtcagcaatcccggtgatttttacctcatttggttttcacggtagcgtgccgagtattgtcagctatatggatggcaacgttcgtaagctacgctgggtgtttataaccggtagtgcgatccccctggtggcatatattttctggcaggtggcaacgcttggcagcattgattcaacaacctttatgggattgctggctaatcatgctggattaaacgggctgttacaggcgttacgcgaaatggtggcctctccgcatgttgagctggcagtgcatttatttgctgatttagccctcgccacgtcatttctcggcgttgcgttaggcttatttgattatctggctgatttatttcagcgttcaaataccgttggtggacggttgcaaactggtgcaattacctttctgccgccgttggcgtttgcactgttttatccacgaggatttgtgatggcgctgggttacgccggtgtggcgctggcggtactggcattgattatcccttcgctgttgacctggcaaagcagaaagcacaatcctcaggcgggttaccgggtcaaaggtggtcgtccggcgctggtggtggtgtttctctgtggtattgctgtgattggcgtgcaatttttgattgcggcagggttgttaccagaagtggggtga

SEQ ID NO: 483266 - DNA, 240 bp, Shigella sonnei
atggactctattcacggtcatgaagtgttaaatatgatgattgaatcaggcgagcaatatacgcatgccagtctggaagctgcgattaaagcgcgttttggtgaacaggcacgttttcacacctgctcggcagaagggatgacagcgggagagctggtagcgtttctggcagcaaaaggcaaatttataccttcgaaagacggtttttcgaccgatcagagtaagatttgccgtcactga

SEQ ID NO: 483267 - DNA, 498 bp, Shigella sonnei; identical to SEQ ID NO: 472153

SEQ ID NO: 483268 - DNA, 324 bp, Shigella sonnei
atgagacttctgattctgactctttcattaataacgctggcggggtgtacggttactcgccaagcccatgtgagcgaagttgacgcggcaacaggtattgtacggttggtttatgaccaggcttttttgcagcatgcccataccgatcgttatgtcagtcgcgggatcgccgatcgcgcatgccagcaggaaggctatacccacgcggtcccctttggtcagccagtaggcaactgtagcctttttgcgggttccttatgtttgaatacggaattcactttgtcatatcagtgccatcattccgccttccctgtctttctctaa

SEQ ID NO: 483269 - DNA, 252 bp, Shigella sonnei
atgtcccagccgctgaatgccgatcaggaactggtttctgatgtggttgcttgccagttggttatcaaacaaattctggatgttctcgatgtaatcgcgcccgttgaagttcgtgaaaaaatgtccagtcagctgaagaatatcgactttactaaccatcccgccgccgcagacccggtcaccatgcgggcaatccaaaaagccatcgcgcttattgaactcaagtttaccccacagggtgaatcccattaa

SEQ ID NO: 483270 - DNA, 504 bp, Shigella sonnei; identical to SEQ ID NO: 261737

SEQ ID NO: 483271 - DNA, 990 bp, Shigella sonnei
atgcacaaatttactaaagccctggcagccattggtctggcagccgttatgtcacaatccgctatggcggagaacctgaagctcggttttctggtgaagcaaccggaagagccgtggttccagaccgaatggaagtttgccgataaagccgggaaggatttagggtttgaggttattaagattgccgtgccggatggcgaaaaaacattgaacgcgatcgacagcctggctgccagtggcgcaaaaggtttcgttatttgtactccggaccccaaactcggctctgccatcgtcgcgaaagcgcgtggctacgatatgaaagtcattgccgtggatgaccagtttgttaacgccaaaggtaagccaatggataccgttccgctggtgatgatggcggcgactaaaattggcgaacgtcagggtcaggaactgtataaagagatgcagaaacgtggctgggatgtcaaagaaagcgcggtgatggcgattaccgccaacgaactggatacggcacgtcgccgtacaacgggttctatggatgcgctgaaagcggccggattcccggaaaaacaaatttatcaggtacctaccaaatctaacgacatcccgggggcatttgacgctgccaactcaatgctggttcaacatccggaagttaaacattggctgatcgtcggtatgaacgacagcaccgtgctgggcggcgtacgcgcgacggaaggtcagggctttaaagctgccgatatcatcggcattggcattaacggtgtggatgcgttgagcgaactgtctaaagcacaggcaaccggcttctacggttccctgctgccaagcccggacgtacatggctataaatccagcgaaatgctttacaactgggtagcaaaagacgttgaaccgccaaaatttaccgaagttaccgacgtggtgctgatcacgcgtgacaactttaaagaagaactggagaaaaaaggtttaggcggtaagtaa

SEQ ID NO: 483272 - DNA, 1515 bp, Shigella sonnei
atgcaacagtctaccccgtatctctcatttcgcggcatcggtaaaacgtttcccggcgttaaggcgctgacggatattagttttgactgctatgccggtcaggttcatgcgttgatgggtgaaaatggcgcaggaaaatcaactctcttaaaaatcctcagcggcaactatgcgccaaccacgggttctgtagtgattaatgggcaggaaatgtccttttccgacacgaccgcagcacttaacgcgggtgtggcgattatttaccaggaactgcatctcgtgccggaaatgaccgtcgcggaaaacatctatctcggccagctgccgcataaaggcggcattgtgaatcgctcattgctgaattatgaggcgggtttacaacttaaacatcttggtatggatattgacccggacacgccgctgaaatatctctccattggtcagtggcagatggttgaaatcgccaaggcgctggcgcgtaacgctaaaattatcgcctttgatgagccaaccagctccctttctgcccgcgaaatcgacaatcttttccgcgttattcgtgaactgcgaaaagaggggcgggtgatcttatacgtttctcaccgtatggaagaaatatttgccctcagcgatgccatcactgtctttaaagatggacgttatgtcaaaacctttaccgatatgcagcaggttgaccacgacgcgctggtgcaggcgatggtcgggcgcgacattggcgatatctacggctggcaacctcgtagttatggcgaggagcgcctgcgtcttgatgctgtgaaagcaccaggcgtgcgtacgccaataagtctggcggttcgcagtggtgaaattgttgggctgtttggtctggtaggggcggggcgtagcgaattaatgaaaggcttgtttggcgggacgcaaatcaccgccggtcaggtttatatcgaccaacagccgatcgatattcgtaaaccgagccacgccattgccgcaggcatgatgctctgcccggaagatcgcaaagcggaaggcattattcccgtgcactccgttcgcgacaatatcaacatcagtgccagacgcaaacatgtgctcggcggttgtgtaatcaacaacggttgggaagaaaacaatgccgatcagcacattcgttcgctcaacatcaaaacgccgggcgctgagcaactgatcatgaatctctcaggcggaaatcagcaaaaagccattctgggccgctggttatcggaagagatgaaggtcattttgctggatgaacctacgcgcagcattgatgttggtgctaagcacgaaatatataacgtaatttatgcgctggcggcgcagggtgtggcggtgctgtttgcctccagcgacttacctgaagtcctcggcgttgccgaccggattgtggtgatgcgggaaggtgaaatcgccggtgaattgttacacgagcaggcagatgagcgtcaggcactgagccttgcgatgcctaaagtcagccaggcagttgcctga

SEQ ID NO: 483273 - DNA, 987 bp, Shigella sonnei
atgtcttctgtttctacatcgggttctggcgcacctaagtcgtcattcagcttcgggcgtatctgggatcagtacggcatgctggtggtgtttgcggtgctctttatcgcctgtgccatttttgtcccaaattttgccaccttcattaatatgaaagggttgggcctggcaatttccatgtcggggatggtggcgtgtggcatgttgttctgccttgcttccggtgactttgacctttctgtcgcctccgtaattgcctgtgcgggtgtcaccacggcggtggttatcaacctgactgaaagcctgtggattggcgtggcagcggggttgctgcttggcattctctgtggcctggtcaatggctttgttatcgccaaactgaaaataaatgctctgatcacaacactggcaacgatgcagattgttcgaggtctggcgtacatcatttcagacggtaaagcggtcggtatcgaagatgaaagcttctttgcccttggttacgctaactggttcggtctgcctgcgccaatctggctcaccgtcgcgtgtctgattatctttggtttgttgctgaataaaaccacctttggtcgtaacaccctggcgattggcgggaacgaagaggctgcgcgtctggcgggtgtaccggttgttcgcaccaaaattattatctttgttctctctggcctggtatctgcgatagccggaattattctggcttcacgtatgactagtgggcagccaatgacgtcgattggttatgagcttattgttatctccgcctgcgttttaggtggcgtttctctgaaaggtggcatcggaaaaatctcatatgtggtggcgggtatcttaattttaggcaccgtggaaaacgccatgaacctgcttaatatttctcctttcgcgcagtacgtggttcgcggcttaatcctgctggcagcggtgatcttcgaccgttacaagcaaaaagcgaaacgcattgtctga

SEQ ID NO: 483274 - DNA, 801 bp, Shigella sonnei
gtgacagaaccgttaaccgaaacccctgaactatccgcgaaatatgcctggttttttgatcttgatggaacgctggcggaaatcaaaccgcatcccgatcaggtcgtcgtgcctgacaatattctgcaaggactacagctactggcaaccgcaagtgatggtgcattggcattgatatcagggcgctcaatggtggagcttgacgcactggcaaaaccttatcgcttcccgttagcgggcgtgcatggggcggagcgccgtgacatcaatggtaaaacacatatcgttcatctgccggatgcgattgcgcgtgatattagcgtgcaactgcatacagtcatcgctcagtatcccggcgcggagctggaggcgaaagggatggcttttgcgctgcattatcgtcaggctccgcagcatgaagacgcattaatgacattagcgcaacgtattactcagatctggccacaaatggcgttacagcagggaaagtgtgttgtcgagatcaaaccgagaggtaccagtaaaggtgaggcaattgcagcttttatgcaggaagctccctttatcgggcgaacgcccgtatttctgggcgatgatttaaccgatgaatctggcttcgcagtcgttaaccgactgggcggaatgtcagtaaaaattggcacaggtgcaactcaggcatcatggcgactggcgggtgtgccggatgtctggagctggcttgaaatgataaccaccgcattacaacaaaaaagagaaaataacaggagtgatgactatgagtcgtttagtcgtagtatctaa

SEQ ID NO: 483275 - DNA, 1425 bp, Shigella sonnei
atgagtcgtttagtcgtagtatctaaccggattgcaccaccagacgagcacgccgccagtgccggtggccttgccgttggcatactgggggcactgaaagccgcaggcggactgtggtttggctggagtggtgaaacagggaatgaggatcagccgctaaaaaaggtgaaaaaaggtaacattacgtgggcctcttttaacctcagcgaacaggaccttgacgaatactacaaccaattctccaatgccgttctctggcccgcttttcattatcggctcgatctggtgcaatttcagcgtcctgcctgggacggctatctacgcgtaaatgcgttgctggcagataaattactgccgctgttgcaagacgatgacattatctggatccacgattatcacctgttgccatttgcgcatgaattacgcaaacggggagtgaataatcgcattggtttctttctgcatattcctttcccgacaccggaaatcttcaacgcgctgccgacatatgacaccttgcttgaacagctttgtgattatgatttgctgggtttccagacagaaaacgatcgtctggcgttcctggattgtctttctaacctgacccgcgtcacgacacgtagcgcaaaaagccatacagcctggggcaaagcatttcgaacagaagtctacccgatcggcattgaaccgaaagaaatagccaaacaggctgccgggccactgccgccaaaactggcgcaacttaaagcggaactgaaaaacgtacaaaatatcttttctgtcgaacggctggattattccaaaggtttgccagagcgttttctcgcctatgaagcgttgctggaaaaatatccgcagcatcatggtaaaattcgttatacccagattgcaccaacgtcgcgtggtgatgtgcaagcctatcaggatattcgtcatcagctcgaaaatgaagctggacgaattaatggtaaatacgggcaattaggctggacgccgctttattatttgaatcagcattttgaccgtaaattactgatgaaaatattccgctactctgacgtgggcttagtgacgccactgcgtgacgggatgaacctggtagcaaaagagtatgttgctgctcaggacccagccaacccgggcgttcttgttctttcgcaatttgcgggagcggcaaacgagttaacgtcggcgttaattgttaacccctacgatcgtgacgaagttgcagctgcgctggatcgtgcattgactatgtcgctggcggaacgtatttcccgtcatgcagaaatgctggacgttatcgtgaaaaacgatattaaccactggcaggagtgcttcattagcgacctaaagcagatagttccgcgaagcgcggaaagccagcagcgcgataaagttgctacctttccaaagcttgcgtag

SEQ ID NO: 483276 - DNA, 429 bp, Shigella sonnei
atgagctatagcaatattcttgtcgctgttgcggttacaccggaaagtcagcaactgctggcaaaagcggtatctatcgccaggccagtaaagggacacatcagtttaattactctcgcttccgacccggaaatgtacaatcaattagccgcgccgatgcttgaagatttacgcagcgtgatgcaagaagaaacgcaaagctttcttgataagttaattcaggatgcggggtatcccgttgacaagacgtttattgcctacggtgagttaagcgaacatattctggaagtatgtcacaaacatcatttcgatttggtgatttgcggtaatcacaatcacagtttcttttcgcgagcatcctgctcggcgaaaagagtgattgcctcaagtgaggtcgatgtgctgttagttccacttacgggagattaa

SEQ ID NO: 483277 - DNA, 351 bp, Shigella sonnei
atgcatacctccgagttgctgaaacacatttatgacatcaacttgtcatatttactacttgcacagcgtttgattgttcaggacaaagcgtccgctatgtttcgtctcggcataaatgaagaaatggcgacaacgttagcggcactgactcttccgcaaatggttaagctggcagaaaccaatcaactggtttgtcacttccgttttgacagccaccagacgattactcagttgacgcaagattcccgcgttgacgatctccagcaaattcataccggcatcatgctctcaacacgcttgctgaatgatgttaatcagcctgaagaagcgctgcgcaagaaaagggcctga

SEQ ID NO: 483278 - DNA, 579 bp, Shigella sonnei
atgagtgaaaaaagcattgttcaggaagcgcgggatattcagctggcaatggaattgattaccctgggcgctcgtttgcagatgctggaaagcgaaacacagttaagtcgcggacgcctgataaaactttataaagaactgcgcggaagcccaccgccgaaaggcatgctgccattctcaaccgactggtttatgacctgggaacaaaacgttcatgcttcgatgttctgtaatgcatggcagtttttactgaaaaccggtttgtgtaatggcgtcgatgcggtgatcaaagcctaccgtttataccttgaacagtgcccacaagcagaagaaggaccactgctggcattaacccgtgcctggacattggtgcggtttgttgaaagtggattactgcaactttccagctgcaactgctgcggcggcaattttattacccacgctcaccagcctgttggcagctttgccagcagcttatgtcaaccgccatcccgggcagtaaaaagacgtaaactttcccagaatcctgccgatattatcccacaactgctggatgaacagagagtacaggctgtttaa

SEQ ID NO: 483279 - DNA, 888 bp, Shigella sonnei
gtgcttatcttattaggttacctggttgttctcggtacagttttcggcggttatttgatgaccggtggaagccttggagcactctatcaacccgctgaactggtgattattgccggtgcagggattgggtcgtttatcgtcggcaataatggcaaagcgattaaaggcacgctgaaggcgctgccgttgctgtttcgtcgctccaaatacaccaaagcaatgtatatggatctgctggctctgctttatcggttgatggcgaaatcgcggcagatggggatgttttcgctggaacgtgatattgaaaatccccgtgagagcgagatcttcgccagctacccacgcatcctcgcggatagcgtcatgcttgattttatcgtcgattatctgcgtctgattatcagcggtcatatgaacaccttcgaaatcgaagccctgatggatgaagagattgagacgcacgaaagcgaggcagaagtcccggcgaacagtctggcgctggtcggggactcacttccggcgtttggtattgtcgcggctgtaatggggggcgttcacgcgttaggttcagccgatcgtcctgccgccgagctgggtgcgcttatcgcacatgcgatggtggggactttcctcggcattttattggcttacggatttatttccccattagcgagtgttttacgtcagaaaagcgccgaaaccagcaaaatgatgcagtgcgtcaaagtcactctgctttctaatctgaacggttacgcaccgcctatcgccgttgagtttggtcgcaaaacgctctattccagcgaacgtccgtcgtttattgaactggaagagcatgtgcgtgcggtgaaaaatccgcaacaacagacgacaaccgaggaagcatga

SEQ ID NO: 483280 - DNA, 927 bp, Shigella sonnei
atgaagaatcaagcgcatccgattattgtcgtcaaacgacgcaaagccaaaagccacggggcagcacatggatcgtggaagattgcttatgccgactttatgactgcgatgatggccttttttctggtgatgtggctgatctccatctccagcccaaaagagctgattcagattgcggagtacttccggactccactggcgactgcggttacgggcggcgatcgcatttctaatagtgaaagcccaattcccggcggtggtgatgattacacccaaagccagggggaagtgaataagcagccgaacatcgaagatctgaaaaaacgcatggagcaaagtcgattgcggaaattgcggggtgatctcgaccagttgatagagtccgatccgaaactgcgggcgttacgtccccatctcaaaatcgatctggtccaggaaggtctacgtattcagatcatcgatagccagaatcgcccgatgtttagaaccggcagtgccgatgtcgaaccctatatgcgcgacattctgcgtgccattgcgcctgtactgaacggtattcccaaccgtattagcctttcaggtcataccgatgatttcccctacgccagcggtgagaaaggatatagcaactgggagctttctgccgatcgggccaatgcatcccgccgcgaactgatggtcggagggttggatagcggcaaagtgttacgtgtcgtcggcatggcggcaacgatgcgcttaagcgatcgcggacctgatgatgccgtcaaccgtcgcatcagcctgctggtactgaacaaacaagccgaacaggccattttgcatgaaaacgccgaaagccagaatgagccagtaagcgccctggaaaaacctgaggttgcaccacaggtcagtgttcccacaatgccatcagccgaaccgaggtga

SEQ ID NO: 483281 - DNA, 1965 bp, Shigella sonnei
gtgagcatggatataagcgatttttatcagacattttttgatgaagcggacgaactgttggctgacatggagcagcatctgctggttttgcagccggaagcgccagatgccgaacaattgaatgccatctttcgggctgcccactcgatcaaaggaggggcaggaacttttggcttcagcgttttgcaggaaaccacgcatctgatggaaaacctgctcgatgaagccagacgaggtgagatgcaactcaacaccgacattatcaatctgtttttggaaacgaaggacatcatgcaagaacagctcgacgcttataaacagtcgcaagagccggatgccgccagcttcgattatatctgccaggccttgcgtcaactggcattagaagcgaaaggcgaaacgccatccgcagtgacccgattaagtgtggttgccaaaagtgaaccgcaagatgagcagagtcgcagtcagtcgccgcgacgaattatcctttcgcgcctgaaggccggggaagtcgacctgctggaagaagaactgggacatctgacaacgttaactgacgtggtgaaaggggcggattcgctctcggcaatattaccgggcgacatcgccgaagatgacatcacagcggtactctgttttgtgattgaagccgatcagattacctttgaaacagtagaagtctcgccaaaaatatccaccccaccagtgcttaaactggcagccgaacaagcgccaaccggccgcgtggagcgggaaaaaacgacgcgcagcaatgaatccaccagcatccgtgtagcggtagaaaaggttgatcaattaattaacctcgtcggcgagctggttatcacccagtccatgcttgcccagcgttccagcgaactggacccggttaatcatggtgatttgataaccagcatggggcagttacaacgtaacgcccgtgatttgcaggaatcagtgatgtcgattcgcatgatgccgatggaatatgtttttagtcgctatccccggctggtgcgtgatctggcgggaaaactcggcaagcaggtagaactgacgctggtgggcagttctactgaactcgacaaaagcctgatagaacgcattatcgacccgctgacccacctggtacgcaatagcctcgatcacggtattgaactgccagaaaaacggctcgccgcaggtaaaaacagcgtcggaaatttaattctgtctgccgaacatcagggcggcaacatttgcattgaagtgaccgacgatggggcggggctaaaccgtgagcgaattctggcaaaagcggcctcgcaaggtttgactgtcagcgaaaacatgagcgacgacgaagtcgcgatgctgatatttgcaccaggcttctccatggcagagcaggtcaccgacgtctccgggcgcggcgtcggcatggacgtcgttaaacgtaatatccaggagatgggcggtcatgtcgaaatccagtcgaagcaggggactggcactacgatccgcattttactgccgctgacgctggccatcctcgacggcatgtccgtacgcgttggggatgaagttttcattctgccgctgaatgctgttatggaatcactgcaaccccgtgaagccgatctccatccactggccggcggcgagcgggtactggaagtgcggggtgaatatctgcccatcgtcgaactgtggaaagtgttcaacgtcgcgggcgcgaaaaccgaagccacccagggaattgttgtgatcttacaaagtggcggtcgccgctacgccttgctggtggatcaattaattggtcaacaccaggttgtggttaaaaaccttgaaagtaactatcgcaaagtccccggcatttctgctgcgaccattcttggcgacggcagcgtggcactgattgttgatgtctccgccttgcaggcgataaaccgcgaacaacgtatggcgaacaccgccgcctga

SEQ ID NO: 483282 - DNA, 504 bp, Shigella sonnei; identical to SEQ ID NO: 473584

SEQ ID NO: 483283 - DNA, 1662 bp, Shigella sonnei
atgattaaccgtatccgcgtagtcacgctgttggtaatggtgctgggggtattcgcactgttacagcttatttccggcagtctgtttttttcttcccttcaccatagccagaagagctttgtggtttccaatcaattgcgggaacagcagggcgagctgacgtcaacctgggatttaatgctgcaaacgcgcattaacctgagtcgttcagcggtgcggatgatgatggattcctccaatcaacaaagtaacgccaaagttgaattgctcgatagcgccaggaaaacattggcgcaggcagcgacgcattataaaaaattcaaaagcatggcaccgttacctgaaatggtcgctaccagtcgtaatattgatgaaaaatataaaaactattacacagcgttaactgaactgattgattatctagattatggcaatactggagcttatttcgctcagccaacccagggaatgcaaaatgcaatgggcgaagcgtttgctcagtacgccctcagcagtgaaaaactgtatcgcgatatcgtcactgacaacgcagatgattaccgatttgcccagtggcaactggcggttatcgcgctggtggtggtattgattctgctggtggcgtggtacggcattcgccgtatgttgcttactccgctggcaaaaattattgctcacattcgcgaaatcgccggtggtaacctagcgaataccctgaccattgacgggcgcagtgaaatgggcgacctggcgcagagcgtttcacatatgcaacgctctttgactgacaccgtcactcatgtccgcgaaggttcagatgccatctatgccggtacccgtgaaattgcggcgggcaacaccgatctttcctcccgtactgaacagcaggcatccgcgctggaagaaactgccgccagcatggagcagctcaccgcgacagtgaagcaaaacgccgataacgcccgccaggcctcgcaactggcgcaaagtgcctccgacaccgcccagcacggcggcaaagtggtggatggcgtagtgaaaacgatgcatgagatcgccgatagttcgaagaaaattgccgacattatcagcgttatcgacggtattgccttccagactaatatcctcgcgctgaatgccgcggttgaagccgcgcgtgcgggtgaacagggccgtggttttgccgtggtggcgggtgaagtgcgtaatcttgccagtcgcagcgcccaggcggcaaaagagatcaaagccctcattgaagactccgtcgcacgcgttgataccggttcggtgctggtcgaaagcgccggggaaacaatgaacaatatcgtcaatgctgtcactcgcgtgactgacattatgggcgagattgcatcggcatcggatgaacagagccgtggcatcgatcaagtcgcattggcggtttcggaaatggatcgcgtcacgcaacagaacgcatcgctggtgcaggaatcagctgccgccgccgctgcgctggaagaacaggcgagtcgtttaacgcaagcggtttccgcgttccgtctggcagccagcccactcaccaataaaccgcaaacaccatcccgtcctgccagtgagcaaccaccggcacagccacgactgcgaattgctgaacaagatccaaactgggaaacattttga

SEQ ID NO: 483284 - DNA, 1602 bp, Shigella sonnei
atgtttaatcgtattcgaatttcgaccacgctgtttttaattttgattctctgcgggatcttgcagattggcagtaacggcatgtctttttgggcatttcgcgacgatttgcaacgactgaatcaggtcgagcagagcaatcagcaacgtgcggcattagcgcaaactcgggcggtaatgttacaggccagtaccgcgctgaacaaagcgggcactctgacggcacttagctatccggcggatgacattaaaacgttgatgacgacggcgcgcgccagtctgacgcaatccaccacgctgtttaaaagttttatggcgatgactgcgggcaacgagcacgtcagggcattgcaaaaagagacggagaaaagttttgcccgctggcacaacgatctcgaacatcaggcgacctggcttgaaagtaatcaactttcggatttcctcactgcgccggtgcagggatcacagaatgcgtttgacgttaactttgaggcctggcagctggagatcaaccatgtgctggaagccgccagtgcgcaaagccagcgtaactatcagatttcgacactggtgtttatcagcatgattattgttgcggcgatctacatcagcagtgcgctgtggtggacgcgcaagatgattgttcaaccactggccattatcggtagccattttgacagcattgctgcgggtaatctggcgcgtccgattgcggtatatggtcgtaatgagatcaccgccatttttgccagtctgaagaccatgcagcaggctttgcgtgggacggtaagtgatgtgcgtaagggaagccaggagatgcacattggtatcgcggagattgtcgcaggcaataacgatctctcaagtcgtaccgaacagcaggcggcatcgctggcacaaacggccgccagtatggagcaattaaccgccacggtagggcaaaacgccgataacgcacgacaggcgtcggaactggcaaaaaatgccgcgacaacggcgcaggcgggcggtgttcaggtcagtaccatgactcacaccatgcaggagatcgccaccagctcgcaaaaaattggcgacattatcagcgttatcgacggaattgctttccagaccaatattctggccctgaatgcggcagtggaagcggctcgcgccggagagcaggggcgtggttttgcggtagtggcaggtgaagtgcgcaatcttgccagccgtagcgcgcaggcagcaaaagagatcaaagggctgatcgaagagtcagtcaatcgtgtccagcagggttcgaaactggtgaataacgccgccgcgaccatgatcgatattgtcagttcggtgacccgcgtgaacgacattatgggagaaattgcctctgcgtcggaagaacaacagcgggggattgagcaggttgcacaggctgtcagccagatggatcaggtgactcagcagaacgcctcgctggtagaagaagcggcggtggcaacggaacaactggcgaatcaggccgaccatctttcgtcgcgtgtggcggtatttacccttgaagaacatgaagtagcacgacatgagtcggcgcagttacaaattgcgccagtggtatcctga

SEQ ID NO: 483285 - DNA, 861 bp, Shigella sonnei
atgacttcatctctgccctgtgggcaaacgtctttattgttacagatgaccgagcgcctggcgctttccgacgcgcattttcggcggataagtcaattgatctatcaacgagccgggatcgttctggctgaccataaacgcgacatggtttacaaccgactggttcgtcgtttgcgttcgctgggactgacggatttcggtcattatctgaacttgctggaatctaatcagcacagcggtgagtggcaggcgtttatcaattcgctgaccacgaatctgacggcatttttccgtgaggcacaccatttccctctgctcgcggatcacgcacatcgccgttctggcgagtatcgcgtatggagcgcggcggcttcgaccggcgaagagccgtacagcattgcgatgacgctggctgacacattgggcaccgcgcccggacgctggaaagtgtttgccagtgatatcgacaccgaagtgctggaaaaagccagaagcggtatttatcgccatgaagagttgaaaaacctgacgccgcagcaactgcaacggtatttcatgcgagggacgggaccgcatgaagggctggtacgcgtgcgtcaggagctggcgaactatgttgattttgccccgctgaatctactggcgaaacagtacaccgtgccggggccgtttgatgcgatcttctgtcgtaacgtcatgatctacttcgatcaaaatacccagcaggagattttgcgccgctttgttccgctccttaaacccgacggattgctgtttgcgggttactctgaaaactttagccaccttgagcgccgcttcacgctgcgtggtcagacggtgtatgcgctaagtaaggattaa

SEQ ID NO: 483286 - DNA, 1050 bp, Shigella sonnei
atgagcaaaatcagggtgttatctgtcgatgattcggcactgatgcgccagatcatgacagaaatcatcaacagccatagcgacatggaaatggtggcgaccgcgcctgatccgctggtcgcgcgtgacttgattaagaaattcaatcccgatgtgctgacgctggatgttgaaatgccgcggatggacggactggatttcctcgaaaaattaatgcgtttgcgtccaatgcccgttgtgatggtttcttccttgaccggcaaaggatcagaagtcacgctgcgcgcgctggagctgggggcaatagattttgtcaccaaaccgcaactgggtattcgcgaaggaatgctggcgtatagcgaaatgattgctgaaaaggtgcgtacggcagcaaaggcgagccttgcagcacataagccattgtcagcaccgacaacgctgaaggcgggtccgttgttgagttctgaaaaactgattgcgattggtgcttcaacgggtggaactgaggcaattcgtcacgtactgcaaccgttgccgctttccagcccggcattgttaattacccaacatatgccgcccggtttcacccgctcttttgccgacagacttaataagctttgccagatcggggttaaagaagccgaagacggagaacgtgtcttgccggggcatgcctatattgcgccgggcgatcggcatatggaactggcgcgtagtggcgcaaattatcaaatcaaaattcacgacggcccggcggttaaccgtcatcggccttcggtagatgtgttgttccattctgtcgccaaacaggcggggcgtaatgcggttggggtgatcctgaccggtatgggcaacgacggcgcggcgggaatgttggcgatgcgtcaggcgggggcatggacccttgcgcaaaacgaagcaagttgcgtggtgttcggcatgccgcgcgaggccatcaatatgggtggtgtctgcgaagtggtcgatcttagccaggtaagccagcaaatgttggcaaaaattagtgccggacaggcgatacgtatttaa

SEQ ID NO: 483287 - DNA, 390 bp, Shigella sonnei
atggcggataaagaacttaaatttttggttgtggatgacttttccaccatgcgacgcatagtgcgtaacctgctgaaagagctgggattcaataatgttgaggaagcggaagatggcgtcgacgctctcaataagttgcaggcaggcggttatggatttgttatctccgactggaacatgcccaatatggatggcctggaattgctgaaaacaattcgtgcggatggcgcgatgtcggcattgccagtgttaatggtgactgcagaagcgaagaaagagaacatcattgctgcggcgcaagcgggggccagtggctatgtggtgaagccatttaccgccgcgacgctggaggaaaaactcaacaaaatctttgagaaactgggcatgtga

SEQ ID NO: 483288 - DNA, 645 bp, Shigella sonnei
atgatgcaaccatcaatcaaacctgctgacgagcattcagctggcgatatcattgcgcgcatcggcagcctgacgcgtatgctgcgcgacagtttgcgggaactggggctggatcaggccattgccgaagcggcggaagccatccccgatgcgcgcgatcgtttgtactatgttgtgcagatgaccgcccaggctgcggagcgggcgctgaacagtgttgaggcgtcacaaccgcatcaggatcaaatggagaaatcagcaaaagcgttaacccaacgttgggatgactggtttgccgatccgattgaccttgccgatgcccgtgaactggtaacagatacacgacaatttctggcagatgtacccgcgcataccagctttactaacgcgcaactgctggaaatcatgatggcgcaggattttcaggatctcaccgggctggtcattaagcggatgatggatgtcattcaggagatcgaacgccagttgctgatggtgctgttggaaaacatcccggaacaggagtcgcgtccaaaacgtgaaaaccagagtttgcttaatggacctcaggtcgataccagcaaagtcggcgtggtagccagtcaggatcaggtggacgatttgttggatagtcttggattttga

SEQ ID NO: 483289 - DNA, 1077 bp, Shigella sonnei
atgaaattgaagctgaaaaaccttagcatggcgatcatgatgagcactatagtcatgggaagcagtgcaatggcggcggacagcaacgaaaaaatagtcatcgcccatcgcggtgccagtggatatttgccggagcatacgctgccagcaaaagcgatggcgtatgcgcagggagcggattatctggaacaggatttggtgatgaccaaagacgaccatctggttgttctgcatgaccattatctcgatcgtgttactgatgttgccgatcgtttcccggatcgggcgcgcaaagacggtcgttactacgcgatagatttcacgctggatgaaattaagtcgctgaaatttaccgaaggtttcgatattgaaaacggtaaaaaagtacagacttatccggggcgtttcccaatgggtaagtccgacttccgggggcacacctttgaagaagagattgaatttgttcaggggttaaatcactctaccgggaaaaatatcggtatctatccagaaatcaaagcgccgtggttccatcatcaggaagggaaggatattgcggcaaaaacgctggaagtgctgaagaaatatggttacaccggtaaggacgataaagtttatttgcaatgttttgatgctgatgagctgaagcgtattaagaatgagctggaacctaaaatgggcatggatctcaatctggtacagctgattgcctataccgactggaatgaaacgcagcagaaacagccggacggaagctgggttaattacagctatgactggatgtttaagccaggtgccatgaagcaagtcgcggaatatgccgacggtatcgggccggattaccatatgttgattgaggaaacatcgcagccgggtaatatcaaactcactggcatggtgcaagatgctcagcagaataaactggtagtgcatccttataccgtgcggtcggataaactgcctgaatacactactgatgtgaatcagttatatgatgctctgtataacaaagcgggtgtaaatgggctgtttactgatttccctgataaggcagtaaaattccttaataaagagtaa

SEQ ID NO: 483290 - DNA, 1359 bp, Shigella sonnei
atgttgagtatttttaaaccagcgccacacaaagcgcgcttacctgccgcggagatcgatccgacttatcgtcgattgcgctggcaaattttcctggggatattctttggctatgcggcttactatttggttcgtaagaactttgcgcttgctatgccttatctggttgagcagggattctcacgcggtgatttaggttttgccctttcggggatctcgattgcttatggattttcgaaattcatcatgggttcggtatcggatcgctcgaatccgcgcgttttcctgcccgcaggtttgattctggcggcggcagtgatgttgtttatgggctttgtgccatgggcgacgtcgagcattgcggtgatgtttgtactgttgttcctctgcggttggttccaggggatggggtggccgccgtgtggtcgtactatggtgcactggtggtcgcagaaagaacgtggcggcattgtgtcagtgtggaactgtgcgcacaacgtcggtggtggtattccgccgctgctgttcctgctggggatggcctggttcaatgactggcatgcggcgctctatatgcctgctttctgcgccattctggtggcattattcgcctttgcgatgatgcgcgataccccgcaatcctgtggcttgccgccgatcgaagagtacaaaaatgattatccggacgactataacgaaaaagcggaacaggagctgacggcgaagcaaatcttcatgcagtacgtactgccgaacaaactgctgtggtatatcgccatcgccaacgtgttcgtttatctgctgcgttacggcatcctcgactggtcaccgacttatctgaaagaggttaagcatttcgcgctggataaatcctcctgggcctacttcctttatgaatatgcaggtattccgggcactctgctgtgcggctggatgtcggataaagtcttccgtggcaaccgtggggcaaccggcgttttctttatgacactggtgaccatcgcgactatcgtttactggatgaacccggcaggtaacccaaccgtcgatatgatttgtatgattgttatcggcttcctgatctacggtcctgtgatgctgatcggtctgcatgcgctggaactggcaccgaaaaaagcggcaggtacggcagcgggctttaccgggctgtttggttacctgggcggttcggtggcggcgagcgcgattgttggctacaccgtggacttcttcggctgggatggcggctttatggtaatgattggcggcagcattctggcggttatcttgttgattgttgtgatgattggcgaaaaacgtcgccatgaacaattactgcaaaaacgcaacggaggctaa

SEQ ID NO: 483291 - DNA, 1629 bp, Shigella sonnei
atgaaaactcgcgactcgcaatcaagtgacgtgattatcattggcggcggcgcaacgggagccgggattgcccgcgactgtgccctgcgcgggctgcgcgtgattttggttgagcgccacgacatcgcaaccggtgccaccgggcgtaaccacggcctgctacacagcggtgcgcgctatgcggtaaccgatgcggaatcggcccgcgaatgcattagtgaaaaccagatcctgaaacgcattgcacgtcactgcgttgaaccaaccaacggcctgtttattaccctgccggaagatgacctctccttccaggccacttttattcgcgcctgcgaagaagcagggatcagcgcagaagctatagacccgcagcaagcgcgcattatcgaacctgccgttaacccggcattgattggcgcggtgaaagttccggatggcaccgttgatccatttcgtctgaccgcagcaaacatgctggatgccaaagaacacggtgccgttatccttaccgctcatgaagtcacgggactgattcgtgaaggcgcgacggtgtgcggtgttcgtgtacgtaaccatctcaccggcgaaactcaggcccttcatgcgcctgtcgtggttaatgccgccgggatctgggggcaacacattgccgaatatgccgatctgcgcattcgcatgttcccggcgaaaggatcgctgctgatcatggatcaccgcattaaccagcatgtgatcaaccgctgccgtaaaccttccgacgccgatattctggtgcctggcgataccatttcgctgattggcaccacctctttacgtattgattacaacgagattgacgataatcgagtgacggcagaagaggttgatattctgctgcgtgaaggggaaaaactggcccccgtgatggcgaaaacgcgcattttgcgggcctattctggcgtgcgcccgctggttgccagcgatgacgacccgagcggacgtaacgtcagccgtggcatcgtgctgctcgaccatgctgaacgcgatggtctggacggatttatcaccatcaccggtggcaaactgatgacctatcggctgatggctgaatgggctaccgacgccgtgtgccgcaaactgggcaacacgcgcccctgtacgaccgccgatctggcacttcctggttcacaggaacccgctgaagttaccttgcgtaaagtcatctccctgcctgccccgctgcgcggttctgcggtttatcgtcatggcgatcgcacgcctgcctggctgagcgaaggtcgtctgcaccgtagcctggtatgtgagtgcgaagcggtaacagcgggtgaagtgcagtacgcggtagaaaatttaaacgttaatagcctgctggatttacgccgtcgtacccgtgtggggatgggtacctgccagggcgaactctgcgcctgccgcgctgccggactgctgcaacgttttaacgtcacgacgtccgcgcaatctatcgagcaactttccaccttccttaacgaacgctggaaaggcgtgcaacccatcgcctggggagatgcactgcgcgaaagcgaatttacccgctgggtttatcagggactgtgtggtctggagaaggagcagaaagatgcgctttga

SEQ ID NO: 483292 - DNA, 1260 bp, Shigella sonnei
atgcgctttgatactgtcattatgggcggcggcctcgccggattactctgtggcctgcaactgcaaaaacacggcctgcgctgtgccattgtcacgcgtggtcaaagcgcgctgcatttctcatccggttcgctggatttgctgagccatctgcctgatggtcaaccggtgacagacattcacagtggactggaatctttgcgtcagcaggcaccagcccatccttacagtcttctcgaaccacaacgcgtgctcgatctcgcttgccaggcgcaggcattgatcgctgaaagcggtgcgcaattgcagggcagcgtggaactggcccatcagcgcgttaccccgctcggcactttgcgtgcaacctggttaagttcgccagaagttcccgtctggccgctacccgcgaagaagatatgtgtagtggggataagcgggctgatggatttccaggcgcatcttgcggcggcttcgttgcgcgaactggatctttcggttgaaaccgcagaaatagagctgccggaactggatgtcctgcgcaataacgccaccgaatttcgcgcggtgaatatcgcccgtttccttgataatgaagaaaactggccgctgttacttgatgcgcttattcctgtcgccaatacctgcgaaatgatcctgatgcccgcctgcttcggcctggccgatgacaaactgtggcgttggttgaatgaaaaactaccttgttcactgatgcttttgccaacgctgccgccttccgtgctgggcattcgtctgcaaaaccagttacagcgccagtttgtgcgccagggtggcgtgtggatgccgggcgatgaagtgaaaaaagtgacctgtaaaaatggcgtagtgaatgaaatctggacccgcaatcacgccgatattccgctacgtccacgtttcgcggttctcgccagcggcagtttctttagtggcggactggtagcggaacgtaacggcattcgcgagccgattctcggccttgatgtgctacaaaccgccacgcggggtgaatggtataagggcgatttttttgcgccgcaaccgtggcagcagttcggtgtaaccactgatgagacgctacgcccgtcgcaggcagggcaaaccattgagaacctgtttgccatcggttcggtgctgggcggatttgatcccatcgcccaaggatgcggcggcggtgtttgtgccgtcagtgctttacatgccgctcaacagattgcccaacgcgcaggaggccaacaatga

SEQ ID NO: 483293 - DNA, 1191 bp, Shigella sonnei
atgaacgacaccagcttcgaaaactgcattaagtgcaccgtctgcaccaccgcctgcccggtgagccgggtgaatcccggttatccagggccaaaacaagccgggccggatggcgagcgtctgcgtttgaaagatggcgcactgtatgacgaggcgctgaaatattgcatcaactgcaaacgttgtgaagtcgcctgcccgtccgatgtgaagattggcgatattatccagcgcgcgcgggcaaaatatgacaccacgcgcccgtcgctgcgtaattttgtgttgagtcataccgacctgatgggtagcgtttccacgccgttcgcaccaatcgtcaacaccgctacctcgctgaaaccggtgcggcagctgcttgatgcggcgttaaaaatcgatcatcgtcgcacgctaccgaaatactccttcggcacgttccgtcgctggtatcgcagcatagcggctcagcaagcacaatataaagaccaggtcgctttctttcacggctgcttcgttaactacaaccatccgcagttaggtaaagatttaattaaagtgctcaacgcaatgggtatcggtgtacaactgctcagcaaagaaaaatgctgcggcgtaccgctaatcgccaacggctttaccgataaagcacgcaaacaggcaattacgaatgtagagtcgatccgcgaagctgtgggagtaaaaggcattccggtgattgccacctcctcaacctgtacatttgccctgcgcgacgaatacccggaagtgctgaatgtcgacaacaaaggcttgcgcgatcatatcgaactggcaacccgctggctgtggcgcaagctggacgaaggcaaaacgttaccgctgaaaccgctgccgctgaaagtggtttatcacactccgtgccatatggaaaaaatgggctggacgctctacaccctggagctgttgcgtaaaatcccggggcttgagttaacggtgctggattcccagtgctgcggtattgcgggtacttacggtttcaaaaaagagaactaccccacctcacaagccatcggcgcaccactgttccgccagatagaagaaagcggcgcagatctggtggtcaccgactgcgaaacctgtaaatggcagattgagatgtccacaagtcttcgctgcgaacatccgattacgctactggcccaggcgctggcttaa

SEQ ID NO: 483294 - DNA, 903 bp, Shigella sonnei
atgaccgaatcaacaacctcctccccgcatgatgcggtatttaaaacctttatgttcacacccgaaaccgcacgggattttctcgaaatacatttgccagaaccactgcgcaagctttgcaacctgcaaaccttacgcctggaacccactagttttattgaaaaaagtttacgcgcttactactcggatgttttgtggtccgtggaaaccagcgacggtgacggctatatctactgcgtgattgaacatcaaagctctgcagaaaagaatatggcttttcggctaatgcgctatgccactgccgccatgcagcgtcacctggataaaggctatgacagagttccgctggtggtgccattgctgttttatcatggcgaaacatcgccctacccgtactcacttaactggctggatgagtttgacgatccgcaacttgcccggcagttgtacaccgaagcttttccgttggtggatatcaccatcgtacctgacgatgagatcatgcaacatcggcgtatagctctgcttgaactgattcaaaagcatattcgcgaccgcgatttaatcggtatggtcgacaggatcaccacgcttttggttaaaggcttcactaatgacagccagctacaaacactgtttaattatctgctgcaatgcggcgatacctcccgtttcacccgttttattgaggagatttccgaacgttcaccactacaaaaggagagattgatgactattgctgagcggctacggcaggaaggacaccaaattggctggcaggaaggtatgcatgaacaagccattaaaattgctttgcgcatgctggaacagggcattgatcgtgaccaggtgctcgcggccacccagctaagcgaagccgatctggcagcgaataaccactaa

SEQ ID NO: 483295 - DNA, 804 bp, Shigella sonnei
atgaacgcattattaaccaatccctttaaagaacgtttacgcaagggcgaagtgcaaattggtctgtggttaagctcgactacttcttatatggcagaaattgccgctacttccggttatgactggttgctgattgacggggagcacgcgccaaacaccattcaggatctttatcaccagctacaggcggtagcgccctatgccagccaacccgtgatccgtccggtggaaggcagtaaatcgctgattaaacaagttctggatattggcgcgcaaactctattgatcccgatggtcgatactgccgatcaggctcgtcaggtggcgtctgccacgcgctatcctccctacggtgagcgtggtgttggggccagtgtggcacgggctgcgcgctggggacgcattgagaattacatggcgcaagtcaacgattcgctttgtctgttagtgcaggtggaaagtaaaacggcactggataacctggacgagatcctcgacgtcgaagggattgatggcgtgtttattggaccagcggatctttctgcgtcgttgggctacccggataacgccgggcacccggaagtgcagcgaattattgaaaccagcattcggcggatccgtgctgcgggtaaagcggctggttttctggctgtggctcctgatatggcgcagcaatgcctggcgtggggagcgaactttgtcgctgttggcgttgacacgatgctctacagcgatgccctggatcaacgactggcgatgtttaaatcaggcaaaaatgggccacgcataaaaggtagttattga

SEQ ID NO: 483296 - DNA, 1290 bp, Shigella sonnei; identical to SEQ ID NO: 462253

SEQ ID NO: 483297 - DNA, 1239 bp, Shigella sonnei
ttgacttacaggcctcataacaatggagaacatcatgaccctaccaaaaatcaaacaggttcgcgcctggtttactggcggtgcgacagcagaaaaaggtgctggcgcggtgattatcacgaccagggggcgaatcactggattgacgatcatattgccaccccgatgagtaaataccgcgattacgagcagtcacgccagtcatttggcattaacgttcttggcacgttgattgttgaagtcgaagcagaaaacggccagaccggattcgctgtttcgacagccggtgaaatgggctgttttattgtcgaaaaacatcttaaccgtttcattgagggtaaatgtgtcagtgatatcaaactgatccatgatcaaatgctcaatgccaccctgtattactccggctctggtggcctggtgatgaacacgatttcctgtgtcgatctggctctgtgggatctgttcggcaaagtggtcgggcttccggtttataaacttttaggcggcgcagttcgtgatgagattcagttctacgccacaggcgcgcgtccggatctggcaaaagagatgggctttatcggtggcaaaatgccgacgcactgggggccacatgatggcgatgcggggatccgcaaagatgccgttatggtcgcggatatgcgtgaaaaatgcggtgaggatttctggttaatgctcgactgctggatgagtcaggacgtgaactatgccaccaaactggcccacgcttgcgcgccctataacctgaaatggatcgaagagtgcctgccgccacagcagtatgaaggttatcgcgaactgaaacgcaacgcgccagtcggaatgatggtcaccagcggtgagcaccacggcacactgcaatcttttcgtacgctttcagaaaccggtatcgacattatgcagccggatgttggctggtgcggtggtttaaccacgctggtggaaattgccgcaatcgccaaatccagggggcaactggtggtgccgcacggttcgtctgtttactctcaccatgcggtgatcaccttcaccaatacgccattcagcgaattcctgatgaccagcccggattgttcaacgatgcgtccgcagtttgacccgattctgctcaatgagccggttccggtgaatggtcgtattcataaatcagtgcttgataaacccggttttggcgtcgaactcaatcgtgactgcaatttgaaacgcccctacagccactaa

SEQ ID NO: 483298 - DNA, 783 bp, Shigella sonnei
atgttggaatcaagcaaagttcccgccctgacacgggctattgatattctcaatttgattgcccgcattggcccctgtagtgctgcgacgatcattgacacattgggaatccctaaaagcacggcctatttgctgcttaatgaactcaggcgtcagcgttttcttagccttgatcaccaggaaaatttttgtttgtggaccaggctggtggagctttctggtcatgcgttaagcaagatggatctccgggaactggctcgaccgcgtttgacgcaactgatggataccaccgggctgttatgtcacctggggattattgataacggcagcgcttattacattttaaaagtggagtcatcagccactatcagcgtgcgttcccatgaaggaaaaagcctttcgctttatcgctccggaataggtaaatgcctgcttgcctggcaacctgcagcggtacagcaaagtattatcgaagggctggtctgggagcaggcgacacccacaacgattactcatccacagcaacttcacgaagaactggcgcgtattcgccgtcagggctggagctatgacaacggcgaagattaccccgatgtccgttgtgtcgctgcgccggtgtttaacgccaataacgagcttaccgctgcgatctcggtggtcggtacccgcttacaaatcaatgaagaataccgtgattatctggcgggcaaggccattgcctgcgccagggatatttcacgtctgttgggatggaaaagtccctttgacttacaggcctcataa

SEQ ID NO: 483299 - DNA, 1203 bp, Shigella sonnei
atgttaaaagtggaaatgttatccaccggggatgaagtgttacacgggcaaatcgttgacactaacgctgcctggctggccgattttttctttcatcaggggttgccattatctcgccgcaatacggtgggggataaccttgatgacttagtcaccattcttcgcgaacgtagtcagcacgccgatgtgctgatcgttaacggcgggctgggaccgaccagtgatgatttaagtgcactcgccgctgcgacagcaaaaggtgaaggcctggtgctgcatgaagcctggctcaaagagatggaacgctatttccacgaacgtggacgagtaatggcaccgagcaaccgtaaacaagcggagctgcctgccagtgctgaatttatcaataacccggtaggcaccgcctgtggttttgccgtgcggcttaatcgttgcctgatgttctttactcccggcgtaccgtcagaatttaaggtgatggtcgagcacgaaatcctgccgcgcctgcgcgagcgtttttctttaccacagtcgccggtttgtctgcgtttaactacctttggtcgttcggaaagcgatctggcacaaagcctggacactctacaactgccgccgggcgtaacaatgggctatcgctcctcaatgccgatcatcgaactgaaactcaccggaccggcaagcgagcaacaggcgatggaaaaactgtggctggacgttaaacgtgttgccggacagagcgtgattttcgaaggcaccgaaggactgcccgcgcagatcagtcgcgaattgcaaaaccgccagttcagcctgacgttgagcgagcaattcaccggtggtttattggctttgcaactttctcgcgcaggtgctccattgctggcgtgtgaagtggttccttcacaggaagaaaccctggcgcaaactgcgcactggattacagaacggcgggccaaccattttgccgggctggcactggctgtttcgggtttcgagaacgagcatctcaactttgcgctagccacgccagacggcactttcgctctgcgtgtgcgtttcagcactacacgctacagcctggctatccgtcaggaagtgtgcgcaatgatggcactgaatatgctgcgccgttggttaaacggccaggatatcgccagtgagcatggctggattgaggttgttgagtccatgaccttatctgtctga

SEQ ID NO: 483300 - DNA, 543 bp, Shigella sonnei
atgaaaaaaattgcgctagcaggtctggccggaatgctgttggtttctgcatcggtcaatgcaatgagcatcagcggtcaggcgggtaaagaatacaccaatattggtgtcggttttgggactgaatcgacgggcctggcgttaagcggtaactggacacataacgacgacgacggtgacgtcgctggcgtggggctggggttgaatctgcctctcgggccgttaatggcgaccgttggcggaaaaggcgtttacaccaacccgaattacggcgatgaaggttatgccgcagcggtaggaggtggtttgcagtggaaaattggcaacagcttccgtttgtttggcgagtattactactctccggattcactctccagcggtattaaaagttatgaggaagcgaatgctggcgcgcgttacaccattatgcatccagtcagtattgaggcgggttatcgctacctgaatctgtcgggtaaagacggtaaccgcgacaacgccgtggctgacggcccgtatgttggggttaacgccagtttctga

SEQ ID NO: 483301 - DNA, 426 bp, Shigella sonnei
gtgcgacaacggactattgtatgccctttgattcaaaatgatggtgcttatttgctgtgcaaaatggccgacgatcgcggcgttttccccggtcaatgggcgctttcgggtggcggcgtggagtctggcgaacgaattgaagaggcactacgccgcgaaattcgcgaagaactgggagaacagctgcttttgacagaaatcacgccgtggaccttcagcgatgatattcgcaccaagacgtatgcagatggtcgcaaggaagagatttatatgatttacctgatttttgactgcgtttctgccaaccgagaagtgaaaataaacgaagagtttcaggactacgcgtgggtaaaacctgaagatctggtgcattatgatttaaatgttgccacccgaaaaacgttacgtttgaaaggtcttctttaa

SEQ ID NO: 483302 - DNA, 603 bp, Shigella sonnei
gtgttagctttttgccgctcatcattgaagtcaaaaaaatatttcatcattttactggcgctcgctgcaattgccggactgggtactcatgccgcctggagtagcaatggtttgccacgtatcgacaataaaacattggccagactggcacagcagcacccggttgtcgttttgtttcgccatgctgaacgttgcgatcgttcaaccaatcaatgcttgtcagataaaacaggtattacggttaaaggtacccaggatgcccgtgaactgggcaacgcttttagcgctgacatccctgatttcgatctttattccagtaataccgtccggaccattcagtcggcgacctggttttccgcgggtaaaaaactgacggtagataaacgacttcttcagtgcggtaatgagatttatagtgcaattaaggacttacaaagcaaagcgcctgataaaaatatcgttattttcacccataatcattgcctgacatatattgctaaaaataagcgtgatgcgacatttaaacctgattatctggatggtttagtcatgcatgtggaaaaaggcaaagtttatctggatggggaattcgttaaccactaa

SEQ ID NO: 483303 - DNA, 1158 bp, Shigella sonnei
atggcggaaggaaaagcaatgtcagaatttttgcctttttcgcgaccagcaatgggcgtggaggaactcgctgcagttaaagaggttctcgaatccggttggatcacaaccggtccgaagaatcaggcgcttgagcaagccttttgccagttgacgggaaatcagcatgccatcgcggtcagttcagccaccgccggaatgcatatcacgctaatggcgttggaaattggcaagggcgatgaagtgattacgccttccctgacctgggtttcaaccctcaatatgatttccttgttgggtgcaacgccggtaatggtggatgtcgaccgcgatacgctgatggtcacgcctgaagcgatcgagtcagccattacgccacgcactaaagccatcattccggtgcattatgccggtgcgccagcagatattgacgccattcgcgccattggcgaacgttacggcatcgcagttatcgaagatgctgcccatgccgtcggtacgtattacaaagggcgacatattggcgcaaaaggtaccgctattttttcatttcatgccattaaaaatattacctgtgcggaaggtggcctgattgtaactgataatgaaaaccttgcccgccagctacggatgctgaaatttcacggtctgggtgtcgatgcctatgacagacaaacctggggccgtgcaccgcaggctgaagtcttaacaccgggctataagtacaatctgaccgatattaacgccgcgattgccctgacacagttagcaaaattagagcacctcaacacccgtcggcgcgaaattgcccagcaatatcagcaagcactggcagctctcccctttcagccattaagccttcccgcctggccgcacgttcacgcctggcatctgtttattattcgtgtcgatgaacaacgttgtggtatcagtcgcgatgcgttgatggaagcgttaaaagaaagaggcattggtaccgggttacatttccgcgccgctcacacacaaaaatattatcgcgagcgttttcccacgctgtcgttaccgaataccgaatggaatagcgaacgcatctgttctttgccgctgttcccggatatgactaccgccgatgccgaccgtgtcatcacagcccttcagcaactcgcaggacaataa

SEQ ID NO: 483304 - DNA, 969 bp, Shigella sonnei
atgtttgaaatccaccctgttaagaaagtctcggtggttattcccgtttataacgagcaggaaagcttaccggaattaatcaggcgcaccaccacagcctgtgaatcgttggggaaagagtatgagatcctgctgattgatgacggcagtagcgataattccgcgcatatgctggtcgaagcctcacaagcggagaacagccatattgtgtctattttgcttaaccgcaattacgggcaacattcagcgattatggcgggattcagtcacgttactggcgacttaattattacccttgatgccgatctccagaatccgccagaagaaatcccccgcctggtggcaaaagccgatgaaggttacgacgtggtagggactgtacgccagaaccgccaggacagctggtttcgtaaaacagcttcgaagatgattaacaggcttattcagcgcaccaccggcaaagcgatgggtgactacggttgtatgctgcgcgcctatcgccgtcatattgtcgatgcgatgttgcactgccatgaacgtagcacctttatcccgattctggcgaatatcttcgcccgccgtgccattgaaattccagtacatcatgccgagcgtgagtttggtgaatccaaatacagttttatgcgcctgattaatttgatgtacgacctggtgacctgccttaccacaacgccgctacgtatgctgagtctgctcggcagcattattgcgattggaggttttagcattgcggtgctgctggtgattttacgcctgaccttcggaccacaatgggcggcagaaggcgtctttatgctatttgccgtgctgtttacttttattggcgctcagtttatcggcatgggattgctcggtgaatatatcggcaggatctacaccgatgtccgcgcccgcccccgctattttgttcagcaagttatccgtccatccagcaaggaaaatgaataa

SEQ ID NO: 483305 - DNA, 1983 bp, Shigella sonnei
atgaaaaccgtcgtttttgcctaccacgatatgggatgcctcggtattgaagctctgctggctgccggttacgaaattagcgccatttttacccataccgataatcccgctgaaaaagccttttatggttcggtggctcgtctggcggcggaaagaggcattccagtttatgcgccggataacgttaatcatccgctgtgggtggaacgcattgcccaactctcaccagaggtgattttctctttttattatcgccatcttatttgcgacgagattttgcagctcgctcccgcaggtgcatttaatctgcacggttcgctgttaccaaaatatcgtggtcgcgcgccgctgaactgggtgctggtgaacggtgaaacggaaacgggcgttacattgcaccgaatggtaaaacgtgccgatgctggggccattgtggcgcaactgcgcgttgccattgcgccagacgatatcgctattacgctgcatcataaattgtgccatgccgcgcgccagctactggaacagacattacccgccattaaacacggtaatattctggaaattgcccagcgcgaaaacgaagccacctgttttggtcacagaacgccagatgacagtttccttgaatggcataaaccggcatccgtactgcacaacatggtacgtgccgttgccgatccgtggccgggtgccttcagctatgttggcaatcagaaattcaccgtctggtcgtcgcgtgttcatcctcatgccagcaaagcacagccggggagcgtgatttctgttgcgccactgctgattgcctgtggcgatggcgcgctggaaatcgtcaccggacaggcgggcgacggcattactatgcagggctcgcaattagcgcagatgctgggcctggtgcaaggttcacgcttgaatagccagcctgcctgcaccgcccgacgccgtacccgggtactcatcctcggggtgaatggctttattggcaaccatctgacagaacgcctgctgcgcgaagatcattatgaagtttacggtctggatattggcagcgatgcgataagccgttttctgaatcatccgcattttcactttgtcgaaggcgatatcagtattcattccgaatggattgagtatcacgtcaaaaaatgtgatgtcgtcttgccgctggtggcgatagccacgccgattgaatatacccgcaacccgctgcgcgtatttgaactcgattttgaagagaatctgcgcattatccgctactgcgttaagtaccgtaagcgaatcatcttcccgtcaacttcagaagtttatgggatgtgtagcgataaatacttcgatgaggaccattctaatttaatcgtcggcccggtgaataaaccacgctggatttattcggtgtcaaaacaattacttgatcgggtgatctgggcctatggcgaaaaagagggtttacagttcaccctcttccgcccgtttaactggatgggaccacgactggataaccttaatgcagcgcgaattggcagctcccgcgctattacgcaactcattctcaatctggtagaaggttcaccaattaagctaattgatggcggaaaacaaaaacgctgctttactgatatccgggacggtatcgaggcgttgtaccgcattatcgaaaatgcgggaaatcgctgcgacggcgaaattatcaacattggcaatcctgagaacgaagcgagcattgaggaactgggcgagatgctgctggcgagcttcgaaaaacatccgctgcgccatcacttcccaccgtttgcgggctttcgtgttgtcgaaagtagcagctactacggcaaaggatatcaggacgtagagcatcgtaaaccgagcatccgcaatgcccgccgctgcctggactgggaaccgaaaattgatatgcaggaaaccatcgacgaaacgcaggatttcttcctgcgcaccgttgatcttacggataaaccatcatga

SEQ ID NO: 483306 - DNA, 891 bp, Shigella sonnei
atgaccaaagtcggcttacgcattgatgtcgatacctttcgtggcacccgtgaaggcgtgccacgtctgctggaaatcttgagtaagcataatattcaggccagcatttttttcagcgtcggcccggacaatatgggccgccatctctggcgactggtgaagccacagtttttgtggaagatgctgcgctcaaacgcggcatcgctttatggctgggatattttactggcaggtacggcctggccaggtaaagagattggtcatgccaatgccgatatcattcgtgaagcggctaaacatcacgaagtcggcctgcacgcctgggatcaccatgcctggcaagcccgtagcggtaactgggatcggcaaacaatgatcgacgatattgcacgcggtcttcgcactctggaagagattatcggtcaaccggtaacctgttctgccgctgcgggctggcgtgccgaccagaaggtgatcgaagcaaaagaagcgttccatttgcgctacaacagcgattgtcgtggggccatgccgttccgtccactgctcgaatcaggaaaccctggcactgcgcaaattccggtgaccttacccacctgggatgaagtgattggtcgggatgtgaaagcagaagattttaacggttggttactcaaccgcatcctgcgagataaaggcacgccggtttataccattcatgcagaagttgaaggctgcgcttatcagcataattttgtggatctcctcaaacgcgcagctcaggaaggcgtgacattttgccctttaagcgaactgttatcagagacgttgccgctcggacaagttgttcgcggaaatattgccggacgtgaaggctggctgggttgccaacaaattgcgggtagtcgctga

SEQ ID NO: 483307 - DNA, 1653 bp, Shigella sonnei
atgaaatcggtacgttaccttatcggcctcttcgcgtttattgcctgctattacctgttaccgatcagcacgcgtctgctctggcaacccgatgaaacgcgttatgcggaaatcagtcgagaaatgctggcatccggcgactggattgtgccccatctgttagggctacgttatttcgaaaaacccattgccggatactggattaacagcattgggcaatggctatttggcgcgaataactttggtgtgcgggcaggcgttatctttgcgaccctgttaactgccgcgctggtgacctggtttactctgcgcttatggcgcgataaacgtctggctctactcgccacagtaatttatctctcattgtttattgtctatgccatcggcacttatgccgtgctcgatccgtttattgcattctggctggtggcgggaatgtgcagcttctggctggcaatgcaggcacagacgtggaaaggcaaaagcgcaggatttttactgctgggaatcacctgcggcatgggggtgatgaccaaaggttttctcgcccttgccgtgccggtattaagcgtgctgccatgggtagcgacgcaaaaacgctggaaagatctctttatttacggctggctggcggttatcagttgcgtactgacggttctcccctggggactggcgatagcgcagcgggagcctgacttctggcactattttttctgggttgagcatattcaacgctttgcactggatgatgcccaacatagagctccgttctggtactacgtgccggtcatcattgccggtagcctgccgtggctgggattactccccggtgcactgtacacaggctggaaaaaccgcaagcattccgcaaccgtctatttgttgagctggacgataatgccgctgctgtttttctccgtcgctaaaggtaaattgcccacctatattctttcctgctttgcatctctggcaatgctgatggcgcattacgctttgctggcagcaaaaaataatcctctggcgctgcggattaatggctggattaacatcgcttttggcttcactggcattattgccacatttgtggtctccccgtggggaccaatgaacacgccggtgtggcaaaccttcgagagctataaagtcttttgtgcctggtcgattttttcgctatgggcatttttcggctggtacaccttaacaaacgtcgaaaagacctggtcttttgccgcgctttgcccgctggggctggcgttgctggtaggattttcaattcctgacagagtcatggaaggaaaacatccgcaattttttgtcgagatgacacaagaatcacttcagccaagccgctatattcttactgatagcgtcggtgttgccgcaggtctggcatggagcctgcaacgcgatgacatcatcatgtatcgccagacaggtgagttgaaatacggccttaattatccggatgcgaaagggagatttgtcagcggtgatgagttcgcaaactggcttaatcaacatcgtcaggaggggattattacactcgtgctttcggttgaccgcgatgaagatatcaacagtctcgccattccgcccgcagatgccatcgatcgtcaggagcgtctggtgctgattcagtatcgtcccaaatga

SEQ ID NO: 483308 - DNA, 336 bp, Shigella sonnei
atgatctggctaacattagtctttgccagcttgcttagcgttgccgggcagttgtgtcagaaacaggcaacctgctttgtggcgataaacaaacggcgcaaacatatcgtgctgtggctgggactggcgctggcttgtcttggtcttgccatggtgctctggctgctggtcttgcagaacgtaccggtaggcattgcctacccgatgttaagtctgaattttgtctgggtgacgctggctgcagtaaaactgtggcacgaaccggtatcgccgcgtcactggtgtggggtggcgttcattattggcggcattgtgatcctcgggagtacggtgtaa

SEQ ID NO: 483309 - DNA, 387 bp, Shigella sonnei
atgggcctgatgtggggattattcagcgtcattattgcctcagttgcgcaattaagcctgggttttgcggcgagtcatctgccgccgatgacgcacttatgggattttatcgcggctctgttagcttttggcctggatgcccggatactgttactcgggctgctgggttatctgctttccgttttttgttggtataaaacgctacataaacttgcgctaagcaaagcctatgccttgctcagtatgagttatgtgctggtatggattgcttcaatggtacttcccggctgggaagggactttttcgctgaaagcactactgggagtagcctgtattatgagcgggttgatgctgattttcctgcccacgacaaaacaacgttactga

SEQ ID NO: 483310 - DNA, 267 bp, Shigella sonnei
atggaatggctggtcaaaaaatcgtgctgcaataaacaagataacagacatgtacttatgctctgcgatgctggcggcgcgataaaaatgatcgccgaagtgaagagtgacttcgccgtgaaagtgggggatttactctcgcctttgcagaatgcgctttattgtattaatcgtgaaaagctgcatacggtgaaagtcctctcggcaagcagttatagccccgatgagtgggaacggcagtgtaaagtggcagggaaaactcagtaa

SEQ ID NO: 483311 - DNA, 1422 bp, Shigella sonnei
atgatcttctctgactggccgtggcgtcactggcggcaagtgcggggagaagccatcgccttacgtcttaatgacgagcaactcaactggcgcgagctttgtgctcgcgtcgatgagttagctacgggctttgcggcgcagggtgtggttgagggcagcggcgtgatgttgcgggcgtggaatacgccgcaaacgctgctcgcctggctggcgttactgcaatgcggggcgcgggtgttgcccgtgaaccctcagctgccgcaaccgttgcttgaagaattgctgcccaatctgacgctgcaatttgcgctggtgccggatggggaaaacacgtttccggcattaacgtcgctgcacattcagcgggttgaaggcgcacatgccgctacgtggcagccgacgcgtctgtgctcaatgacgttgacctcgggttctaccggtttgccgaaagccgctgtccatacttatcaggcccatcttgccagtgcgcaaggtgtgttatcgctgattccgtttggcgatcacgatgactggttgctctctttaccgctgtttcacgtctccggtcagggaattatgtggcgctggttatacgctggtgcgcggatgacggtgcgtgataaacagccattggagcaaatgctggcaggctgtactcacgcttcactggtgccaacacaactctggcgtttgctggttaaccgcagttccgtttccctgaaagcggtgttacttggcggcgcggctatcccggtcgagttgacggaacaggcgcgcgagcaggggattagttgcttttgcggctatggtctgaccgagtttgcctccacggtgtgtgcgaaagaagccgacggcctggcagacgttggttcgccgctgccgggtcgggaagtgaaaatcgttaataatgaagtgtggctgcgggctgccagtatggcagaaggttactggcgtaacgggcaactggtttcactggttaatgacgaaggctggtacgctacgcgcgatcgcggtgagatgcataatggcaagctgaccattgtcggacgtttagacaatctgttcttcagtggcggagagggtattcagccggaagaagtcgagcgcgtaattgctgcacatcctgcggttttgcaggtgtttatcgtccccgttgccgacaaggagtttggtcatcgaccggtagcggtggtggagtatgaccagcaaaccgttgatcttggcgaatgggtgaaagataagctggctcgttttcaacaaccggtgcgctggctaactttaccgccggagctgaaaaacggcggtattaaaatttcacgtcaggcgttaaaagagtgggtgcaacgccaggattacgaaatcattagtttcacttcgcaattttgccattccattgccgttgataataggtttatctgttaa

SEQ ID NO: 483312 - DNA, 963 bp, Shigella sonnei
atgcgtagcgcgcaggtataccgctggcagatccccatggacgcggggatggttctgcgcgacaggcggttaaaaacccgcgacgggctgtatgtttgcctgcgtgaaggcgagcgcgaagggtggggggagatctccccactgccgggcttcagtcaggaaacctgggaagaggcgcaaattgtgctgcttgcttgggtaaataactggctggcaggcgatggcgagctaccgcagatgccttccgttgcctttggcgtaagctgtgcattggcggagctggcagatacgctcccgcaggcggccaattaccgtgcggcaccactgtgtaatggcgatcctgacgatctgatcctcaaacttgctgatatgccaggcgagaaagtggcgaaggtcaaagtgggattgtacgaagccgtgcgcgacggcatggtggttaatctgttgctggaggcaattccggatctgcatttgcgtcttgacgcaaatcgcgcctggacaccgctgaaaggtcagcagtttgccaaatatgttaacccggattatcgccaccgcatcgcgtttctcgaagagccgtgcaaaacccgcgatgattcgcgagcgtttgcccgtgaaaccggcattgccattgcctgggatgaaagcctgcgcgagccggattttgcctttgtggctgaagagggcgtgcgcgcggtagttatcaaacccacgctcacgggcagtctggaaaaagtacgcgagcaggtacaggcggcgcatgcgctggggctgacggcggtgatcagttcttccattgagtcgagcttaggtctaacgcaactggcgcggattgctgcctggttaacgccagacaccattccgggactggacacgctggatctgatgcaggcgcagcaggttcgtcgctggccggggagcccactgccgttagtggacgctgatgtactggagcagttgttatga

SEQ ID NO: 483313 - DNA, 858 bp, Shigella sonnei
atgatttatcctgatgaagcaatgctttacgcaccggttgaatggcacgactgctccgaaggttttgaggacattcgttatgaaaaatccaccgacggtatcgcaaaaatcaccattaatcgtccgcaggtgcgcaatgccttccgtcctctgacggtaaaagagatgatccaggcactggcagatgcgcgttatgacgacaacgtcggcgtgatcattctgactggcgcaggcgataaagcgttctgctccggtggtgaccagaaagtgcgtggtgattacggcggctataaagatgattccggcgtacatcacctgaacgtgctggacttccagcgtcagatccgtacctgtccgaaaccggttgtcgcgatggtggctggctactccatcggcggtggtcacgttctgcacatgatgtgcgacctgactatcgcggcagataatgccatcttcggtcagactggcccgaaagtcggttccttcgacggcggctggggcgcttcctacatggctcgcatcgtcggacagaaaaaagcgcgtgaaatctggttcctgtgccgtcagtacgatgcaaaacaggcgctggatatgggccttgtcaacaccgtggtaccgctggcggatctggaaaaagaaaccgtccgttggtgccgcgaaatgctgcaaaacagcccgatggcgctgcgctgcctgaaagctgcgctgaacgccgactgtgacggtcaggcgggtctgcaggagctggcgggcaacgccaccatgctgttctacatgacggaagaaggtcaggaaggtcgcaacgctttcaaccagaaacgtcagcctgatttcagcaaatttaaacggaatccgtaa

SEQ ID NO: 483314 - DNA, 759 bp, Shigella sonnei
atgatcctgcacgcgcaggcaaaacacggcaaaccaggtttaccctggctggtgtttttgcacggtttttccggcgattgccacgaatggcaagaagtgggcgaggcgtttgccgactactcacggttgtatgtttatctcccaggtcacggtggttcggcggcgattagcgtcgatggatttgatgatgtcaccgacttactgcgtaaaaccctggttagttacaacatccttaacttctggttggtggggtactcgcttgggggacgggtggcgatgatggcggcttgccaggggatgccggggctttgtggggttgttgtcgaaggcgggcatcctgggttgcaaaatgctgaacaacgcgcggaacgtcagcgttccgatcgccaatgggcgcagcgttttcgcacagaaccgttaacggcggtatttgccgactggtatcaacagcctgtttttgcctcgctcaatgacgatcaacgccgggagctggtggcgctgcgcagtaacaataatggcgcaacccttgccgccatgctggaggcgacttctctcgccgtccagcctgatttacgtgctaaccttagcgcccgcacatttgcgttttattatttatgtggtgaacgtgacagcaaattccgcgccttggcggcggaactggctgccgactgccatgtcattcctcgcgccggacataacgcgcatcgggaaaatcccgctggcgttatcgcaagtctggcgcagatcttgcgtttctga

SEQ ID NO: 483315 - DNA, 1671 bp, Shigella sonnei
atgtcagtaagcgcatttaaccgacgctgggcggcggtcattctggaagcattaacgcgtcacggcgtcagacacatctgtatcgcccctggctcgcgttctacaccgttaacgttagcggcggcggagaattccgcattcattcaccacacccatttcgatgagcgtgggttggggcatctggcgctggggctggcgaaagtcagcaagcagccggtggcggtgattgtgacctccggtacggcggtagcaaatctctatccggcactgattgaagctgggttaaccggagaaaaactgatcctgttaaccgccgatcgcccgccggagctgattgactgcggcgcgaatcaggcgattcgtcagccgggaatgttcgcctctcaccccacgcacagtatttcattgccgcgcccgacccaggatatccccgcacgttggctggtttctaccatcgaccatgctctcggtacgcttcattctggtggagtccatatcaactgcccgtttgccgaaccgctgtatggcgaaatggacgacaccgggcttagctggcaacagcggctgggcgactggtggcaggacgacaaaccgtggctgcgtgaagcgcctcgtctggaaagtgaaaaacagcgcgactggttcttctggcgacaaaaacgcggcgtggtggttgccgggcgcatgagtgcggaagagggcaaaaaagttgcactgtgggcgcaaactcttggctggccgctgattggcgacgtgctgtcgcaaaccggacagccgctgccgtgtgccgatctctggttaggcaatgccaaagcgaccagcgaactgcaacaggcgcaaattgtggtgcaactgggaagcagcctgacgggcaaacggctcctgcaatggcaggcaagctgtgaacccgaagagtactggattgtggatgacatcgaagggcggcttgatccggcgcaccatcgtggacgccgcttaattgccaatattgccgactggctggagctgcatccggcagaaaaacgccagccctggtgcgttgaaatcccgcgcctggcggaacaggcaatgcaggcggttattgcccgtcgcgatgcgtttggcgaagcgcaactggcgcatcgcatcagcgactatctgcctgaacaggggcaattgtttgtcggtaacagcctggtggtacgtctgattgatgcgctttcgcaacttccggcaggttacccggtgtacagcaaccgtggggccagcggtatcgacgggctgctctcgactgccgccggcgttcagcgggcaagcggcaaaccgacgctggcgattgtgggcgatctctccgcactttacgatctcaacgcgctggcgttattgcgtcaggtttccgcgccgctgatattaattgtggtgaacaacaacggcgggcaaattttctcgctgctgccaacgccgaaaagcgagcgcgagcgtttctatctgatgccgcaaaacgtccattttgagcacgccgccgcgatgttcgagctgaaatatcatcgtccgcaaaactggcaggaacttgaaacggcacttgccgatgcctggcgcacgccaaccaccacggtaattgaaatggtggttaacgacaccgatggtgcgcaaacgctccagcaacttctggcgcaggtaagccatttatga

SEQ ID NO: 483316 - DNA, 1296 bp, Shigella sonnei
gtgcaatcacttactacggcgctggaaaatctactgcgccatttgtcgcaagagattccggcgacacccggcattcgggttatcgatattcctttccctctcaaagacgcttttgatgccttgagctggctggccagtcagcaaacatacccgcaattctactggcaacaacgtaatggtgatgaagaagctgccgtcctgggcgcgattacccgttttacgtcgttggaccaggcacaacgttttcttcgccagcacccggaacacgccgacttacgcatttgggggctgaatgcgtttgacccgtcgcagggcaatttacttttaccacgcctggaatggcgacgctgtggcggtaaagccacgctgcggctgacgctattcagcgaaagctcccttcagcacgatgcgattaaggcaagagaatttatcgccacactggtgagtatcaagcccttgcctgggttacatttaaccaccacgcgagaacaacactggccggacaaaacgggctggacgcaattaatcgaactggcaacgaaaaccatcgccgaaggtgagctcgacaaagtggtgctcgctcgggcaactgacctgcatttcgcaagtccggtcaacgcggcggcgatgatggctgccagtcgtcgactgaatctgaattgctaccatttttacatggcctttgatggcgaaaatgcttttcttggctcttcaccggaacggttatggcggcggcgtgacaaagcgctgcgtactgaagcgctggcgggaacggtagcaaatcatcctgatgataagcaggcgcagcagttaggtgagtggctgatggcggatgataaaaaccagcgcgagaatatgctggtggtggaagatatctgccaacggttacaggccgatacccagacgctggatgttttaccgccgcaggtactgcgtctgcgtaaagtgcagcatcttcgccgctgtatctggacttcactcaacaaagcggataatgtgatctgtttacatcagttgcagccaacggcagcagttgctggcttaccgcgcgatctggcgcgacagtttatcgcccgtcacgaaccgttcacccgagaatggtacgccggttctgcgggctatctctcattacagcaaagcgaattctgcgtttccctgcgctcagcaaaaattagcggcaatgtcgtgcgattatatgctggcgcgggcattgtccgtggttccgaccccgagcaagagtggcaggaaatcgacaacaaagcggcagggctgcgtactttattacagatggaatag

SEQ ID NO: 483317 - DNA, 306 bp, Shigella sonnei
atgtctaatcagtttggtgatacacgtatcgatgacgacctgacgctgcttagtgaaacactggaagaggtgctccgctcctctggcgatcccgccgatcagaaatatgttgagctgaaagcgcgtgcagaaaaagcgctggatgatgtgaaaaaacgggttagccaggcttcagacagttattactatcgggcgaagcaggcagtttatcgtgctgatgactacgtccacgaaaaaccctggcaaggaattggtgtgggcgcggccgttgggctggtactaggactgttgctggcacgccgttaa

SEQ ID NO: 483318 - DNA, 384 bp, Shigella sonnei
gtgtttgttgtcgagcagaattgcccttatcaggatatcgatggtgatgatttgacgggggataatcgccatattctcggttggaaaaatgatgaactggtggcatatgcgaggattctgaaaagtaatgatgatcttgagccggtcgttattggtcgggtgattgtcagtgaagcgttgcgtggcgaaaaagtggggcagcaactgatgagtaaaaccctcgacacctgcacgcatcactggcctgataagcctgtttacctcggggcgcaggcgcatctgcaaaacttctaccagagtttcggttttatccctgtgacggaggtctatgaagaagatggtatcccacacattgggatggcacgcgaggtaattcaggcgtaa

SEQ ID NO: 483319 - DNA, 918 bp, Shigella sonnei
atggaattaatttttttaggtacttcagccggtgtgccaacccgcacgcgcaatgtcacggcaatattgcttaacctgcaacatccgacccagagcggactttggttgtttgactgcggtgaaggcacccagcatcagctactgcataccgcctttaaccctgggaaactggacaagatttttatcagtcaccttcatggcgatcatctctttggtttacccggcttgctgtgcagtcgttctatgtcaggcattatccaacccttaacgatttatggtccgcaaggtatccgtgaatttgtggaaaccgcgctgcggattagcggctcatggaccgattatccgctggaaattgtcgaaattggcgctggcgaaattctcgatgatggcctgcgcaaagtgaccgcttatccgatggaacacccactggaatgttatggctatcgtattgaagaacatgataaaccgggtgcattaaatgcccaggcattaaaagctgctggcgtgccgcctggcccactgtttcaggaattaaaagcgggcaaaacaatcacgctggaagatggaaggcagattaacggcgcagattacttagctgctccagtgccaggtaaagcgctcgctattttcggcgataccggcccctgcgatgccgcacttgacctggctaaaggtgtcgatgtcatggtgcacgaagcgacgctggatataaccatggaagccaaagccaatagtcgcggccatagctctacacgccaggctgcgacactagcccgtgaggctggagtcggcaagctaatcattacccacgtcagctcgcgctatgatgacaaaggttgtcaacacctgttacgtgaatgcaggtcaattttcccggcgactgaactggcgaatgatttcaccgtgtttaacgtttaa

SEQ ID NO: 483320 - DNA, 543 bp, Shigella sonnei; identical to SEQ ID NO: 459165

SEQ ID NO: 483321 - DNA, 702 bp, Shigella sonnei
atgaaaacttgcataacaaagggaattgtgaccgtaagtttaacggcaatattactcagctgctcatccgcatgggcggcaggtaaaggcgggattggacttgcagcaacacgtcttgtttattcagaaggtgaagagcaaatttcactgggtgtacgtaacaccagtccggatgttccttatcttattcagtcatgggtgatgaccccagataataaaaaatcagcagattttattattacaccaccgctatttgtgctgaatccggctaatgagaatctgttacgcattatgtacattggtgcgccgttggcgaaagacagagaaacccttttcttcactagcgtacgggcagtcccttcaacaacgaagcgggaagagggaaataccctgaagattgccacacaaagcgtcatcaaacttttctggcgaccaaaaggtttagcgtatcccttaggcgaggctccggcgaaactgcgttgcacttcgtcagctgacatggttacggtcagtaacccaacaccttatttcattaccctgacagacctgaaaatagggggaaaggtagttaaaaatcaaatgatttccccctttgataaataccaattctctctgccaaagggggccaaaaatagcagcgtaacgtatcgaaccatcaatgattacggggcggaaacgccacaactcaactgtaaatcgtaa

SEQ ID NO: 483322 - DNA, 1152 bp, Shigella sonnei
atgtatagaactcatcgacaacacagcctgttaagctctggtggagtgccatcgtttattggtgggctggtggtgtttgtgtcggcagcgttcaatgcacaagctgaaacctggttcgatcctgcttttttcaaagatgatccctcaatggtggccgatttgtctcgtttcgaaaaaggacaaaaaataacgccaggggtttatcgtgtcgatattgttctgaatcagacaattgtagatacgcgcaacgtcaattttgttgagataacgccagagaaggggattgccgcctgtttgacgactgaaagcctggatgcaatgggtgttaatactgatgcgtttccggcttttaaacaactggacaaacaagcgtgtgtgccattggcggagattattccggatgccagcgtaacgtttaatgtgaataaactccgtctggaaatttcagtaccgcaaatcgccatcaaaagtaatgcccgtggttatgtcccccctgaacgttgggatgaagggatcaacgcgctattactgggatattcgtttagcggggctaacagtattcatagcagcgcagacagtgattctggcgacagctattttctgaatttaaacagtggcgttaatttaggcccatggagattgcgcaacaattcaacatggagtcgcagtagtggccaaaccgcagaatggaagaatctcagcagctatttgcagcgggcggttattccactaaaaggcgaactgaccgtaggtgatgattatactgcaggcgattttttcgatagtgtcagctttcgtggtgtgcagctggcgtcagatgacaacatgctgccagacagcctgaaagggtttgcgcctgtggtgcgtggtatcgccaaaagcaatgcccagataacgattaagcaaaatggttacaccatttaccaaacttatgtatcgcctggtgcttttgaaattagtgatctctattccacgtcgtcgagcggtgatttgttagttgaaatcaaagaagcggacggcagcgtcaatagctacagcgtaccgttttccagcgtgccattactccagcgtcaggggcgaatcaaatacgcggtgacactggcgaaatacagaaccaatagtaatgaacagcaggagagcaaatttgcctag

SEQ ID NO: 483323 - DNA, 663 bp, Shigella sonnei
ttgcagtggggcggaccgtggggaacgacatggtatggtggtggacaatatgctgaatattaccgtgccgccatgtttggtctgggatttaaccttggcgatttcggagcaatttcgttcgatgcgacccaggcgaagagtacgctggcagaccaaagcgaacataaaggtcagtcatatcgttttctgtatgccaaaacgctcaaccaattgggcactaattttcaattgatgggctatcgctattcgacgtcgggtttctacaccctttccgacaccatgtataaacatatggatggctacgaatttaatgacggtgatgatgaagatacgccgatgtggtcgcgttattacaatttgttttacaccaaacgtggcaaactgcaggtcaatatctcccagcaattaggcgagtacggttcgttttatttaagtggtagccagcaaacttactggcataccgatcaacaggatcggctattacagtttggctacaacacgcaaattaaagatctctcgctggggggttcctggaactacagtaagtcccgtggtcaacctgatgctgatcaggtgtttgcactaaatttttccctgccgctcaatctgttgctccccagaagtaatgatagctataccaggaaaaaaattacgcctggatga

SEQ ID NO: 483324 - DNA, 783 bp, Shigella sonnei
atgacctctaacaccagcatcgataacgaagggcacattacacaaaacctgggtttaacggagacactactcgatgacggtaacctgagctacagcgtgcaacagggatataacagcgaggggaaaacggctaatggtagcgccagcatggactacaaaggggcgtttgcagatgcccgagtgggctacaactacagcgataacggcagtcaacaacaactgaactacgctctttcaggcagtttagttgcccattcacagggcattaccctggggcaatcgctgggggaaactaacgtgctgattgcagcaccaggcgcagagaatactcgtgtggcgaacagcaccgggctgaaaactgactggcgcggatataccgttgtcccctatgccacttcttatcgggaaaatcgaatcgcacttgatgcggcatcgttaaaacgtaacgtggatcttgaaaatgcagtagtcaacgtggttcccaccaaaggggcgttggttctggcggagttcaatgcccatgcgggagcaagggtattaatgaaaacatcaaagcagggtataccgctgcgttttggcgcgatagcgacgctggacggcgtacagactaatagcggcattattgatgatgatggctcgctctatatgtccggtttgcccgctcagggagcgataactgtacgctggggcgaagctcccgatcaaatttgtcatatcagttaccagcttaccgaacaacaaattaactctgcgattacgcgaatggatgccatatgcagataa

SEQ ID NO: 483325 - DNA, 1071 bp, Shigella sonnei
atgcagataatctttggagaaaaatgcgtgttattactacgactattttttgccgccgtcttaatgctatggtgcgctcaaactgctgcttatagcgggcagtgtcataccactcaggggaatccgtatattggcgtcaattttggcgttaaaaccctggaggaagaagaaaatacggctggagtagttaaagacaaattttatcagtggaacgaatcgaatgattattatgtttcctgtgattgcgataaagacaatgtcagaagtggccgatgggcattcgccgcggattcaccgttagtctatttaggcgacaactggtacaaaattaatgactatcttgccgccaaagttttattgcaggttaaaggcagttctcctactgcggttcctttcgaaaacgtgggcacaggggcagatacacgatggcatatttgcgatcccggcggtcaacgtttaggtggccagggggctagcggtaatagcggtagcttttccctgaaaatattgcagccgttcgttggttcggtcgtcattcctcctatggcgctggcgcgattatttgaatgctacaacatacccgcaggtgattcctgcacgactacaggtacaccggttttagtgtattacctgtctggtacgatcaattcacttggctcatgttccgtcaatgccggagaaacaatcgaggtcgatctgggcgacgcatttgcggctaactttcgtgttgtagggcataagcctcttggggccagaacggcagaacttgcaattccagtcaggtgtaacacgggaaacgcggggttagttaacgtcaacctgagtctgacggcaaccacagaccccagctatccccaggcgattaagacgtcacgtcctggcgtgggcgtggtggtgaccgatagccagaacaacattatttcccctgctggtggaacattaccgctctctattcctgatgatgcagacagtatcgcgcgaatgaatgtctatccagtcagcacgacaggtgtaccaccagaaaccgggcgatttgaagccacggcaacggtgagaataaattttgattaa

SEQ ID NO: 483326 - DNA, 543 bp, Shigella sonnei
atgaagaaagaaacgatatttcagtgcgttatcttgttctttagcattcttaacatccatgtcgggatggctgggcctgaacaagttagtatgcatatttatgggaatgtggtcgatcagggctgtgatgtcgccaccaaaagtgcattacaaaatattcatattggtgattttaatatcagtgattttcaggccgcgaataccgtaagcactgctgctgatttgaatatcgatatcaccggttgtgccgctagtattactggcgcggacgtcctttttagcggcgaggctgacacccttacgccgacactgctcaaactaactgacacaggcggaagcggtggtatggcaacggggattgccgtgcaaattcttgatgcgcaaagtcagcaagaaatcccgctcaatcaggtccagcctcttacgcccttaaaagccggggataacacactcaaatatcaacttcgttataagtccacaaaggcgggagcaacgggcggtaatgcgacggcggttctctattttgatctggtttaccagtga

SEQ ID NO: 483327 - DNA, 564 bp, Shigella sonnei
atgcgacggcggttctctattttgatctggtttaccagtgaaggagtgatgttgaaacggataatctggattctgttcttactgggattaacggggggctgtgagctatttgcccatgatggcacggtcaacattagcggatcgtttcgccgtaatacatgcgtgctggcacaggatagcaagcaaatcaatgtgcagttaggcgatgtctcgctgacacgtttttttcatgggaattatggcccggagaaatctttcatcattaatttgcaggattgcggaacagatgtcagcacggttgacgtcaccttttcaggaacccccgacggagtgcagagcgaaatgctgtccattgaaagtggtacggatgcagccagcgggctggcaattgcgattctggatgatgcgaagatattgattccgcttaaccaggcgagtaaagactacagcctacatagcggtaaggtgccattaactttttatgcgcaattgcgacctgtcaatagcgatgtgcagtcgggtaaagtgaatgccagcgcgacatttgtacttcattatgactaa

SEQ ID NO: 483328 - DNA, 690 bp, Shigella sonnei
ttggcgctcttgattttcgccgttttatcgctgctggtggcgggtgaattgcgggcaggagtggtggtcggcggaacgcgatttatctttccggcagacagagaatcgatatctattttactgactaataccagtcaggaatcctggcttattaacagtaaaatcaaccgcccaacgcgttgggccgggggggaagcgtcgacagtgccagcaccattactggccgctccgccacttattctcctgaagcccggtactacaggcacgttgcgcttgctgagaacggaaagcgacatcttgcctgtggatcgcgaaacgctatttgagttaagcattgccagcgtgccatccggcaaagttgaaaatcagagcgtaaaagtggcgatgcgctcggtatttaaactgttctggcgacccgaaggtttgccgggcgagccgctggaagcttatcaacaattacgctggacacggaattcgcagggtgtacaactcactaacccaacgccttactacattaacctgattcaggtgagcgtaaatggtaaagcgttaagtaatgcgggagttgtgccgcctaaaagccagcgtcagacaagctggtgtcaggcaatcgcaccgtgtcatgtcgcctggcgggcgataaatgattacggcgggttgagtgcaaagaaggagcaaaatctgccctga

SEQ ID NO: 483329 - DNA, 1011 bp, Shigella sonnei; identical to SEQ ID NO: 459172

SEQ ID NO: 483330 - DNA, 543 bp, Shigella sonnei
atgcgaattaaaccagacgataactggcgttggtattacgatgaagagcacgatcgaatgatgctcgatttagccaatggtatgctatttcgctcacgttttgcgcgcaagatgttgactccagatgccttttctcccgcaggcttttgcgttgacgacgccgcgctctatttctcttttgaagaaaagtgccgcgattttaatttatctaaagaacaaaaagccgaactggtgctgaatgcactggtagcaattcgctatctcaaaccgcaaatgccgaaaagctggcattttgtttcccatggtgaaatgtgggtgcccatgccgggcgatgcggcctgcgtttggttgagcgatactcacgagcaggtcaatttgctggtcgttgaatctggcgaaaatgccgcactatgcctgctggcacaaccctgcgttgttattgcgggtcgcgcgatgcagttgggcgacgccattaaaatcatgaacgacaggctgaaaccgcaggttaatgttgacagcttcagcctcgaacaggcagtctaa

SEQ ID NO: 483331 - DNA, 1110 bp, Shigella sonnei
gtggcgacattaacccggctttttattcatcctgttaaatcgatgcgcggcattggtcttacacatgctctggctgatgtcagtggtctggccttcgatcgcatctttatgatcacggaacctgacggtacgtttattaccgctcgccagtttccccagatggtacggtttactccttcacctgtgcatgatggcttgcatctcaccgcaccagatggcagtagcgcatatgttcgttttgctgatttcgccacacaagacgcaccaaccgaagtttggggcacacattttaccgcgcgaattgcgccagacgcgatcaacaaatggctaagtggatttttctcccgcgaagtgcaattacgctgggtggggccacaaatgacccggcgcgtgaaacgccacaacactgtacctctgtcatttgctgatggctatccttaccttcttgctaacgaagcctcgttacgtgatctccaacaacgttgtccggccagtgtaaaaatggagcaattccgccccaatctggtggtttccggcgcgtcagcctgggaagaagatcgctggaaagtgattcgcattggtgatgtggtgtttgatgtggttaaaccttgtagccgctgtattttcaccaccgtcagcccagaaaaagggcaaaaacatccggcaggcgaaccattaaaaacattgcaatctttccgcactgcccaggataacggcgatgtcgattttggtcagaatttaattgcccgtaatagcggcgtgattcgcgttggcgatgaggtggaaattctggcaacggctccggcaaaaatttacggcgcagctgccgctgatgataccgccaacatcacgcaacaaccggacgcaaatgtagatattgactggcagggacaggcatttcgtggaaataaccaacaggtgttgctggagcaattagaaaatcagggaattcgtatcccttattcttgccgcgcgggcatttgtggaagttgccgtgttcagcttttagaaggcgaagtcatgccgctgaaaaaatcagcaatgggcgatgatggcaccattctttgctgtagctgtgtaccgaagactgcacttaagttggcgcgttag

SEQ ID NO: 483332 - DNA, 2109 bp, Shigella sonnei
atgaattctctgtttgccagtacggcccgtgggctggaagagctgttaaaaactgaactggaaaacctgggggccgttgaatgccaggtggttcagggtggggtccatttcaagggcgacacacggcttgtttaccagagcctgatgtggagccgcctggcctcgcgtattatgttgccgctgggcgagtgtaaggtttacagcgatttagacctctatctcggtgttcaggcgatcaactggacagagatgtttaatcctggcgcgaccttcgctgtccacttcagtggtttgaatgacaccatccgcaacagtcagtacggcgcgatgaaagtgaaagacgcgatcgtcgatgctttcacgcggaaaaatctgccgcgtccaaatgttgatcgcgatgcgccggatatccgcgttaacgtctggctgcataaagaaaccgccagtatcgctcttgatctgagtggtgatggtttacatctgcgtggctatcgcgatcgtgctggtattgcgccgatcaaagaaaccctggcagccgctattgtgatgcgaaccggctggcagccaggaacaccgctgctcgatccgatgtgtggttccggtacgttgctgattgaagcggcgatgctagcgaccgatcgcgcaccaggcttgcaccgtgggcgttggggctttagcggctgggtgcagcatgatgaagctatctggcaggaagtgaaagcggaagcgcaaactcgtgcccgtaaaggcctggctgagtatagctctcatttttacggttcggacagcgacgcacgggtgattcaacgtgcgcgcactaacgcccgtcttgcggggattggtgaactgatcacctttgaggtgaaagatgtcgcgcaactgaccaatccgctgccgaaagggccgtacggcacagtgttgagcaacccgccatacggggaacgtctggacagcgaaccggcgctgattgcgctgcatagcctgctgggtcggatcatgaaaaaccagtttggtggctggaatctctctttgtttagtgcctcgccggatctgctaagctgcttgcagctgcgtgcagacaaacagtacaaggcgaaaaacggcccgctggactgcgtacagaaaaattaccacgttgccgaaagcactccagacagcaaaccggcgatggtagcggaagactacgccaaccgcctgcgtaagaacctcaaaaaattcgagaagtgggctcgccaggaaggaattgaatgttaccgcctgtatgacgccgatctaccggaatataacgttgccgttgaccgttatgccgactgggtggtggtgcaggagtatgcgccgccaaaaactattgatgctcacaaagcgcgtcagcgtctgttcgatattatcgctgcaaccatttcggtactggggattgcgccaaacaaactggtgctgaaaacccgtgaacgccagaagggcaaaaaccagtaccagaaactgggcgagaagggcgagtttcttgaagttaccgaatataacgctcacttgtgggtgaacctgacggattatctcgatactggtctgttcctcgatcaccgtatcgcccgccgtatgctcggtcagatgagcaaaggcaaagatttcctcaacctgttctcttataccggtagcgccaccgtgcatgcgggattaggcggcgcgcgcagcaccaccaccgtggatatgtcgcgtacttatctggagtgggcagaacgcaacctgcgtctgaatggcctgaccgggcgtgcgcatcgcctgattcaggccgattgcctggcgtggctgcgtgaggcaaatgaacagtttgatctgatctttatcgatccgccaaccttctctaactcaaaacgaatggaagatgcgtttgatgttcagcgcgatcatatggcgctgatgaaagatttgaaacgtctgctgcgtgcaggtgggacgatcatgttctcgaacaacaaacgtggcttccgtatggatctcgacggcctggcaaaactgggactgaaagcacaagaaattacgcaaaaaacgctctcccaggatttcgcccgtaaccgccagatccacaactgctggctgattaccgcagcctga

SEQ ID NO: 483333 - DNA, 1908 bp, Shigella sonnei
atgtcattaatcagtatgcatggcgcatggctgtcgttcagcgacgcgccgcttctcgataacgcagaactgcatatcgaagataacgaacgtgtttgtctggtgggtcgcaacggcgcgggcaaatcgacgttaatgaaaatcctcaaccgtgaacaagggctggatgacggtcgcattatttacgagcaagatttgattgtagctcgtctgcaacaggagccgccgcgtaacgttgagggtagcgtttatgatttcgttgccgaaggcattgaagaacaagcggaatatctgaaacgctatcacgatatttcgcgcctggtgatgaacgacccgagcgagaaaaatctcaacgaactggcgaaggttcaggaacagttggatcaccacaacctgtggcagctggaaaaccgcatcaacgaagtgctggcgcaactggggttagatcctaatgttgcgctgtcgtcgctttccggcggctggttgcgtaaagcggcattaggacgcgcgctggtgagtaatccgcgcgtgctgttgcttgatgaaccgacaaaccacctggatattgaaaccatcgactggctggaagggttccttaaaaccttcaatgggacgattattttcatctcccacgaccgttcgtttatccgcaatatggcgacgcgcattgttgatctcgatcgcggcaagctggtgacctatccagggaattacgaccagtacctgcttgaaaaagaagaagccctgcgcgtggaagaactacaaaatgccgagttcgatcgcaaactggcgcaggaagaggtgtggatccgccaggggatcaaagcacgccgtacccgtaatgaaggccgcgtacgcgccctgaaagcaatgcgtcgcgagcgtggtgaacgtcgcgaagtgatgggtaccgcaaagatgcaggtggaagaggccagccgctccggtaagatcgttttcgaaatggaagacgtttgctaccaggttgacggtaagcaactggtgaaagatttttcggcccaggttctacgtggcgacaaaattgccctgattggtccgaatgggtgcggcaaaaccacgctgctgaaactgatgctcgatcagcttcaagcggacagcgggcgtattcacgttggcaccaaactggaagtggcttatttcgatcagcaccgcgcggaactggatcccgataaaacggtgatggataaccttgccgaaggtaagcaagaggtgatggttaacggcaagccacgccacgtattgggctatttgcaggactttctgttccatccgaaacgggcgatgacgccggtacgtgcgctttctggcggtgagcggaaccgcttgctgctggcgcgtttgttcctcaaaccaagcaacttattgattcttgacgaaccgaccaacgatcttgatgtcgaaacgctggaactgctggaagaactgatcgacagctatcagggcacggtattgctggttagccacgatcgtcagtttgtcgataacaccgttacagaatgttggatcttcgaaggcggcggtaaaattggtcgttatgtcggcggttatcatgatgcccgtggtcagcaagagcagtatgtggcgctcaaacagcctgcggtgaaaaaaaccgaagaagccgccgcggcaaaagcagaaactgtaaaacgcagcagtagcaaactaagctataaattgcagcgcgaactggagcagctaccgcaattgctcgaagatctggaggcgaagctggaagccctacagacgcaggtggcggatgcttccttcttcagtcagccacatgagcagacacaaaaagtgctcgccgatatggctgctgcagagcaggagctggagcaagcctttgaacgctgggagtatcttgaagcgttaaaaaatggtggctga

SEQ ID NO: 483334 - DNA, 1254 bp, Shigella sonnei
atgtgcgaacatcatcatgccgcgaagcacatcctgtgctcgcagtgtgacatgctggtggcgttaccgcgccttgagcatggtcagaaagcggcatgtccccggtgtggcacaacgttaaccgtggcgtgggatgcccctcggcagcgtccgaccgcctatgcgttggctgcactgttcatgctgttgctgtccaacttgtttccttttgtgaatatgaacgttgcaggagttaccagtgaaattacattactggaaattcccggcgtgcttttttctgaggactacgccagcctcggcacctttttcctgttgtttgtgcaactggttcccgcgttttgtctgataaccattctgttactggtgaatcgcgcggaattaccggtccgtttaaaagagcaactggcacgggtgctttttcaactcaaaacctggggaatggcggagattttcctcgctggtgtgctggtcagtttcgttaaactgatggcttacggcagcattggggtaggcagcagctttctcccctggtgtttattttgtgtcctgcaactgcgcgcttttcagtgcgttgatcgtcgctggttatgggacgacatcgccccgatgccagaactgcgccagccgctaaaaccaggcgtcacggggatacgtcaggggctgcgttcgtgctcctgttgtacggcaatccttcctgctgatgaacccgtgtgcccgcgttgtagtaccaaagggtacgttcggcgtagaaacagccagcagtggacactcgcgctgcttgtaacgtccatcatgctgtatcttccggctaatattttgcccatcatggtgacggatttattaggctcgaagatgccgtcgacgattctcgctggggtcattctgttatggagcgaaggctcttatcccgtcgctgcggtgatctttctggccagtattatggtgccaacgttaaagatgatcgccatcgcgtggctgtgttgggatgccaaagggcatggcaagcgcgacagtgaaagaatgcatttgatttatgaagttgttgagtttgtaggccgctggtcgatgattgacgttttcgttatcgcggtgctctcggcgctggtgcgtatgggaggtttaatgagtatttatccggcaatgggtgcattaatgtttgctttagtcgtcataatgacaatgttttctgctatgacgtttgacccgcgtttgtcgtgggatcgtcaacctgaatcagagcatgaggagtcctga

SEQ ID NO: 483335 - DNA, 1641 bp, Shigella sonnei
atggaatctaataatggggaagccaaaatccagaaagtgaagaactggtctcccgtgtggatatttcctatcgtcacggcgctcattggggcctgggttcttttttatcattacagccatcagggactggaagtgaccctgatcaccgcgaatgcggaaggaattgaaggtggcaaaaccaccattaaaagccgtagcgttgacgtcggcgtggttgaaagcgccacactggctgatgatttgacgcacgttgaaatcaaagtgcggctgaattctggtatggaaaaattgctgcataaagacaccgtcttttgggtggtgaaaccgcagattggtcgcgaagggattagcggcctgggaacgctgctgtctggagtttatatcgaactgcagccaggcgcgaaaggcagcaaaatggataaatacgatttgctggactcgccaccgttggccccgcctgatgcgaaaggtatccgtgtgattctcgatagcaaaaaagccgggcagctctcgccaggagatccggtgctgttccgtggctatcgggtaggttcggttgaaaccagcaccttcgatacgcaaaaacgcaatatcagttatcaactgttcatcaatgcaccttatgaccgactggtgaccagcaatgttcgcttctggaaagatagtggcattgcggttgatctgacgtcagcggggatgcgtgtggagatgggctcattgacaacgctgcttagtggcggtgttagctttgatgtgccggaaggtctggatttagggcagccagtggcaccgaaaacagctttcgttttgtatgatgatcagaagagcattcaggattcgttgtacaccgatcacattgattatctgatgttctttaaagattcggtacgcggtctgcaaccgggagctccggtagaattccggggtattcgcctgggtaccgtaagcaaagtgccattctttgcgccgaatatgcgtcagacatttaacgatgattaccgtattccggtactgattcgtatcgagccagagcggctgaaaatgcagcttggcgaaaatgcggatgttgttgagcaccttggcgaattgttgaaacgtggtttacgcggatcgctgaaaaccggaaacctggtcactggtgcactgtatgttgatcttgatttctatccaaatacgcctgcaataaccggtattcgtgaatttaatggttatcagattatcccgactgttagcggcggcctggcgcaaatccagcaacgactgatggaagcgttggataagatcaacaaactgccattgaatccgatgattgaacaggcaaccagtacgctttctgaaagtcagcgcacaatgaaaaacctgcaaacgacgctggatagcatgaacaagatcctcgccagccagtcgatgcagcagttgccgacggatatgcagtcaacgttgcgtgaattgaatcgcagcatgcagggcttccagcctggctccgcagcctacaacaagatggtggcggatatgcagcgccttgatcaggtgttgcgagaactgcaaccggtgctgaaaacgctcaatgagaagagtaacgcgctggtatttgaagcgaaggacaaaaaagatccagagccgaagagggcgaaacaatga

SEQ ID NO: 483336 - DNA, 564 bp, Shigella sonnei
atgaaaaagtggctagtgacgattgcagcactgtggctggccggatgcagctccggcgaaattaataaaaactattaccagttacctgtggtgcagagcggtacacaaagtaccgccagccagggcaatcgtctgttatgggtagagcaggtcactgttcctgactatctggcggggaatggtgtggtttatcaaaccagtgatgtgaagtatgtgattgccaacaacaacttgtgggccagcccgttggatcaacaattgcgcaacaccctggttgccaacctgagtacgcaactgcccggctgggtggttgcctcccagcctctgggaagcgcccaggacacgctcaatgttaccgtaacggagtttaacggtcgctatgatggcaaggtcattgtcagtggtgagtggctgttgaaccaccagggacaactgatcaaacgtccgttccgtctggaaggagtgcaaactcaggatggttacgatgagatggttaaagtactggccagtgtctggagtcaggaagccgcttctattgcgcaagagataaagcgtctaccttaa

SEQ ID NO: 483337 - DNA, 168 bp, Shigella sonnei; identical to SEQ ID NO: 907

SEQ ID NO: 483338 - DNA, 627 bp, Shigella sonnei
atggccattacgttggctgaactggtttattccgaactgatcggacttgttcagcgtacacgtgttagctatcctgcgtgcttcaataaaataaggcttacagagaacatggtagataaacgcgaatcctatacaaaagaagaccttcttgcctctggtcgcggtgaactgtttggcgctaaaggcccgcaattgccagcaccgaatatgctgatgatggaccgtgtggtcaaaatgaccgaaacgggtggtaacttcgacaaagggtatgttgaagcagaactggatatcaatccggatctgtggttcttcggatgccactttattggcgatccggttatgccgggatgcctgggcctggacgcaatgtggcagctggtagggttctacctcggctggctgggcggcgaaggtaaaggccgcgcactgggcgttggcgaagtgaaattcactggtcaggtactgccgacagcgaaaaaagtgacctaccgtattcactttaaacgcattgttaaccgtcgtctgattatgggcctggcggatggagaagtgctggttgatggtcgtttgatctataccgccagcgacctgaaagtcggtctgttccaggatacttctgccttctga

SEQ ID NO: 483339 - DNA, 1761 bp, Shigella sonnei
ttgaccattacgaaacttgcatggcgtgacctggttcctgataccgatagctatcaggaaatatttgctcagccacatttgattgacgaaaacgatcctttattcagtgatactcaaccgcggctgcaatttgcgctggagcagttgctgcatacgcgagcatcctcctcttttatgctggcgaaggccccggaagagtctgagtatctgaatcttattgccaatgccgcgcgtacgctacaaagcgatgcaggccaactggtgggcggtcactatgaggtttccggccactccatccgcttacgtcacgcagtgagtgcagatgataattttgcgactttaacgcaagttgtcgctgccgactgggtagaagcggagcaactctttggctgcctgcgccagtttaatggcgacattaccctgcagcctggtctggtgcatcaggcaaatggcggtattctcatcatctctttgcgtacactgctggcgcaacctctgctgtggatgcggctgaaaaatatcgttaaccgcgagcgttttgactgggttgcgtttgatgagtcgcgccctctccccgtctctgtgccttcgatgccattgaagctgaaagtcattctggtaggcgaacgcgaatcattggctgatttccaggagatggagccagagctttcagagcaggctatttatagcgaatttgaagatactctgcagattgtcgatgcggagtcagtaacccagtggtgtcgctgggtgacatttaccgccagacataatcacttacctgcaccgggagcggatgcctggccggtacttatccgcgaagcagcacgctacaccggtgaacaagaaacacttccgcttagcccgcagtggatcctccgccagtgtaaagaggtcgcctccctgtgtgatggcgacaccttctccggcgagcagctaaacttaatgctgcagcagcgtgaatggcgcgaaggtttcctcgctgaacgtatgcaggatgagatccttcaggagcaaatcctgattgaaaccgaaggcgaacgcatcgggcaaattaacgccctttcggtcattgaatttccgggtcatccacgcgcttttggcgaaccttctcgcattagctgcgttgtgcatattggcgatggtgaattcaccgacatcgaacgcaaagcggagcttggcggcaatatccatgcgaaagggatgatgatcatgcaagcgttcctgatgtcggaactacagcttgagcaacagatccccttctcagcatcgctgacatttgagcagtcatacagtgaagttgatggagatagtgcctcgatggctgaactctgcgccctgataagcgccctcgccgatgtgccggtgaatcagagtatcgctatcacaggttcagtcgatcagttcggtcgcgcccagccggtcggtggtttaaatgagaaaatcgaaggcttctttgctatttgccagcaacgtgagttaaccgggaaacaaggtgtcattatccccacagctaacgttcgccatttaagtcttcacagtgaactagtgaaagcggtagaagaaggcaaattcaccatctgggcagtagacgatgtgactgacgcactgccgttattattaaatctggtgtgggatggcgaaggccaaacgacgctgatgcaaaccatccaggaacgtatcgcgcaagcatcgcaacaggaaggacgtcaccgttttccatggccattacgttggctgaactggtttattccgaactga

SEQ ID NO: 483340 - DNA, 453 bp, Shigella sonnei
atgaaatatcaacaacttgaaaatcttgaaagcggttggaaatggaagtatctggtgaagaagcatcgcgaaggggagttaatcacccgttacatagaagccagtgccgcccaggaagccgtcgatgtgttgctctcgctggaaaatgaacccgtgctggtaaatggctggattgacaagcatatgaatccggaactggtcaatcgcatgaagcaaaccattcgggcaagacgaaagcgccattttaatgcggaacaccagcatacgcgcaaaaaatcgatcgatctggaatttattgtctggcaacgtctggctggtcttgcgcagcgtcgcggtaaaacgctttctgaaacgattgttcagctgattgaagatgcggaaaacaaagagaaatacgcgaataaaatgtcttctctgaagcaggatctgcaggcattgctgggtaaggaataa

SEQ ID NO: 483341 - DNA, 1041 bp, Shigella sonnei
atgaaaaagacagctatcgcgattgcagtggcactggctggtttcgctaccgtagcgcaggccgctccgaaagataacacctggtacactggtgctaaactgggctggtcccagtaccatgacactggtttcatcaacaacaatggcccgacccatgaaaaccaactgggcgctggtgcttttggtggttaccaggttaacccgtatgttggctttgaaatgggttacgactggttaggtcgtatgccgtacaaaggcagcgttgaaaacggtgcatacaaagctcagggcgttcaactgaccgctaaactgggttacccaatcactgacgacctggacatctacactcgtctgggtggtatggtatggcgtgcagacactaaatccaacgtttatggtaaaaaccacgacaccggcgtttctccggtcttcgctggcggtgttgagtacgcgatcactcctgaaatcgctacccgtctggaataccagtggaccaacaacatcggtgacgcacacaccatcggcactcgtccggacaacggcatgctgagcctgggggtttcctaccgtttcggtcagggcgaagcagctccagtagttgctccggctccagctccggcaccggaagtacagaccaagcacttcactctgaagtctgacgttctgttcaacttcaacaaagcaaccctgaaaccggaaggtcaggctgctctggatcagctgtacagccagctgagcaacctggatccgaaagacggttccgtagttgttctgggttacaccgaccgcatcggttctgacgcttacaaccagggtctgtccgagcgccgtgctcagtctgttgttgattacctgatctccaaaggtatcccggcagacaagatctccgcacgtggtatgggcgaatccaacccggttactggcaacacctgtgacaacgtgaaacagcgtgctgcactgatcgactgcctggctccggatcgtcgcgtagagatcgaagttaaaggtatcaaagacgttgtaactcagccgcaggcttaa

SEQ ID NO: 483342 - DNA, 510 bp, Shigella sonnei; identical to SEQ ID NO: 461071

SEQ ID NO: 483343 - DNA, 630 bp, Shigella sonnei
atgaaaagcctctcctataagcggatctataaatcacaagaatacctggcaacgttgggcacaattgaataccgatcattgtttggcagttacagcctgaccgttgacgacacggtgtttgcgatggtttctgatggtgagttgtatcttcgggcttgtgagcaaagtgcacagtactgtgtaaaacatccgcctgtctggctgacatataaaaagtgtggccgatccgttaccctcaattactatcgggttgatgaaagtctatggcgaaatcaactgaagctggtgcgtctgtcgaaatattctctcgatgcagcgctgaaagagaaaagcacgcgcaatacccgggaaagactgaaagatttgcccaatatgtcttttcatctggaagcgattctcggggaggtggggattaaggatgtacgggcgttacgtatacttggggcaaaaatgtgttggttgcgactgcggcagcaaaacagtctggtgacagaaaagattctgtttatgcttgaaggtgccattatcggcattcatgaagctgcgctcccggtggcacgccgccaggagcttgcagaatgggctgactctcttacgccgaaacaggagtttcctgcggaacttgagtaa

SEQ ID NO: 483344 - DNA, 2163 bp, Shigella sonnei
atggcctttatgctaagtcctttgctcaaacgctatacctggaacagcgcctggctgtattacgcgcgtatttttattgcgctttgtggaaccacagcgtttccgtggtggctgggtgatgtaaaactgacgattccgctaacgctggggatggtggcagcggcgctgaccgatctcgatgaccgactggcgggacgtttgcgtaacctcatcattacgctgttctgcttttttatcgcctcggcctcagtagaattgctgtttccctggccctggctatttgcgattggcttaacgctctctaccagcggcttcattttgctcggcggtctgggtcaacgctatgcaacaattgccttcggtgcattgctgatcgccatttacactatgttgggaacatcactgtatgagcactggtatcagcagccgatgtatctgctggccggtgccgtctggtacaacgtcctgacacttattggtcatctgctgttcccggtccgcccgctgcaggacaacctggcgcgttgctatgaacaactggcgcgttatcttgagctcaagtcgcgcatgtttgatcctgatattgaagatgaaagccaggcaccgctgtacgatttggctctcgccaacggtctgctgatggcgacattgaatcagacgaaactctcgctgctgacccgcttacgtggcgatcgtggtcaacggggaacgcgtcgcacgctgcattattactttgtcgcacaggatattcacgagcgtgccagctcttctcatattcagtatcaaacattgcgtgaacattttcgccacagcgacgtgctgttccgttttcagcggctgatgtcgatgcagggccaggcgtgccagcaactgtcacgctgtattttgttgcgtcagccttatcaacatgatccgcattttgagcgcgcttttacgcatattgatgctgcgctggagcggatgcgcgataacggcgcacccgccgatttactcaaaacactgggatttttgctgaacaatttacgcgccattgatgcccaactggcaacaattgaatcagaacaggcccaggcactaccccataataatgacgaaaatgagctcgctgatgacagcccgcacgggttgagtgatatctggctgcgtcttagccgtcacttcacgccggaatccgccctcttccgtcatgcggtaagaatgtcgctggtattgtgcttcggctacgccatcattcagataaccggaatgcatcacgggtattggatcttgctgacaagtttgtttgtctgccagccaaactataacgccacgcgccaccgcctgaagttaaggattattggtacgctggtaggtatcgccattggcattcctgtgctgtggtttgtgccatcactggaagggcagctggtgctgctggttattaccggcgtgctcttttttgccttccgtaacgtgcaatacgctcatgcaacgatgttcatcacacttttggtgctactgtgttttaacttactgggtgaaggttttgaagtagcgttacctcgcgtaatcgatacgctgattggttgtgccattgcgtgggcggcagtgagctacatctggcctgactggcagtttcgcaatctgccgcgcatgctcgaacgcgccacagaggccaactgtcggtatctcgatgccatactggagcaataccatcaggggcgtgataaccgtctggcgtatcgtattgcccgccgcgatgcacacaaccgtgatgctgagctggcgtcggtggtatcaaatatgtccagcgagccgaacgttaccccgcaaattcgcgaagccgcgtttcggttgctgtgccttaaccatacgtttaccagctatatctcagccctcggtgctcaccgggagcagttaactaatcctgaaattctggcgtttcttgatgacgcagtttgctatgttgatgacgcgttacatcatcaacctgctgatgaagaacgcgtcaatgaggcattagctagcctgaaacagcggatgcagcaacttgaaccacgggcagacagcaaagaacctctggtcgtacaacaagttggattattgattgcattactgcctgagattggtcgtctgcaacgccagattactcaagttccgcaggaaactcctgtttcggcgtaa

SEQ ID NO: 483345 - DNA, 447 bp, Shigella sonnei
atgcgtaccgttttgaacattctgaactttgtgcttggcggatttgccaccactctgggctggctgttggcgactctggtcagtattgtgctgatttttaccttaccgctgacacgatcctgctgggagatcactaaactatctctggtgccttatggcaatgaagctattcatgtcgatgaactgaacccggctggcaaaaatgtgctgctgaatactggcggtacggtattgaatattttctggctgattttctttggctggtggttatgcctgatgcacattgcaacgggcatcgcacaatgtatttcaatcattggcattcctgtcggcattgcgaactttaaaattgccgctattgcactatggccggttggtcgtcgcgtggtatcggtagaaacagcgcaagctgcgcgtgaagccaatgcacgtcgtcgttttgaataa

SEQ ID NO: 483346 - DNA, 2055 bp, Shigella sonnei
atggaactgaaagcgacaacgcttggaaaacgtctggcacagcacccttacgatcgggcggtgatcctcaatgccgggattaaagtctccggcgatcgccacgaataccttattcctttcaatcaattactggcgattcactgtaagcgcggtctggtatggggcgagctggaatttgtactgccggacgaaaaagtggtgcgtctgcacggcaccgaatggggcgagacgcagcgtttttaccatcatcttgatgctcactggcggcggtggagtggcgagatgagcgaaattgcgtctggtgttttacgccagcaactggatttgattgccacgcgcactggagaaaataaatggctgacgcgtgagcaaacctctggcgttcagcaacaaatccgccaggctttgtcggcgttgccgttgccggttaaccgactggaagaattcgataactgccgtgaggcgtggcgtaaatgtcaggcctggttgaaagatattgaaagcgctcggttgcagcataaccaggcgtataccgaagccatgcttaccgagtatgcggattttttccgccaggtcgagtcttcaccgctgaatccggcgcaggcccgggcagtcgttaatggcgagcattctctgttagtgctggcaggtgcaggaagcggaaaaacgtcggtgctggtggcccgtgcaggctggttgctggcgcgtggtgaagcgtcccctgagcaaattttattgctggcgtttggtcgcaaagccgctgaagagatggacgagcggattcgcgaacggctacataccgaagacattaccgcacgcacgtttcatgcgctggcgctgcatattattcagcagggcagcaaaaaagttccgatagtcagcaaactggaaaatgataccgctgcccgtcatgaactctttattgctgagtggcgcaagcaatgcagcgaaaagaaagcgcaggcgaagggctggcggcaatggctgacggaagaaatgcagtggtcagtgccagaaggtaacttctgggatgatgaaaaattacagcgtcgccttgcctctcgcctcgatcgctgggtaagtctgatgcggatgcacggtggtgcacaggcagaaatgattgccagtgcacccgaagagattcgcgatctgttcagtaaacgtatcaagttgatggccccgttattaaaagcctggaaaggtgcgctgaaggcagaaaacgctgtcgatttttcgggccttattcatcaggcgattgtgattctggagaaaggtcgctttatcagcccgtggaagcatattctggttgatgaatttcaggatatctcgccgcagcgggcagcgttgttagcggcattacgcaagcaaaacagtcagacgacgttgttcgctgttggtgatgactggcaggcgatttaccgattcagcggtgcgcaaatgtcgctcaccaccgctttccatgaaaactttggtgaaggcgaacgttgtgatttagacacgacttaccgttttaacagtcgtatcggtaaggtggcaaaccggtttattcagcagaacccaggccagctgaaaaagccgctaaacagcttaaccaatggagacaaaaaagccgtcacgttattggatgagagtcaacttgacgctttgctggataagctctctggttatgccaaaccggaagagcgcattctgatcctggcgcgttaccatcacatgaggcctgccagcctggaaaaagcggcaacacgctggccgaagttgcaaatcgactttatgaccattcatgccagcaaagggcaacaggcggattacgtcatcatcgttggcttgcaggagggaagtgatggttttccggctgcggcgcgggagtcgattatggaagaggcgctactgccaccggttgaggatttcccggacgctgaagaacggcggttaatgtacgtggcgctgacccgggcacgccatcgggtatgggcactgtttaacaaagagaatccctctccctttgtggaaatactgaaaaatctggatgtgccggtggcgagaaaaccgtaa

SEQ ID NO: 483347 - DNA, 459 bp, Shigella sonnei
atggaactgacgactcgcactttacctgcgcggaaacatattgcgctggtggcacacgatcactgcaaacaaatgctgatgagctgggtggaacggcatcaaccgttactggaacaacacgtactgtatgcaacaggcactaccggtaacttaatttcccgcgcgaccggcatgaacgtcaacgcgatgttgagtggcccaatggggggtgaccagcaggttggcgcattgatctcagaagggaaaattgatgtattgattttcttctgggatccactaaatgccgtgccgcacgatcctgacgtgaaagccttgctgcgtctggcgacggtatggaacattccggtcgccaccaacgtggcaacggcagacttcataatccagtcgccgcatttcaacgacgcggtcgatattctaatccccgattatcagcgttatctcgcggaccgtctgaagtaa

SEQ ID NO: 483348 - DNA, 663 bp, Shigella sonnei
atgaaaaccggcatcgtgaccaccttaattgcattatgtttgccggtatccgtttttgccaccacgctgcggctttcaaccgatgtcgatcttctggtactcgacggcaagaaggtttccagctctctgctgcgcggtgcggacagcattgaactggataatggaccgcatcagttagtgtttcgcgttgagaagacgattcatctttccaatagtgaagaacggctgtatatctccccaccgctggtggtcagttttaatacccagctcatcaaccaggtcaattttcgcctgcctcgcctggagaatgagcgggaagctaaccattttgatgccgcgccgcgccttgaattgttggatggcgatgcgacgccgattccggtaaagctggatattctcgccattacctcaacggcaaaaacgattgattatgaggtcgaggttgaacgctataacaaatccgcgaaacgcgcttcactaccgcaatttgccacgatgatggcagatgacagtacgctgctttcgggtgtttccgagctggatgctattccaccgcagtctcaggtgctcacagaacaacggctgaagtattggtttaaactggctgacccacaaacgcgaaatactttcctgcagtgggcggaaaaacaaccatcttcctga

SEQ ID NO: 483349 - DNA, 1590 bp, Shigella sonnei
atgcaacaacgtcgtccagtccgccgcgctctgctcagtgtttctgacaaagccggtatcgtcgaattcgcccaggcactttccgcacgcggtgtggagctgctgtctacagggggcactgcccgtctgttagcagaaaaaggtctgccggtaaccgaagtttccgattacaccggtttcccggagatgatggatggacgcgtgaagaccctgcatccgaaagtacatggtggcattctgggccgtcgcggccaggacgatgccattatggaagaacatcagatccagcctatcgatatggtggttgttaacctgtatccgttcgcccagactgttgctcgtgaaggctgctcgctggaagatgcggttgagaacatcgatatcggcggcccgaccatggtgcgctccgccgctaagaaccataaagatgtcgcaatcgtggtgaagagcagcgactacgacgccattattaaagagatggatgacaacgaaggatcgctgacgcttgcaacccgtttcgacctcgccatcaaagccttcgaacacactgccgcctacgacagcatgattgccaactacttcggcagcatggttccggcttaccacggtgaaagcaaagaagccgccggtcgcttcccacgcacgctgaacctgaacttcattaagaagcaggatatgcgttacggcgagaacagccaccagcaggctgccttctatatagaagagaatgtgaaagaagcctccgttgctaccgcaacccaggttcagggtaaagccctctcttataacaacatcgccgataccgatgcggcgctggagtgcgtgaaagagttcgccgagccggcatgtgtgattgtgaagcacgccaacccttgcggcgtggctatcggcaattccattcttgatgcttacgatcgcgcgtacaaaaccgacccaacctccgcattcggcggcatcattgcctttaaccgcgagctggatgcggaaaccgcacaggccatcatttctcgtcagtttgtcgaagtgattattgcgccttccgccagcgaagaagccctgaaaatcaccgccgccaagcagaacgtacgcgttctgacctgcggtcagtggggcgagcgtgttccgggtcttgatttcaaacgcgtgaacggcggtctgctggttcaggatcgtgacctgggcatggtcggtgcggaagaactgcgcgtcgtcacccaacgtcagccgaccgaacaggaactgcgtgatgcgctgttctgctggaaagtggcgaagttcgtgaaatccaacgctatcgtctatgccaaaaacaatatgaccatcgggattggcgcgggccagatgagccgcgtgtactccgcgaaaatcgccggtattaaagctgccgatgaaggcttggaagtgaaaggttcctcgatggcttctgacgcgttcttcccgttccgcgacggtattgatgccgccgccgctgcaggcgtgacctgcgtaatccagcctggcggttctatccgtgatgacgaagtgattgccgccgccgacgagcacggtattgcgatgctcttcaccgacatgcgccacttccgccattaa

SEQ ID NO: 483350 - DNA, 1290 bp, Shigella sonnei
atgaaagtattagtgattggtaacggcgggcgcgagcacgcgctggcctggaaagcggcgcagtcgccgctggttgaaactgtttttgttgctccgggtaatgcaggcactgcgctggaacccgcgctgcaaaacgttgctatcggcgtgaccgatatcccggcgctgttggatttcgcacaaaacgaaaagattgatctgaccatcgtcggcccggaagcgccgctggtgaaaggcgtggtcgataccttccgcgccgccgggatgaaaatcttcggcccaaccgcaggtgccgcgcaactggaaggttcgaaagcgtttaccaaagatttcctggcccgccataagatccctacagcggaataccagaacttcaccgaggtagaacctgcgctggcgtatctgcgtgagaaaggtgcgccgatcgtcattaaagcggacggtctggcagccgggaaaggcgttatcgtggcgatgacgctggaagaagccgaagcggctgttcacgatatgctggcgggcaacgcttttggcgacgcgggtcatcgcatcgttatcgaagagttcctcgacggcgaagaagcgagctttatcgtgatggtagacggcgagcatgtgctgccgatggccaccagccaggatcacaaacgcgtaggcgataaagataccggaccaaacacgggcgggatgggcgcttactcccccgcgccggtagtaaccgatgaagttcatcagcgcaccatggaacgtatcatctggccaaccgtgaaaggcatggcggcggaaggcaacacctacaccggttttctctacgcgggcctgatgatcgacaaacagggcaatccgaaggttatcgaatttaactgccgctttggcgatccagaaacccagccgattatgctgcgcatgaagtccgatctggttgagctctgcctggcggcctgtgaaggcaaactggacgagaaaacgtcagagtgggatgagcgtgcttctctcggcgtggtgatggctgcgggtggatatccgggcgattaccgcaccggcgatgtgatccacggcctgccgctggaagaagtggcaggcggcaaagtgttccacgcgggcacgaaactggcggataacgagcaggtagtgaccagcggcgggcgcgtactgtgcgtcaccgcgctgggtcataccgtggcagaagcgcagaaacgcgcttatgccttaatgaccgatattcactgggacgactgcttctgccggaaagatatcggctggcgcgctatcgaacgcgagcagaactaa

SEQ ID NO: 483351 - DNA, 1326 bp, Shigella sonnei
atgacgcacgataatatcgatattctggtggtggatgatgacattagccactgcactattttgcaggctttactgcgcggctggggctataacgtcgcgctggcgaacagcgggcgacaggcgctggagcaggtgcgggaacaggtttttgatcttgtgctttgcgatgtgcgaatggcggagatggacggcattgccacgctaaaagagatcaaagcgttaaatccggcgattccggtgctgattatgaccgcatactccagcgtcgagacggcggtagaagcgttgaaaaccggggcgctggattatctcatcaagccgctggatttcgataacctgcaggcgacgctggaaaaggcgctcgcgcatacgcacagtattgacgctgaaacgcctgcggtgtctgccagccagttcggtatggtcggtaaaagcccggcgatgcaacacctgctcagtgaaatcgccctcgtcgcgccatcggaagccacggtgctgatccacggcgattccggcaccggtaaagagctggtcgccagggcgattcacgccagtagcgcacgtagcgaaaaaccgctggtaacgctcaactgtgcggcactcaacgaatccttgctggaatctgaattgttcggtcacgaaaaaggggcgttcactggagccgatagacgccgggaagggcgctttgttgaggcggacggcggcacgctgtttctcgatgaaattggcgatatctcgccgatgatgcaggtgcgtctgctgcgtgcgattcaggagcgcgaagttcagcgtgtcggtagcaaccagactatctcggttgatgtccggttgattgcggcgacccatcgcgatcttgccgcagaggtgaatgccgggcgttttcgccaggatctctactatcgcctgaatgtggtggcgattgaagtaccatcgctgcggcaacggcgggaagatatccctctgctggctgtccattttcttcagcgctttgccgagcgtaatcgcaaggcggtaaaaggctttacgccacaggcgatggatttgctgatccactacgactggccgggaaatattcgtgaactggaaaacgcggtggaacgggcggtggtgctgctgaccggggaatatatttccgaacgcgagctgccgctggcgattgccggtacgccgatcccactggggcaaagtcaggatattcagccgctggtggaagtcgaaaaagaagtgattctggcggcactggagaaaacgggcggcaacaaaaccgaagccgcccgtcagttagggatcacgcgcaaaacgctattggcaaaactgtcgcgttag

SEQ ID NO: 483352 - DNA, 1377 bp, Shigella sonnei
atgcgttttatgcaacgttctaaagactccttagctaaatggttaagcgcgatcctccccgtggtcattgttgggctggtagggttgtttgcggtgacggtgattcgcgattatgggcgcgagactgccgccgccagacaaacgctgctggaaaaaggcagtgtacttattcgcgctcttgaatccggctcgcgcgtcggcatggggatgcgcatgcatcatgcgcagcagcaggccttactggaagaaatggccgggcagcctggagtacgttggtttgcggtcacggatgaacaaggaacaatcgtgatgcatagcaactccggcatggtgggaaaacagctttattccccgcaggaaatgcagcagttacatccgggagatgaagaagcgtggcggcggatcgatagcgcagacggcgagcctgttctggaaatttatcgccagtttcaaccgatgtttgctgctggaatgcaccggatgcgccatatgcagcagtatgccgcgacaccacaagcaattttcatcgctttcgacgccagtaatattgtgagtgccgaagatcgtgagcagagaaacaccctgattatcctcttcgccctggcgacggtcttgctggcaagcgtattgtcattcttctggtatcgccgctatttgcgctcgcgccagcttctacaagatgaaatgaagcgcaaagagaagctggtggcgctggggcatcttgcggcaggcgttgcccacgaaatccgtaacccactttcctcgattaaaggactggcgaaatactttgccgagcgcgcgcctgcagggggagaagcgcatcaactggcgcaggtgatggcgaaagaggccgaccgtttaaaccgcgtggtaagcgagctgctggaactggttaagccaacgcatctggctttgcaggcggtggatctcaacacgctgattaaccactcattacagctggtaagccaggatgcgaacagccgggagatccagttacgctttaccgccaacgacacattaccggaaattcaggccgatccggacaggctgactcaggtcctgttgaatctctatctcaatgctattcaggcgattggtcagcatggcgtgattagcgtgacggccagcgaaagcggcgcgggcgtgaaaatcagcgttaccgacagcggtaagggaattgcggcagatcagcttgatgccatcttcactccgtacttcaccactaaagccgaaggcaccggactggggctggcggtcgtgcataatattgttgaacaacacggtggtacaattcaggtcgcaagccaggagggaaaaggcgcaacgttcaccctctggcttccggtcactattacgcgtaagggcccacaaggatga

SEQ ID NO: 483353 - DNA, 129 bp, Shigella sonnei; identical to SEQ ID NO: 459475

SEQ ID NO: 483354 - DNA, 426 bp, Shigella sonnei; identical to SEQ ID NO: 459476

SEQ ID NO: 483355 - DNA, 636 bp, Shigella sonnei; identical to SEQ ID NO: 459477

SEQ ID NO: 483356 - DNA, 273 bp, Shigella sonnei
atgaacaagactcaactgattgatgtaattgcagagaaagcagaactgtccaaaactcaggctaaagctgctctggagtccactctggctgcaattactgagtctctgaaagaaggcgatgctgtacaactggttggtttcggtaccttcaaagtgaaccaccgcgctgagcgtactggccgcaacccgcagaccggtaaagaaatcaaaattgccgcagctaacgtaccggcatttgtttctggcaaggcactgaaagacgcagttaagtaa

SEQ ID NO: 483357 - DNA, 591 bp, Shigella sonnei
atgttacaaaacccaattcatctgcgtctggagcgcctggaaagctggcagcatgtcactttcatggcttgcttatgcgaacgcatgtaccccaattacgccatgttctgccagcaaaccggttttggtgatgggcaaatttaccgtcgtattctcgatctcatctgggaaacgctgaccgttaaagacgcaaaagtaaatttcgacagccaactggagaaatttgaagaagcgattccttcagccgacgatttcgatctgtacggcgtttatccggcaatcgatgcctgcgtggcgttaagtgaactggtccattcgcgtttgagtggtgaaacgctcgaacacgcggtggaagtgagtaagacctccatcacgaccgttgcgatgctggaaatgactcaggctggtcgcgaaatgagcgatgaagagcttaaagaaaacccagctgtagagcaagaatgggacattcagtgggaaatattccgacttttagctgagtgcgaagaacgcgatatcgagctgataaaaggccttagggcagacctgcgtgaggcgggtgagagcaatattggtataatttttcagcaataa

SEQ ID NO: 483358 - DNA, 672 bp, Shigella sonnei; identical to SEQ ID NO: 459480

SEQ ID NO: 483359 - DNA, 1065 bp, Shigella sonnei
atgaccgaacttaaaaacgatcgttatctgcgggcgctgctgcgccagcccgttgatgtcactccagtatggatgatgcgccaggcgggtcgctatctaccggaatataaagccacgcgcgcccaggcgggcgattttatgtcgctgtgcaaaaacgccgagctggcgtgcgaagtgactttgcaaccgctgcgtcgctacccgctggatgcggcgatcctcttttccgatatcctcaccgtgccggacgcgatggggttagggctctattttgaagccggagaaggtccgcgttttacctcgccagtcacctgcaaagccgacgtcgataaactgccaattccggacccggaagatgagctgggttacgtgatgaacgcggtgcgtaccattcgtcgcgaactgaaaggcgaagtgccgctgattggtttttccggcagcccgtggacgctggcgacctacatggtggaaggcggcagcagcaaagcgttcaccgtgatcaaaaaaatgatgtatgccgatccgcaggcgctgcacgctctactcgataaactggcgaaaagcgtcactttgtatctgaatgcgcagattaaagccggtgctcaggcagtgatgattttcgacacctggggcggtgtgcttaccgggcgcgattatcaacagttctcgctctattacatgcataaaattgttgatggtttactgcgtgaaaacgacggtcgccgcgtgccagtcacgctgtttaccaaaggcggcggacagtggctggaagcgatggcagaaaccggttgcgatgcgttgggcctcgactggacaacggatatcgccgatgcgcgccgccgtgtgggcaataaagtcgcgttgcagggtaatatggatccgtcgatgctgtacgcgccgcctgcccgcattgaagaagaagtagcgactatacttgcaggtttcggtcacggcgaaggtcatgtctttaaccttggtcacggcattcatcaggatgtgccgccagaacatgctggcgtgttcgtggaggcagtgcatcgactgtctgaacaatatcaccgctaa

SEQ ID NO: 483360 - DNA, 774 bp, Shigella sonnei
atggatcgtataattgaaaaattagatcacggctggtgggtcgtcagccatgaacaaaaattatggttgccgaagggagaattgccatatggcgaagcggcaaatttcgatcttgtgggtcagcgcgcactacaaatcggcgaatggcagggggaacctgtttggttagtacaacagcagcggcgtcacgatatggggtcggtacgtcaggtcattgatctcgatgttgggctgtttcaactggccggacgaggcgtacaactggcggagttttaccgatcgcataaatactgtggttactgcgggcatgaaatgtatccgagcaaaaccgaatgggcgatgctgtgcagccattgccgtgagcgttactacccgcaaatcgccccctgcattattgttgccatccgtcgcgatgattcgatcctcctcgcccagcatacccgccatcgtaacggtgtccatacagtacttgccggattcgtcgaagtgggcgaaaccctcgagcaggcagtcgcgcgggaagtgatggaagagagcggaattaaagttaaaaacttgcgttacgtgacttctcagccgtggccgtttcctcagtctttaatgaccgcgtttatggcggaatatgacagcggcgacatcgtgatcgacccgaaagaattgctcgaggcgaactggtatcgctatgacgatttgccgttactcccgccgcccggcaccgtagcgcgccgtctgatagaagatactgtggcgatgtgtcgggcagagtatgagtga

SEQ ID NO: 483361 - DNA, 477 bp, Shigella sonnei; identical to SEQ ID NO: 459483

SEQ ID NO: 483362 - DNA, 1896 bp, Shigella sonnei
atgtctgcaacaaaactgacccgccgcgaacaacgcgcccgggcccaacattttatcgacaccctggaaggcaccgcctttcccaactcaaaacgcatttatatcactggcacacaccccggcgtgcgcgtgccgatgcgtgagatccagcttagcccgacgctaattggcggtagcaaagaacagccgcagtacgaagaaaacgaagcgattccggtctacgacacctccggcccgtatggtgatccgcagatcgccattaacgtgcagcaagggctggcaaaactacgccagccgtggatcgatgcgcgcggcgataccgaagaacttaccgtgcgcagttccgattacaccagaacgcggctggcagatgatggtctcgacgagctacgttttagcggcttattaacgccaaaacgcgccaaaacaggacgccgtgtcacccaactgcactacgcccgccagggcatcatcacgccggaaatggaattcatcgccatccgcgagaatatgggccgcgagcgcatccgtagcgaggttttacgccaccagcatccgggaatgagctttggcgcacatctgccggaaaatatcactgcggaatttgtccgtgatgaagttgctgccggacgtgcgattatcccggccaacattaatcatccggaatcggagccgatgattattggtcgcaatttcctggtaaaagttaacgccaatatcggcaactcggcggtcacctcttccatcgaagaagaagtggaaaagctggtatggtccacgcgctggggagcggatacggtgatggatctctccaccggtcgctatattcacgaaacccgcgagtggattttgcgtaacagcccggtgccgatcggtacagtgccgatctaccaggcgctggagaaggttaacgggatcgccgaagatcttacctgggaagcgttccgcgacacgctgctggaacaggccgagcaaggtgtggattacttcactatccatgcgggcgtactgctgcgctatgtgccgatgaccgcgaaacgcctgaccggtatcgtctctcgcggcggttcgattatggcgaaatggtgcctctcccatcatcaggaaaatttcctctatcaacacttccgcgaaatttgtgaaatctgtgccgcttatgacgtttcgctgtcgctgggcgacggtctgcgccccggttctattcaggacgccaacgatgaagcgcagtttgccgagctgcatacgctgggcgaactgaccaaaattgcctgggaatatgacgtgcaggtgatgattgaaggcccaggccacgtgccgatgcagatgatccgccgcaatatgaccgaggagttagagcactgccacgaagcgccgttttacactctggggccgctaactaccgatattgcgccgggctatgaccacttcacgtcggggattggtgcggcgatgattggctggtttggctgcgcgatgctctgttacgtaacgccaaaagagcatctgggtctgcctaataaagaagatgttaagcaggggcttatcacctataagattgccgtccacgccgctgacctggcgaaagggcatccaggcgcgcaaattcgcgataacgccatgtcgaaagcccgcttcgaatttcgctgggaagaccagtttaatctggccctcgacccgtttaccgcccgcgcttatcacgatgaaaccctgccgcaagagtcaggtaaagtcgcccatttttgctccatgtgtgggccgaaattctgctcgatgaaaatcagccaggaagtacgtgattacgccgccgcgcaaaccattgaagtgggaatggcggatatgtcggagaacttccgcgccagaggcggagaaatctacctgcgtaaggaggaagcgtga

SEQ ID NO: 483363 - DNA, 636 bp, Shigella sonnei
atgtatcagcctgattttcctcctgtaccttttcgtttaggactgtacccggtggtggacagcgtacagtggatcgaacgtctgttggatgcaggcgtacgtaccctccagctacgcatcaaagatcggcgcaatgaagaggtggaagccgatgtcgtggcggcaattgcgctgggccgccgctataacgcgcgattgtttatcaacgattactggcggctggcgatcaagcatcaggcgtatggcgtccatttggggcaggaagatttgcaagccaccgatctcaatgccatccgcgcggcaggcctgcggctgggcgtttcgacacatgacgatatggaaatcgacgtcgcgctggcagcacgcccctcttatatcgcgctgggacatgtgttcccgacgcaaaccaaacagatgccttctgcaccgcaggggctggaacagctggcacggcatgttgagcgactggcggattatcccaccgtggcgattggcggtatcagtctggcgcgcgcgcctgcggtgatagcaacgggtgtcggcagtatcgccgtcgtcagcgccattactcaagccgcagactggcgtttggcaacggcacagttgctggaaattgcaggagttggcgatgaatga

SEQ ID NO: 483364 - DNA, 756 bp, Shigella sonnei
atgaatgaccgtgactttatgcgttatagccgccaaattctgctcgacgatatcgctctggacgggcagcaaaaactgctcgacagccaggtgctgattattggtcttggcgggctgggtacacctgctgcgctatacctggcgggggctggcgtcgggacgctggtactggcagatgacgacgatgtgcatttaagcaatctgcaacgacaaatcctctttaccactgaagatatcgatcgcccgaaatcgcaggtcagccatcagcgactgacacagttgaatcccgatattcaactgacagcattacaacaacggttaacgggtgaggcgttaaaagatgcggttgcacgggccgatgtggtgctcgactgtaccgacaatatggcgactcgccaggagattaatgccgcctgcgtggtactcaacacgccgcttatcaccgccagcgcggtcggatttggcggtcagttgatggtactgacgccgccctgggagcaggggtgttaccgctgcctgtggccagataaccaggagccagaacgcaactgccgcacggcgggcgtggttggcccggtggtcggggttatgggcactttgcaggcactggaagccattaagttattaagcggtatagagacacctgcgggagaactccgactgttcgacggtaaatcgagccagtggcgcagcctggcgttgcgccgcgccagtggttgcccggtatgcggaggaagcaatgcagatcctgtttaa

SEQ ID NO: 483365 - DNA, 201 bp, Shigella sonnei; identical to SEQ ID NO: 459488

SEQ ID NO: 483366 - DNA, 771 bp, Shigella sonnei; identical to SEQ ID NO: 459489

SEQ ID NO: 483367 - DNA, 1134 bp, Shigella sonnei
atgaaaaccttcagcgatcgctggcgacaactggactgggacgacatccgcctgcgtatcaacggcaaaacggctgctgacgtagaacgggcgctaaatgcctcgcaactcacccgcgacgatatgatggcgctgttatcgccagccgccagtggctatctggaaccactggcccaacgggcgcagcgtctgacccgtcagcgatttggcaacacagttagtttctacgtcccgctttatctttccaatctttgcgctaacgactgcacgtactgcggattttccatgagtaatcgcatcaagcgcaaaacgctggatgaagcggatattgccagggaaagcgccgctatacgggagatgggctttgaacatctgctattagtcactggtgaacatcaggcgaaagtggggatggattactttcgtcgtcatctccccgccctgcgtgaacagttctcttcactacaaatggaagtgcaaccgctggcggagacggaatacgccgagttaaagcaacttggtctggatggggtgatggtttatcaggagacatatcacgaggcgacttatacccgccatcatttgaaaggcaaaaaacaggacttcttctggcggctggaaacgccggatcggctggggcgtgcggggattgataagataggcctcggcgcgctaattggcctttccgacaactggcgcgttgactgctatatggttgccgaacatttgctatggctgcaacagcattactggcaaagccgttactctgtctcctttccgcgcctgcgcccgtgtactggcggcattgagcctgcgtcgattatggatgaacgccagttagtgcaaaccatctgcgccttccgactgcttgcaccggagattgaactgtcactctccacgcgggaatcaccgtggtttcgcgatcgcgttattccgctggcgatcaataacgtcagcgccttctcgaaaacgcagccaggtggctatgccgataatcaccccgagttggaacagttctcaccgcacgacgatcgcagaccggaagcggttgctgccgcgttaaccgctcagggtttgcagccggtatggaaagactgggacagctatctgggacgcgcctcgcaaagactatga

SEQ ID NO: 483368 - DNA, 4224 bp, Shigella sonnei
gtgaaagatttattaaagtttctgaaagcgcagactaaaaccgaagagtttgatgcgatcaaaattgctctggcttcgccagacatgatccgttcatggtctttcggtgaagttaaaaagccggaaaccatcaactaccgtacgttcaaaccagaacgtgacggccttttctgcgcccgtatctttgggccggtaaaagattacgagtgcctgtgcggtaagtacaagcgcctgaaacaccgtggcgtcatctgtgagaagtgcggcgttgaagtgacccagactaaagtacgccgtgagcgtatgggccacatcgaactggcttccccgactgcgcacatctggttcctgaaatcgctgccgtcccgtatcggtctgctgctcgatatgccgctgcgcgatatcgaacgcgtactgtactttgaatcctatgtggttatcgaaggcggtatgaccaacctggaacgtcagcagatcctgactgaagagcagtatctggacgcgctggaagagttcggtgacgaattcgacgcgaagatgggtgcggaagcaatccaggctctgctgaagagcatggatctggagcaagagtgcgaacagctgcgtgaagagctgaacgaaaccaactccgaaaccaagcgtaaaaagctgaccaagcgtatcaaactgctggaagcgttcgttcagtctggtaacaaaccagagtggatgatcctgaccgttctgccggtactgccgccagatctgcgtccactggttccgctggatggtggtcgtttcgcgacttctgacctgaacgatctgtatcgtcgcgtcattaaccgtaacaaccgtctgaaacgtctgctggatctggctgcgccggacatcatcgtacgtaacgaaaaacgtatgctgcaggaagcggtagacgccctgctggataacggtcgtcgcggtcgtgcgatcaccggttctaacaagcgtcctctgaaatctttggccgacatgatcaaaggtaaacagggtcgtttccgtcagaacctgctcggtaagcgtgttgactactccggtcgttctgtaatcaccgtaggtccatacctgcgtctgcatcagtgcggtctgccgaagaaaatggcgctggagctgttcaaaccgttcatctacggcaagctggaactgcgtggtcttgctaccaccattaaagctgcgaagaaaatggttgagcgcgaagaagctgtcgtttgggatatcctggacgaagttatccgcgaacacccggtactgctgaaccgtgcaccgactctgcaccgtctgggtatccaggcatttgaaccggtactgatcgaaggtaaagctatccagctgcacccgctggtttgtgcggcatataacgccgacttcgatggtgaccagatggctgttcacgtaccgctgacgctggaagcccagctggaagcgcgtgcgctgatgatgtctaccaacaacatcctgtccccggcgaacggcgaaccaatcatcgttccgtctcaggacgttgttctgggtctgtactatatgacccgtgactgtgttaacgccaaaggcgaaggcatggtgctgactggcccgaaagaagcagaacgtctgtatcgctctggtctggcttctctgcatgcgcgcgttaaagtgcgtatcaccgagtatgaaaaagatgcaaacggtgaattagtagcgaaaaccagcctgaaagacacgactgttggccgtgccattctgtggatgattgtaccgaaaggtctgccttactccatcgtcaaccaggcgctgggtaaaaaagcaatctccaaaatgctgaacacctgctaccgcattctcggtctgaaaccgaccgttatttttgcggaccagatcatgtacaccggcttcgcctatgcagcgcgttctggtgcatctgttggtatcgatgacatggtcatcccggagaagaaacacgaaatcatctccgaggcagaagcagaagttgctgaaattcaggagcagttccagtctggtctggtaactgcgggcgaacgctacaacaaagttatcgatatctgggctgcggcgaacgatcgtgtatccaaagcgatgatggataacctgcaaactgaaaccgtgattaaccgtgacggtcaggaagagaagcaggtttccttcaacagcatctacatgatggccgactccggtgcgcgtggttctgcggcacagattcgtcagcttgctggtatgcgtggtctgatggcgaagccggatggctccatcatcgaaacgccaatcaccgcgaacttccgtgaaggtctgaacgtactccagtacttcatctccacccacggtgctcgtaaaggtctggcggataccgcactgaaaactgcgaactccggttacctgactcgtcgtctggttgacgtggcgcaggacctggtggttaccgaagacgattgtggtacccatgaaggtatcatgatgactccggttatcgagggtggtgacgttaaagagccgctgcgcgatcgcgtactgggtcgtgtaactgctgaagacgttctgaagccgggtactgctgatatcctcgttccgcgcaacacgctgctgcacgaacagtggtgtgacctgctggaagagaactctgtcgacgcggtaaaagtacgttctgttgtatcttgtgacaccgactttggtgtatgtgcgcactgctacggtcgtgacctggcgcgtggccacatcatcaacaaaggtgaagcaatcggtgttatcgcggcacagtccatcggtgaaccgggtacacagctgaccatgcgtacgttccacatcggtggtgcggcatctcgtgcggctgctgaatccagcatccaggtgaaaaacaaaggtagcatcaagctcagcaacgtgaagtcggttgtgaactccagcggtaaactggttatcacttcccgtaacaccgaactgaaactgatcgacgaattcggtcgtaccaaagaaagctacaaagtgccttacggtgcggtactggcgaaaggcgatggcgaacaggttgctggcggcgaaaccgttgcaaactgggacccgcacaccatgccggttatcaccgaagtaagcggttttgtacgctttactgacatgatcgacggccagaccattactcgtcagaccgacgaactgaccggtctgtcttcgctggtggttctggattccgcagaacgtaccgcaggtggtaaagatctgcgtccggcactgaaaatcgttgatgctcagggtaacgacgttctgatcccaggtaccgatatgcctgcgcagtacttcctgccgggtaaagcgattgttcagctggaagatggcgtacagatcagctctggtgacaccctggcgcgtattccgcaggaatccggcggtaccaaggacatcaccggtggtctgccgcgcgttgcggacctgttcgaagctcgtcgtccgaaagagccggcaatcctggctgaaatcagcggtatcgtttccttcggtaaagaaaccaaaggtaaacgtcgtctggttatcaccccggtagacggtagcgatccgtacgaagagatgattccgaaatggcgtcagctcaacgtgttcgaaggtgaacgtgtagaacgtggtgacgtaatttccgacggtccggaagcgccgcacgacattctgcgtctgcgtggtgttcatgctgtgactcgttacatcgttaacgaagtacaggacgtataccgtctgcagggcgttaagattaacgataaacacatcgaagttatcgttcgtcagatgctgcgtaaagctaccatcgttaacgcgggcagctccgacttcctggaaggcgaacaggttgaatactctcgcgtcaagatcgcaaaccgcgaactggaagcgaacggcaaagtgggtgcaacttactcccgcgatctgctgggtatcaccaaagcgtctctggcaaccgagtccttcatctccgcggcatcgttccaggagaccactcgcgtgctgaccgaagcagccgttgcgggcaaacgcgacgaactgcgcggcctgaaagagaacgttatcgtgggtcgtctgatcccggcaggtaccggttacgcgtaccaccaggatcgtatgcgtcgccgtgctgcgggtgaagctccggctgcaccgcaggtgactgcagaagacgcatctgccagcctggcagaactgctgaacgcaggtctgggcggttctgataacgagtaa

SEQ ID NO: 483369 - DNA, 4029 bp, Shigella sonnei
atggtttactcctataccgagaaaaaacgtattcgtaaggattttggtaaacgtccacaagttctggatgtaccttatctcctttctatccagcttgactcgtttcagaaatttatcgagcaagatcctgaagggcagtatggtctggaagctgctttccgttccgtattcccgattcagagctacagcggtaattccgagctgcaatacgtcagctaccgccttggcgaaccggtgtttgacgtccaggaatgtcaaatccgtggcgtgacctattccgcaccgctgcgcgttaaactgcgtctggtgatctatgagcgcgaagcgccggaaggcaccgtaaaagacattaaagaacaagaagtctacatgggcgaaattccgctcatgacagacaacggtacctttgttatcaacggtactgagcgtgttatcgtttcccagctgcaccgtagtccgggcgtcttctttgactccgacaaaggtaaaacccactcttcgggtaaagtgctgtataacgcgcgcatcatcccttaccgtggttcctggctggacttcgaattcgatccgaaggacaacctgttcgtacgtatcgaccgtcgccgtaaactgcctgcgaccatcattctgcgcgccctgaactacaccacagagcagatcctcgacctgttctttgaaaaagttatctttgaaatccgtgataacaagctgcagatggagctggtgccggaacgcctgcgtggtgaaactgcatctttcgacatcgaagctaacggtaaagtgtacgtagaaaaaggccgccgtatcactgcgcgccacattcgccagctggaaaaagacgacgtcaaactgatcgaagtcccggttgagtacatcgcaggtaaagtggttgctaaagactatattgatgagtctaccggcgagctgatctgcgcagcgaacatggagctgagcctggatctgttggctaagctgagccagtctggtcacaagcgtattgaaacgctgttcaccaacgacctggatcacggcccgtatatctctgaaaccttacgtgtcgacccaactaacgaccgtctgagcgcactggtagaaatctaccgcatgatgcgccctggcgagccgccgactcgtgaagcagctgaaagcctgttcgagaacctgttcttctccgaagaccgttatgacctgtctgcggttggtcgtatgaagttcaaccgttctctgctgcgcgaagaaatcgaaggttccggtatcctgagcaaagacgacatcattgatgttatgaaaaagctcatcgatatccgtaacggtaaaggcgaagtcgatgatatcgaccacctcggcaaccgtcgtatccgttctgttggcgaaatggcggaaaaccagttccgcgttggcctggtacgtgtagagcgtgcggtgaaagagcgtctgtctctgggcgatctggataccctgatgcctcaggacatgatcaacgccaagccgatttccgcagcagtgaaagagttcttcggttccagccagctgtctcagtttatggaccagaacaacccgctgtctgagattacgcacaaacgtcgtatctccgcactcggcccgggtggtctgacccgtgaacgtgcaggcttcgaagttcgagacgtacacccgactcattacggtcgcgtatgtccaatcgaaacccctgaaggtccgaacatcggtctgatcaactctttgtccgtgtacgcacagactaacgaatacggcttccttgagactccgtatcgtaaggtgaccgacggtgttgtaactgacgaaattcactacctttctgctatcgaagaaggcaactacgttatcgcccaggcgaactccaacctggatgaagaaggccacttcgtagaagacctggtaacttgccgtagcaaaggcgaatccagcttgttcagccgtgaccaggttgactacatggacgtatccacccagcaggtggtatccgtcggtgcgtccctgatcccgttcctggaacacgatgacgccaaccgtgcattgatgggtgcgaacatgcaacgtcaggccgttccgactctgcgcgctgataagccgctggttggtactggtatggaacgtgctgttgccgttgactccggtgtaactgcggtagctaaacgtggtggtgtcgttcagtacgtggatgcttcccgtatcgttatcaaagttaacgaagacgagatgtatccgggtgaagcaggtatcgacatctacaacctgaccaaatacacccgttctaaccagaacacctgtatcaaccagatgccgtgtgtgtctctgggtgaaccggttgaacgtggcgacgtgctggcagacggtccgtccaccgacctcggtgaactggcgcttggtcagaacatgcgcgtagcgttcatgccgtggaatggttacaacttcgaagactccatcctcgtatccgagcgtgttgttcaggaagaccgtttcaccaccatccacattcaggaactggcgtgtgtgtcccgtgacaccaagctggggccggaagagatcaccgctgacatcccgaacgtgggtgaagctgcgctctccaaactggatgaatccggtatcgtttacattggtgcggaagtgaccggtggcgacattctggttggtaaggtaacgccgaaaggtgaaactcagctgaccccagaagaaaaactgctgcgtgcgatcttcggtgagaaagcctctgacgttaaagactcttctctgcgcgtaccaaacggtgtatccggtacggttatcgacgttcaggtctttactcgcgatggcgtagaaaaagacaaacgtgcgctggaaatcgaagaaatgcagctcaaacaggcgaagaaagacctgtctgaagaactgcagatcctcgaagcgggtttgttcagccgtatccgtgctgtgctggtagccggtggcgttgaagctgagaagctcgacaaactgccgcgcgatcgctggctggagctgggcctgaccgacgaagagaaacaaaatcagctggaacagctggctgagcagtatgacgaactgaaacacgagttcgagaagaaactcgaagcgaaacgccgcaaaatcacccagggcgacgatctggcaccgggcgtgctgaagattgttaaggtgtatctggcggttaaacgccgtatccagcctggtgacaagatggcaggtcgtcacggtaacaagggtgtaatttctaagatcaacccgatcgaagatatgccttacgatgaaaacggtacgccggtagacatcgtactgaacccgctgggcgtaccgtctcgtatgaacatcggtcagatcctcgaaacccacctgggtatggctgcgaaaggtatcggcgacaagatcaacgccatgctgaaacagcagcaagaagtcgcgaaactgcgcgaattcatccagcgtgcgtacgatctgggcgctgacgttcgtcagaaagttgacctgagtaccttcagcgatgaagaagttatgcgtctggctgaaaacctgcgcaaaggtatgccaatcgcaacgccggtgttcgacggtgcgaaagaagcagaaattaaagagctgctgaaacttggcgacctgccgacttccggtcagatccgcctgtacgatggtcgcactggtgaacagttcgagcgtccggtaaccgttggttacatgtacatgctgaaactgaaccacctggtcgacgacaagatgcacgcgcgttccaccggttcttacagcctggttactcagcagccgctgggtggtaaggcacagttcggtggtcagcgtttcggggagatggaagtgtgggcgctggaagcatacggcgcagcatacaccctgcaggaaatgctcaccgttaagtctgatgacgtgaacggtcgtaccaagatgtataaaaacatcgtggacggcaaccatcagatggagccgggcatgccagaatccttcaacgtattgttgaaagagattcgttcgctgggtatcaacatcgaactggaagacgagtaa

SEQ ID NO: 483370 - DNA, 366 bp, Shigella sonnei
atgtctatcactaaagatcaaatcattgaagcagttgcagctatgtctgtaatggacgttgtagaactgatctctgcaatggaagaaaaattcggtgtttccgctgctgctgctgtagctgtagctgctggcccggttgaagctgctgaagaaaaaactgaattcgacgtaattctgaaagctgctggcgctaacaaagttgctgttatcaaagcagtacgtggcgcaactggcctgggtctgaaagaagctaaagacctggtagaatctgcaccggctgctctgaaagaaggcgtgagcaaagacgacgcagaagcactgaaaaaatccctggaagaagctggcgctgaagttgaagttaaataa

SEQ ID NO: 483371 - DNA, 498 bp, Shigella sonnei
atggctttaaatcttcaagacaaacaagcgattgttgctgaagtcagcgaagtagccaaaggcgcgctgtctgcagtagttgcggattcccgtggcgtaactgtagataaaatgactgaactgcgtaaagcaggtcgcgaagctggcgtatacatgcgtgttgttcgtaacaccctgctgcgccgtgctgttgaaggtactccgttcgagtgcctgaaagacgcgtttgttggtccgaccctgattgcatactctatggaacacccgggcgctgctgctcgtctgttcaaagagttcgcgaaagcgaatgcaaaatttgaggtcaaagccgctgcctttgaaggtgagctgatcccggcgtctcagatcgaccgcctggcaactctgccgacctacgaagaagcaattgcacgcctgatggcaaccatgaaagaagcttcggctggtaaactggttcgtactctggctgctgtacgcgatgcgaaagaagctgcttaa

SEQ ID NO: 483372 - DNA, 705 bp, Shigella sonnei
atggctaaactgaccaagcgcatgcgtgttatccgcgagaaagttgatgcaaccaaacagtacgacatcaacgaagctatcgcactgctgaaagagctggcgactgctaaattcgtagaaagcgtggacgtagctgttaacctcggcatcgacgctcgtaaatctgaccagaacgtacgtggtgcaactgtactgccgcacggtactggccgttccgttcgcgtagccgtatttacccaaggtgcaaacgctgaagctgctaaagctgcaggcgcagaactggtaggtatggaagatctggctgaccagatcaagaaaggcgaaatgaactttgacgttgttattgcttctccggatgcaatgcgcgttgttggccagctgggccaggttctgggtccgcgcggcctgatgccaaacccgaaagtgggtactgtaacgccgaacgttgctgaagcggttaaaaacgctaaagctggccaggttcgttaccgtaacgacaaaaacggcatcatccacaccaccatcggtaaagtggactttgacgctgacaaactgaaagaaaacctggaagctctgctggttgcgctgaaaaaagcaaaaccgactcaggcgaaaggcgtgtacatcaagaaagttagcatctccaccaccatgggtgcaggtgttgcagttgaccaggctggcctgagcgcttctgtaaactaa

SEQ ID NO: 483373 - DNA, 429 bp, Shigella sonnei
atggctaagaaagtacaagcctatgtcaagctgcaggttgcagctggtatggctaacccgagtccgccagtaggtccggctctgggtcagcagggcgtaaacatcatggaattctgcaaagcgttcaacgcaaaaactgattccatcgaaaaaggtctgccgattccggtagtaatcaccgtttacgctgaccgttctttcactttcgttaccaagactccgccggcagcagttctgctgaaaaaagcggctggtatcaagtctggttccggtaagccgaacaaagacaaagtgggtaaaatttcccgcgctcagctgcaggaaatcgcgcagaccaaagctgccgacatgactggtgccgacattgaagcgatgactcgctccatcgaaggtactgcacgttccatgggcctggtagtggaggactaa

SEQ ID NO: 483374 - DNA, 546 bp, Shigella sonnei
atgtctgaagctcctaaaaagcgctggtacgtcgttcaggcgttttccggttttgaaggccgcgtagcaacgtcgctacgtgagcatatcaaattacacaacatggaagatttgtttggtgaagtcatggtaccaaccgaagaagtggttgaaatccgtggcggtcagcgtcgcaaaagcgaacgtaaattcttccctggctacgtcctcgttcagatggtgatgaacgacgcgagctggcacctggtgcgcagcgtaccgcgtgtgatgggcttcatcggcggtacttccgatcgtcctgcgccaatcagcgataaagaagtcgatgcgattatgaaccgcctgcagcaggttggtgataagccgcgtccgaaaacgctgtttgaaccgggtgaaatggtccgtgttaatgatggtccgttcgctgacttcaacggtgttgttgaagaagtggattacgagaaatctcgtctgaaagtgtctgtttctatcttcggtcgtgcgaccccggtagagctggacttcagccaggttgaaaaagcctaa

SEQ ID NO: 483375 - DNA, 384 bp, Shigella sonnei
atgagtgcgaataccgaagctcaaggaagcgggcgcggcctggaagcgatgaagtgggtcgttgtggtggcattgctcctggtggcgattgtcggcaactacctttatcgcgacattatgctgccgctgcgtgcgctggccgtagtaattctgattgctgcagcgggtggtgtcgcgctgttaacgacaaaaggtaaagctaccgttgcttttgcccgtgaagcgcgtaccgaagtccgtaaggtcatttggccgactcgccaggaaacattgcacaccacgctgattgtggctgcggttaccgcagtaatgtcactgatcctgtggggactggatggtattctggttcgcctggtatcctttatcactggcctgaggttctga

SEQ ID NO: 483376 - DNA, 960 bp, Shigella sonnei
atgagtctgaatttccttgattttgaacagccgattgcagagctggaagcgaaaatcgattctctgactgcggttagccgtcaggatgagaaactggatattaacatcgatgaagaagtgcatcgtctgcgtgaaaaaagcgtagaactgacacgtaaaatcttcgccgatctcggtgcatggcagattgcgcaactggcacgccatccacagcgtccttataccctggattacgttcgcctggcatttgatgaatttgacgaactggctggcgaccgcgcgtatgcagacgataaagctatcgtcggtggtatcgcccgtcttgacggtcgtccggtgatgatcattggtcatcaaaaaggtcgtgaaaccaaagaaaaaattcgccgtaactttggtatgccagcgccagaaggttaccgcaaagcactgcgtctgatgcaaatggctgaacgctttaagatgcctatcatcacctttatcgacaccccgggggcttatcctggcgtgggcgcagaagagcgtggtcagtctgaagccattgcacgcaacctgcgtgaaatgtctcgcctcggcgtaccggtagtttgtacggttatcggtgaaggtggttctggcggtgcgctggcgattggcgtgggcgataaagtgaatatgctgcaatacagcacctattccgttatctcgccggaaggttgtgcgtccattctgtggaagagcgccgacaaagcgccgctggcggctgaagcgatgggtatcatcgctccgcgtctgaaagagctgaaactgatcgactccatcatcccggaaccgctgggcggcgctcaccgtaacccggaagcgatggcggtatcgttgaaagcgcaactgctggcggatctggccgatctcgatgtgttaagcactgaagatttaaaaaatcgtcgttatcagcgcctgatgagctacggttacgcgtaa

SEQ ID NO: 483377 - DNA, 3483 bp, Shigella sonnei
atgtctgaaccacgtttcgtacacctgcgggtgcacagcgactactcgatgatcgatggcctggccaaaaccgcaccgttggtaaaaaaggcggcggcgttgggtatgccagcactggcgatcaccgatttcaccaacctttgtggtctggtgaagttctacggagcgggacatggcgcagggattaagcctatcgtcggggcagattttaacgtccagtgcgacctgctgggtgatgagttaacccacctgacggtactggcggcgaacaataccggctatcagaatctgacgttgctgatctcaaaagcgtatcagcgcgggtacggtgccgccgggccgatcatcgatcgcgactggcttatcgaattaaacgaagggttgatccttctttccggcggacgcatgggcgacgtcggacgcagtcttttgcgtggtaacagcgcgctggtagatgagtgtgtcgcgttttatgaagaacacttcccggatcgctattttctcgagctgatccgcaccggcaggccggacgaagaaagctatctgcacgcggcggtggaactggcggaagcgcgcggtttgcccgtcgtggcgaccaacgacgtgcgctttatcgacagcagcgactttgacgcacacgaaatccgcgtcgcgatccacgacggctttaccctcgacgatcctaaacgcccgcgtaactattcgccgcagcaatatatgcgtagcgaagaggagatgtgcgagctgtttgccgacatccccgaagctcttgccaacaccgttgagatcgccaaacgttgtaacgtaatcgtgcgtcttggtgaatacttcctgccgcagttcccgaccggggacatgagcaccgaagattatctggtcaagcgtgcaaaagagggcctggaagagcgtctggcctttttattccctgacgaggaagaacgtgttaagcgccgcccggaatatgacgaacgtctggagactgaacttcaggttatcaaccagatgggcttcccgggctacttcctcatcgttatggaatttatccagtggtcgaaagataacggcgtaccggtagggccaggccgtggctccggtgcgggttcactggtggcctacgcgctgaaaatcaccgacctcgatccgctggaatttgacctgctgttcgaacgtttccttaacccggaacgtgtctccatgcctgacttcgacgttgacttctgtatggagaaacgcgatcaggttatcgagcacgtagcggacatgtacggtcgtgatgcggtatcgcagatcatcaccttcggtacaatggcggcgaaagcggtgatccgcgacgtaggccgcgtgctggggcatccgtacggctttgtcgatcgtatctcgaaactgatcccgcccgatccggggatgacgctggcgaaagcgtttgaagccgagccgcagctgccggaaatctacgaagcggatgaagaagttaaggcgctgatcgacatggcgcgcaaactggaaggggtcacccgtaacgccggtaagcacgccggtggggtggttatcgcgccgaccaaaattaccgattttgcgccgctttactgcgatgaagagggcaaacatccggtcacccagtttgataaaagcgacgttgaatacgccggactggtgaagttcgacttccttggtttgcgtacgctcaccatcatcaactgggcgctggagatgatcaacaagcggcgggcgaagaatggcgagccgccgctggatatcgctgcgatcccgctggatgataagaaaagcttcgacatgctgcaacgctcggaaaccacggcggtattccagcttgaatcgcgcggcatgaaggacctgatcaagcgtctgcaacctgactgcttcgaagatatgatcgcactggtggcactgttccgccccggcccgttgcagtcagggatggtggataactttatcgaccgtaaacatggtcgcgaagagatttcctatccggacgtacagtggcagcatgaaagcctgaaaccggtactggagccaacctacggcatcatcctgtatcaggaacaggtcatgcagattgcgcaggtgctttctggttataccctcggtggcgcggatatgctgcgtcgtgcgatgggtaagaaaaagccggaagagatggctaagcagcgttctgtatttgctgaaggtgcagaaaagaacggaatcaacgccgaactggcgatgaaaatcttcgacctggtggagaaattcgcgggttacggatttaacaaatcgcactctgcggcctatgctttggtgtcatatcaaacgttatggctgaaagcgcactatccggcggagtttatggcggcggtaatgaccgccgatatggacaacaccgagaaggtggtgggcctggtggatgagtgctggcggatggggctgaaaatcctgccaccagatataaactccggtctttaccatttccacgtcaacgacgacggcgaaatcgtgtatggtattggcgccatcaaaggggtaggtgaaggtccgattgaggccatcatcgaagcccgtaataaaggcggctacttccgcgaactgtttgatctctgcgcccgtaccgacaccaaaaagttaaaccggcgggtgctggaaaaactgatcatgtccggggcgtttgaccgtcttgggccacaccgcgcggcgctgatgaactcgctgggtgatgcgttaaaagcggcagatcaacacgcgaaagcggaagctatcggtcaggccgatatgttcggcgtgctggccgaagagccggaacaaattgaacaatcctacgccagctgccaaccgtggccggagcaggtggtgttagatggggaacgtgaaacgttaggtctgtaccttacgggacaccctatcaaccagtatttaaaagagattgagcgttatgtcggaggcgtaaggctgaaagacatgcacccgacagaacgtggtaaagtcatcacggctgcggggctcgttgttgccgcgcgggttatggtcaccaagcgcggcaatcgtatcggtatctgcacgctggatgaccgttccgggcggctggaagtgatgttgtttactgacgccctggataaataccagcaattgctggaaaaagaccgcatacttatcgtcagcggacaggtcagctttgatgacttcagcggtgggcttaaaatgaccgctcgcgaagtgatggatattgacgaagcccgggaaaaatatgctcgcgggcttgctatctcgctgacggacaggcaaattgatgaccagcttttaaaccgactccgtcagtctctggaagcccaccgctctgggacaattccagtacatctctactatcagagggcggatgcacgcgcgcggttgcgttttggcgcgacgtggcgtgtctctccgagcgatcgtttattaaacgatctccgtggcctcattggttcggagcaggtggaactggagtttgactaa

SEQ ID NO: 483378 - DNA, 597 bp, Shigella sonnei
atgatcgaatttgtttatccgcacacgcagctggttgcgggtgtggatgaagtcggacgcgggccgttagttggcgcggtcgtcaccgctgcggtgatccttgacccggcgcgcccgattgccgggctgaatgattccaaaaagctgagcgaaaaacgccgtctggcgctctatgaagagatcaaagagaaagcgttgagctggagtctgggccgcgcggaaccccacgaaatcgacgagctgaacattcttcatgcgaccatgctggcgatgcagcgtgccgtcgctgggctgcatattgcgccggaatatgtgttgattgatggtaaccgctgcccgaaattaccgatgcctgcgatggctgtggtgaaaggcgatagccgcgtaccggaaatcagtgccgcgtctatcctggcgaaagtgacgcgtgacgccgaaatggcggcgctggatattgttttcccgcaatatggttttgcccaacacaaagggtacccaaccgcttttcatctggaaaaactggctgaacacggcgcgaccgaacaccatcggcgcagctttgggcctgtcaaacgcgcactgggacttgcgtcctga

SEQ ID NO: 483379 - DNA, 1149 bp, Shigella sonnei
atgactgaacagcgtccattaacgattgccctggtcgccggagaaacctccggcgatatcctgggggccggtttaatccgcgctctgaaagaacatgtgcccaacgcccgctttgttggtgttgccgggccacgaatgcaggctgaaggctgcgaagcttggtacgaaatggaagaactggcggtaatgggcattgttgaagtgctcggtcgtctgcgtcgcttactgcatattcgtgccgatctgacaaagcgttttggcgaactgaagccagatgtttttgttggtattgatgcgcccgacttcaatattactcttgaaggtaacctcaaaaagcagggtatcaaaaccattcattacgtcagtccatccgtctgggcgtggcgacagaaacgcgttttcaaaataggcagagccaccgatctggtgctcgcatttctgcctttcgaaaaagcgttttatgacaaatacaatgtaccgtgccgctttatcggtcataccatggctgatgccatgccgttagatccagataaaaatgccgcccgtgatgtgctggggatccctcacgatgcccactgcctggcgttgctaccggggagccgtggtgcagaagttgaaatgcttagtgccgatttcctgaaaacggcccagcttttgcgccagacatatccggatctcgaaatcgtggtgccactggtgaatgccaaacgccgcgagcagtttgaacgcatcaaagctgaagtcgcgccagacctttcagttcatttgctggatgggatgggccgtgaggcgatggtcgccagcgatgcggcgctactggcgtcgggtacggcagccctggagtgtatgctggcgaaatgcccgatggtggtgggatatcgcatgaagccttttaccttctggttggcgaagcggctggtgaaaactgattatgtctcgctgccaaatctgctggcgggcagagagttagttaaagaattattgcaggaagagtgtgagccgcaaaaactggctgcggcgctgttaccgctgttggcgaacgggaaaaccagccacgcgatgcacgataccttccgtgaactgcatcagcagatccgctgcaatgccgatgagcaggcggcacaagccgttctggagttagcacaatga

SEQ ID NO: 483380 - DNA, 789 bp, Shigella sonnei
gtgattgataaatccgcctttgtgcatccaaccgccattgtggaagagggcgcgtcaattggcgcgaacgcacacattggtcctttttgtatcgttggaccccatgtcgaaattggtgagggtaccgtactgaaatctcacgttgtcgtgaatggtcatactaaaattggccgcgataatgagatttatcagttcgcctccatcggcgaagttaaccaggatctgaaatatgctggcgaaccgacccgtgtggaaatcggcgatcgtaaccgcattcgcgaaagcgtcaccattcatcgtggcacagtccagggcggtggattgacgaaggtgggcagcgacaacttactgatgatcaacgcgcacattgcgcacgattgtacggtaggtaaccgctgtattctcgccaacaacgcaacgctggcgggtcacgtatcggttgacgacttcgcgatcatcggcggcatgaccgcagtccatcagttctgcatcattggtgcgcacgtgatggttggcggctgctccggtgtggcgcaggacgtccctccttatgtcattgcgcagggtaaccacgcaacgccgttcggtgtcaatatcgaagggctgaagcgccgcggattcagccgtgaggcgattaccgctatccgcaatgcgtataagctgatttatcgtagcggtaaaacgctcgatgaagtgaaaccggaaattgctgaactggcggaaacatatccggaagtgaaagcctttaccgatttctttgcacgctcaacgcgcggtctgattcgttaa

SEQ ID NO: 483381 - DNA, 456 bp, Shigella sonnei; identical to SEQ ID NO: 457725

SEQ ID NO: 483382 - DNA, 1026 bp, Shigella sonnei
atgccttcaattcgactggctgatttagcgcagcagttggatgcagaactacacggtgatggcgatatcgtcatcaccggcgttgcgtccatgcaatctgcacaaacaggtcacattacgttcatggttaacccaaaataccgtgagcatttaggcttgtgccaggcgtccgcggttgtcatgacccaggacgatcttcctttcgcgaaaagtgccgcgctggtagtgaagaatccctacctgacttacgcgcgcatggcgcaaattttagataccacgccgcagcccgcgcagaacattgcacccagtgcggtgatcgacgcgacggcgaagctgggtaacaacgtatcgattggcgctaacgcggtgattgagtccggcgttgaactgggcgataacgtgattatcggtgccggttgcttcgtaggtaaaaacagcaaaatcggtgcaggttcgcgtctctgggcgaacgtaaccatttaccatgagatccagatcggtcagaattgcctgatccagtccggaacagtggtaggcgcagacggctttggttatgccaacgatcgtggtaactgggtgaagatcccacagattggtcgcgtaattattggcgatcgcgtggagatcggtgcctgcacaaccatcgatcgcggcgcgctggatgacactgttattggcaatggcgtgatcattgataaccagtgccagattgcacataacgtcgtgattggcgacaatacggcggttgccggtggcgtcattatggcgggcagcctgaaaattggtcgttactgcatgatcggcggagccagcgtaatcaacgggcatatggaaatatgcgacaaagtgacggttacgggcatgggtatggtgatgcgtcccatcactgaaccaggcgtctattcctcaggcattccgctgcaacccaacaaagtctggcgcaaaaccgctgcactggtgatgaacattgatgacatgagcaagcgtctgaaatcgcttgagcgcaaggttaatcaacaagactaa

SEQ ID NO: 483383 - DNA, 486 bp, Shigella sonnei; identical to SEQ ID NO: 457727

SEQ ID NO: 483384 - DNA, 2433 bp, Shigella sonnei
atggcgatgaaaaagttgctcatagcgtcgctgctgtttagcagcgccaccgtatacggtgctgaagggttcgtagtgaaagatattcatttcgaaggccttcagcgtgtcgccgttggtgcggcactcctcagtatgccggtgcgcacaggcgacacggttaatgatgaagatatcagtaataccattcgcgctctgtttgctaccggcaactttgaggatgttcgcgtccttcgtgatggtgatacccttctggttcaggtaaaagaacgtccgaccattgccagcattactttctccggtaacaaatcggtgaaagatgacatgctgaagcaaaacctcgaggcttctggtgtgcgtgtgggcgaatccctcgatcgcaccaccattgccgatatcgagaaaggtctggaagacttctactacagcgtcggtaaatatagcgccagcgtaaaagctgtcgtgaccccgctgccgcgcaaccgtgttgacctaaaactggtgttccaggaaggtgtgtcagctgaaatccagcaaattaacattgttggtaaccatgctttcaccaccgacgaactgatctctcatttccaactgcgtgacgaagtgccgtggtggaacgtggtaggcgatcgtaaataccagaaacagaaactggcgggcgaccttgaaaccctgcgcagctactatctggatcgcggttatgcccgtttcaacatcgactctacccaggtcagtctgacgccagataaaaaaggtatttacgtcacggtgaacattaccgaaggcgatcagtacaagctttctggcgttgaagtgagcggcaaccttgccgggcactccgctgaaattgagcagctgactaagatcgagccgggcgagctgtataacggcaccaaagtgaccaagatggaagatgacatcaaaaagcttctcggtcgctatggttatgcctatccgcgcgtacagtcgatgcctgaaattaacgatgccgacaaaaccgttaaattacgcgtgaacgttgatgcgggtaaccgtttctacgtgcgtaagatccgttttgaaggtaacgatacctcgaaagatgccgtcctgcgtcgcgaaatgcgtcagatggaaggtgcatggctgggaagcgatctggtcgatcagggtaaggagcgtctgaatcgtctgggcttctttgaaactgtcgataccgatacccaacgtgttccgggtagcccggaccaggtagatgtagtctacaaggtgaaagaacgtaacaccggtagcttcaacttcgggattggttacggtactgaaagtggcgtgagcttccaggctggcgtgcaacaggataactggttaggtacaggttatgctgttggtatcaacgggaccaaaaacgattaccagacctatgctgaattgtcggtaaccaacccgtacttcactgtagatggtgtaagcctcggtggtcgtctcttctataatgacttccaggcagatgacgccgacctgtccgactataccaacaagagttatggtacagacgtgacgttgggcttcccgatcaacgaatataactcgctgcgtgcaggtctgggttatgtacataactccctgtccaacatgcagcctcaggttgcgatgtggcgttatctgtactctatgggtgaacatccgagcacctctgatcaggataacagcttcaaaacggacgacttcacgttcaactatggttggacctataacaagcttgaccgtggttacttcccgacagatggttcacgtgtcaacctgaccggtaaagtgaccattcctggatcggataacgaatactacaaagtgacgttagacacggcgacttatgtgccgatcgatgacgatcacaaatgggttgttctggggcgtacccgctggggttatggtgatggtttaggcggcaaagagatgccgttctacgagaacttctatgccggtggttccagcaccgtgcgtggcttccagtccaatacaattggtccgaaagcagtttacttcccgcatcaggccagtaattatgatccggactatgattacgaatgtgcgactcaggacggcgcgaaagacctgtgtaaatcggatgatgctgtaggcggtaacgccatggcggttgccagcctcgagttcatcaccccgacgccgtttattagcgataagtatgctaactcggttcgtacttccttcttctgggatatgggtaccgtttgggatacaaactgggattccagccaatattctggatatccggactatagtgatccaagcaatatccgtatgtctgcgggtatcgcattacaatggatgtccccattggggccgttggtgttctcctacgcccagccgttcaaaaagtacgatggagacaaggcagaacagttccagtttaacatcggtaaaacctggtaa

SEQ ID NO: 483385 - DNA, 1353 bp, Shigella sonnei
atgctgagttttctctgggatttggcttcgttcatcgttgcactgggtgtacttatcaccgtgcatgaatttggtcatttctgggttgcccggcgttgtggtgttcgcgttgagcgtttctcaatagggtttggtaaggcgctctggcggcgaactgataagctcggcaccgaatatgttatggccctgattccgctgggcggttatgtcaaaatgctggatgagcgcgcagaaccggtcgttccggaactccgccaccatgccttcaataataaatctgttggccaacgagcggcgattattgccgcaggtccggttgcaaacttcatttttgctatctttgcctactggctggtttttattattggtgtgcctggcgtacgtccggtggttggtgaaatagcagccaattcgatagctgcggaagcacaaattgcaccaggtacggaactaaaagccgtagatggtatcgaaacgcctgattgggatgccgtgcgtttgcagttggtcgataaaattggcgatgaaagcaccaccattacagtagcgccatttggcagcgaccaacggcgggatgtaaagctcgatttacgtcactgggcgtttgagcctgataaagaagatccggtatcttcgctggggattcgtcctcgtgggccgcaaattgaacctgtactggaaaatgtgcagccaaactcggcggcaagcaaggcaggtttgcaagcaggcgacaggatcgttaaagtcgatggtcagcccttaacgcagtgggtgacctttgtgatgcttgtccgggataacccgggtaaatccttagcgttagaaatcgaaaggcaggggagtcccttgtctttgacattaatcccggagagtaaaccgggtaatggtaaagcgattggttttgtcggtattgagccgaaagtcattcctttgccagatgagtataaagttgtacgccagtatgggccgttcaacgccatcgtcgaagccacggacaaaacgtggcagctgatgaagctgacggtcagtatgctgggaaaattgatcaccggtgatgtgaaactgaacaacctcagtgggccgatctctatcgccaagggggctgggatgacagcggaactcggggtagtttattacctgccgtttcttgcgcttattagcgtgaacttagggataattaacctgtttccgttgcccgtacttgacggggggcatctgctgttccttgcgatcgaaaagatcaagggcggaccggtatccgagcgggttcaagacttttgttatcgcattggctcgattctgctggtgctgttaatggggcttgcacttttcaatgatttctctcggttatga

SEQ ID NO: 483386 - DNA, 750 bp, Shigella sonnei
atgctggcagcgtgggaatggggacagcttagcggttttaccactcgttcgcagcgagtatggttggcggtgttatgcgggttattgttggcgctgatgctttttctgttgccggaatatcaccgaaatattcatcaaccgctggttgaaatctcactttgggcttcgttgggttggtggattgtcgcgctattgctggtgctgttttacccaggttccgcagcaatctggcgtaactctaaaacattgcgccttatttttggcgtgctaaccattgttcccttcttctggggcatgctggcgttacgggcctggcactatgacgagaatcattacagtggcgcaatatggctgctctatgtcatgatcctggtatggggcgctgactccggcgcatatatgtttggcaaattgtttggtaaacataagctggcaccgaaggtttctccgggtaaaacctggcaaggctttataggtggactagcgaccgcagcggtaatctcatggggttatggcatgtgggcgaatctcgacgtcgctcccgtcaccttactcatttgctctattgtcgcagcgttagcctcagtgctcggcgatctgaccgagagtatgtttaagcgtgaagcaggaattaaggacagcggtcatttaattccaggacacggtggtattttagatcgtattgatagcctgacggctgcggtaccggtctttgcttgcttgttgttactggtattcaggacgctttaa

SEQ ID NO: 483387 - DNA, 153 bp, Shigella sonnei
atggggggcgcttttgctgaagtatcgcctgatatctgcttttgtgttaatacccgtcgtcatcgcggcgttgtttctgttgccgccggtggggttcgccatcgtaacgctggtggtctgcatgctggcagcgtgggaatggggacagcttag

SEQ ID NO: 483388 - DNA, 759 bp, Shigella sonnei
atgttgtctgctactcaaccacttagcgaaaaattgccagcgcatggctgccgtcatgttgcgatcattatggacggcaatggtcgctgggcaaaaaagcaagggaggattcgtgcctttgggcataaagccggggcaaaatccgtccgccgggctgtctcttttgcggccaacaacggtattgaggcgttaacgctgtatgcctttagtagtgaaaactggaaccgaccagcgcaggaagtcagtgcgttaatggaactgtttgtgtgggcgctcgatagcgaagtaaaaagtctgcaccgacataacgtgcgtctgcgtattattggcgataccagtcgctttaactcgcgtttgcaagaacgtattcgtaaatctgaagcgctaacagctgggaataccggtctgacgctgaatattgcggcgaactacggtggacgttgggatatagtccagggagtcaggcaactggctgaaaaggtgcagcaaggaaacctgcaaccagatcagatagatgaagagatgctaaaccagcatgtctgtatgcatgaactggcccctgtagatttagtaattaggactgggggggagcatcgcattagtaactttttgctttggcaaattgcctatgccgaactttactttacagatgttctctggcctgatttcgatgaacaagactttgaaggggcgttaaatgcctttgctaatcgagagcgtcgtttcggcggcaccgagcccggtgatgaaacagcctga

SEQ ID NO: 483389 - DNA, 1197 bp, Shigella sonnei
atgaagcaactcaccattctgggctcgaccggctcgattggttgcagcacgctggacgtggtgcgccataatcccgaacacttccgcgtagttgcgctggtggcaggcaaaaatgtcactcgcatggtagaacagtgcctggaattctctccccgctatgccgtaatggacgatgaagcgagtgcgaaacttcttaaaacgatgctacagcaacagggtagccgcaccgaagtcttaagtgggcaacaagccgcttgcgatatggcagcgcttgaggatgttgatcaggtgatggcagccattgttggcgctgctgggctgttacctacgcttgctgcgatccgcgcgggtaaaaccattttgctggccaataaagaatcactggttacctgcggacgtctgtttatggacgccgtaaagcagagcaaagcgcaattgttaccggtcgatagcgaacataacgccatttttcagagtttaccgcaacctatccagcataatctgggatacgctgaccttgagcaaaatggcgtggtgtccattttacttaccgggtctggtggccctttccgtgagacgccattgcgcgatttggcaacaatgacgcccgatcaagcctgccgtcatccgaactggtcgatgggacgtaaaatttctgtcgattcggctaccatgatgaacaaaggtctggaatacattgaagcgcgttggctgtttaacgccagcgccagccagatggaagtgctgattcacccgcagtcagtgattcactcaatggtgcgctatcaggacggcagtgttctggcgcagctgggggaaccggatatgcgtacgccaattgcccacaccatggcatggccgaatcgcgtgaactctggcgtgaagccgctcgatttttgcaaactaagtgcgttgacatttgccgcaccggattatgatcgttatccatgcctgaaactggcgatggaggcgttcgaacaaggtcaggcagcgacgacagcattgaatgccgcaaacgaaatcaccgttgctgcttttcttgcgcaacaaatccgctttacggatatcgctgcgttgaatttatctgtactggaaaaaatggatatgcgcgaaccacaatgtgtggacgatgtgttatctgttgatgcgaacgcgcgtgaagtcgccagaaaagaggtgatgcgtctcgcaagctga

SEQ ID NO: 483390 - DNA, 558 bp, Shigella sonnei; identical to SEQ ID NO: 457733

SEQ ID NO: 483391 - DNA, 726 bp, Shigella sonnei; identical to SEQ ID NO: 457734

SEQ ID NO: 483392 - DNA, 852 bp, Shigella sonnei
atggctgaaattaccgcatccctggtaaaagagctgcgtgagcgtactggcgcaggcatgatggattgcaaaaaagcactgactgaagctaacggcgacatcgagctggcaatcgaaaacatgcgtaagtccggtgctattaaagcagcgaaaaaagcaggcaacgttgctgctgacggcgtgatcaaaaccaaaatcgacggcaactacggcatcattctggaagttaactgccagactgacttcgttgcaaaagacgctggtttccaggcgttcgcagacaaagttctggacgcagctgttgctggcaaaatcactgacgttgaagttctgaaagcacagttcgaagaagaacgtgttgcgctggtagcgaaaattggtgagaacatcaacattcgccgcgttgctgcgctggaaggcgacgttctgggttcttatcagcacggtgcgcgtatcggcgttctggttgctgctaaaggcgctgacgaagagctggttaaacacatcgctatgcacgttgctgcaagcaagccagaattcatcaaaccagaagacgtatccgctgaagtggtagaaaaagaataccaggtacagctggatatcgcgatgcagtctggtaagccgaaagaaatcgcagagaaaatggttgaaggccgcatgaagaaattcaccggcgaagtttctctgaccggtcagccgttcgttatggaaccaagcaaaactgttggtcagctgctgaaagagcataacgctgaagtgactggcttcatccgcttcgaagtgggggaaggcatcgagaaagttgagactgactttgcagcagaagttgctgcgatgtccaagcagtcttaa

SEQ ID NO: 483393 - DNA, 726 bp, Shigella sonnei
atggcaactgtttccatgcgcgacatgctcaaggctggtgttcacttcggtcaccagacccgttactggaacccgaaaatgaagccgttcatcttcggtgcgcgtaacaaagttcacatcatcaaccttgagaaaactgtaccgatgttcaacgaagctctggctgaactgaacaagattgcttctcgcaaaggtaaaatccttttcgttggtactaaacgcgctgcaagcgaagcggtgaaagacgctgctctgagctgcgaccagttcttcgtgaaccatcgctggctgggcggtatgctgactaactggaaaaccgttcgtcagtccatcaaacgtctgaaagacctggaaactcagtctcaggacggtactttcgaaaagctgaccaagaaagaagcgctgatgcgcactcgtgagctggagaaactggaaaacagcctgggcggtatcaaagacatgggcggtctgccggacgctctgtttgtaatcgatgctgaccacgaacacattgctatcaaagaagcaaacaacctgggtattccggtatttgctatcgttgataccaactctgatccggacggtgttgacttcgttatcccgggtaacgacgacgcaatccgtgctgtgaccctgtacctgggcgctgttgctgcaaccgtacgtgaaggccgttctcaggatctggcttcccaggcggaagaaagcttcgtagaagctgagtaa

SEQ ID NO: 483394 - DNA, 795 bp, Shigella sonnei
atggctatctcaatcaagaccccagaagatatcgaaaaaatgcgcgtcgctggccgactggctgccgaagtgctggagatgatcgaaccgtatgttaaaccgggcgtcagcaccggcgagctggatcgcatctgtaatgattacattgttaatgaacaacacgcggtttctgcctgcctcggctatcacggctatccgaaatccgtttgcatctctattaatgaagtggtgtgccacggtatcccggacgatgcgaagctgctgaaagatggcgatatcgttaacattgatgtcaccgtaatcaaagatggtttccacggcgatacctcgaaaatgtttatcgtcggtaagccgaccatcatgggcgaacgtctgtgccgcatcacgcaagaaagcctgtacctggcgctgcgcatggtcaaaccaggcattaacctgcgcgaaatcggtgcggcgattcagaagtttatcgaagcagaaggcttctccgtcgttcgtgaatattgcggacacggtattggtcgcggcttccatgaagaaccgcaggtgctgcactatgactcccgtgaaaccaacgtcgtactgaaacctgggatgacgttcaccatcgagccaatggtcaacgcgggtaaaaaagagatccgcaccatgaaagatggctggacggtaaaaaccaaagatcgcagcttgtctgcacaatatgagcatactattgtggtgactgataacggctgcgaaattctgacgctacgcaaggatgacaccatcccggcgataatctcgcacgacgaataa

SEQ ID NO: 483395 - DNA, 2673 bp, Shigella sonnei
atgaatacccttccagaacagtacgcaaacaccgctctccccaccctgcccggtcaaccgcaaaatccatgcgtctggccccgtgatgaattaaccgtcggtgggataaaagcccatatcgatactttccagcgttggctgggtgatgcctttgacaatgggatctctgcagaacagttgattgaggcgcgcaccgagtttatcgaccagctcctgcaacgattatggattgaagcgggattcagccagattgccgacctggcattggtcgccgtcggtggctacggtcgtggcgagctgcatccactttctgacatcgatttactgattttaagccgtaaaaagctcccggacgatcaggcgcaaaaagtgggcgagctgttaacgctgctctgggatgtaaagctggaagtcggtcatagtgtgcgcacgcttgaagagtgcatgctggaagggttatcggatttaaccgtcgccaccaatttaatcgaatcccgcttattaattggcgatgttgcgctcttcctcgaactgcaaaaacatatttttagcgaaggattctggccttccgacaagttctacgcggcgaaagttgaagaacagaaccagcgccatcagcgttaccacggcaccagctacaatcttgaaccagacatcaaaagtagccctggcggcttgcgcgatatccacactctgcaatgggtggcccgccgtcattttggcgcaacatcgctggatgaaatggttgggtttggcttcttaacctcagcggagcgggcggaattaaacgaatgtctgcatatactgtggcgtattcgctttgccctgcatctggtcgtcagccgttacgataatcgcctgttattcgatcgccaacttagcgtcgctcagcgtctgaattacagtggtgaaggcaacgaaccggtcgagcggatgatgaaggattacttccgcgttacacgccgcgtcagtgaactcaaccagatgctgctgcaactgttcgatgaagccatcctcgcccttcccgccgacgaaaaaccacgtccaatcgacgatgagtttcagctacgcggtacgctaatcgacctgcgtgatgaaacactatttatgcgccagccggaagccatcttgcgtatgttctacaccatggtgcgcaacagtgcgatcaccggcatttactccaccacgctgcgccagttacgccatgcccgtcgccatctgcaacaaccgctgtgtaatattccggaagcacgaaaactgtttttgagcattctgcgtcaccccggagcggtgcggcgcgggctattgccaatgcatcgccatagcgtgctcggcgcgtatatgccgcaatggtcgcatatcgtcgggcagatgcagtttgatctgttccacgcctacacggtggatgaacatactatccgcgtgatgctgaaactggagagttttgccagtgaagaaacgcgccagcgccatccgttgtgtgtggacgtctggccgcgcctgccgtcaactgagctgattttcatcgccgcgctgtttcacgatatcgccaaaggacgcggcggcgaccactccattctcggtgctcaggatgtagtgcattttgcagaactccacgggctgaactcacgcgaaacacagctggttgcctggctggttcgccagcacttgctgatgtcggtgacagcacaacgccgcgatattcaggaccctgaagtcatcaagcagtttgccgaagaagttcaaacggaaaatcgtctgcactatctggtatgcctgacagtggctgacatttgcgccaccaacgaaacgctgtggaatagctggaagcaaagtctgttgcgcgaactctattttgccaccgaaaagcagctacgacgcggaatgcaaaacacgccggatatgcgcgaacgggttcgccatcaccaactccaggcactggcactactgcgcatggataacatcgacgaagaggcgctgcaccaaatttggtcacgctgtcgtgctaactattttgtccgccatagcccaaatcaactggcctggcatgcccgccatttattacagcatgatttaagcaaaccgctggtattgcttagcccgcaggctacgcgtggaggcaccgagatttttatctggagcccggaccgcccctatctgtttgccgccgtctgtgccgaattagaccgccgcaatttaagtgttcacgacgcacaaattttcaccactcgcgacggtatggcgatggataccttcatcgtgctggaacccgatggtagcccgctatccgcagatcgtcatgaggttattcggtttggtctggagcaggtactgacacaaagtagctggcagccaccacagccgcgtcgtcaaccggctaaactacgtcactttactgttgaaaccgaagtgacgtttttgccaacccataccgaccgcaaatcgttccttgagcttatcgcgctcgaccagccaggactgctggcgagagtcgggaaaatttttgccgatctgggaatttcgcttcatggtgcccgaattacaaccattggcgagcgagtagaagatttattcataattgccaccgctgaccggcgtgcacttaataacgagttgcagcaggaagtgcatcagcggttgacagaggccctcaatccaaacgataaagggtga

SEQ ID NO: 483396 - DNA, 825 bp, Shigella sonnei
atgcagcagttacagaacattattgaaaccgcttttgaacgccgtgccgagatcacgccagccaacgcagacaccgttacccgcgaagcggtaaatcaggtgatcgccctgctggattccggtgcactgcgtgtagcggaaaaaattgacggtcagtgggtgacgcatcagtggttgaaaaaagcggtgctgctctctttccgtattaatgataatcaggtgatcgaaggggcagaaagccgctacttcgacaaagtgccgatgaaattcgccgactacgacgaagcacgtttccagaaagaaggcttccgcgttgtgccaccagcggcggtacgtcagggtgcgtttattgcccgtaacaccgtgctgatgccgtcttacgtcaacatcggcgcatatgttgatgaaggcaccatggttgatacctgggcgaccgtcggttcttgtgcgcagattggtaaaaacgtccacctttccggtggcgtgggcatcggcggcgtgctggaaccgctgcaggctaacccaaccatcattgaagataactgcttcattggcgcacgctctgaagtggttgaaggggtgattgtcgaagaaggttccgtcatttccatgggcgtatacattggtcagagcacccgtatttacgaccgtgaaaccggcgaaatccactacggtcgcgttccggcggggtctgtggttgtttcaggtaatctgccgtcaaaagatggcaaatacagcctctactgtgcggttatcgttaagaaagttgacgcgaaaactcgcggcaaagtcggcattaacgaactgctgcgtaccatcgactaa

SEQ ID NO: 483397 - DNA, 813 bp, Shigella sonnei
atgatttcacgccgccgattgttgcaggctactgccgcgacgatagccacgagctcaggtttcggttatatgcattactgggagctaggctggtttgaattaatccgtcaccgcctcgccttttttaaagacaacgcagcaccattcaaaattctttttctggccgatctccattactctcgttttgttcctttaagcctgatttctgacgcgattgctcttggcatagaacaaaagcccgatttgatattactgggcggcgattacgtattatttgatatgccgctgaatttttcggcgtttagtgatgtcctctccccccttgccgaatgtgcgccgacgtttgcctgcttcggcaaccacgatcgccctgttggtacagaaaaaaatcacttaattggcgagacgttgaaatcagtgggcatcacggtgttgtttaaccaggctacggtgatcgccacgccgaacaggcaattcgaactggtaggcaccggtgacttatgggccggacaatgcaaaccacctcccgccagcgaagcaaatctgccaagactgatgctggcacataatcccgacagcaaagaagtcatgcgtgatgaaccctgggatctgatgctgtgcggccatactcacggcgggcaactgcgcgtaccgttggttggtgaaccttttgcccctgtcgaagataaacgttacgtcgccggattaaatgcctttggcgaacgacacatctacacaacccgtggcgtgggcagtttgtatggtttgcgtctgaactgccgcccggaagtaacgatgctggaactggtgtag

SEQ ID NO: 483398 - DNA, 387 bp, Shigella sonnei
atgtacgacaatctgaaaagtctgggtattaccaatcctgaagaaattgatcgttacagcctccggcaggaagccaacaacgatattctgaaaatctatttccagaaagacaaaggcgagtttttcgccaagagcgtgaagtttaaatatccgcgtcagcgtaaaacggtcgtcgctgatggtgtgggtcagggttataaagaagtccaggaaatcagcccgaatctacggtatatcattgatgagcttgatcaaatctgccagcgtgaccgcagcgaagttgatcttaagcgtaagatcctcgacgacttacgtcacctggagtcagtcgtaaccaataagatcagcgagattgaagccgatctggaaaaactaacgcgtaaataa

SEQ ID NO: 483399 - DNA, 1158 bp, Shigella sonnei
atggctggctggcatcttgataccaaaatggcgcaggatatcgtggcacgtaccatgcgcatcatcgataccaatatcaacgtaatggatgcccgcgggcgaattatcggcagcggcgatcgtgagcgtattggtgaattgcacgaaggtgcattgctggtactttcacagggacgagtcgtcgatatcgatgacgcggtagcacgtcatctgcacggtgtgcggcaggggattaatctaccgttacggctggaaggtgaaattgtcggcgtaattggcctgacaggtgaaccagagaatctgcgtaaatatggcgaactggtctgcatgacggctgaaatgatgctggaacagtcgcggttgatgcacctgttggcgcaggatagccgtttgcgggaagaactggtgatgaacctgattcaggctgaggagaatactcccgcacttactgaatgggcgcaacggctggggattgatctcaatcaaccgcgagtggtggctattgttgaggtcgacagcggtcagcttggcgtggacagcgcaatggcggagttacaacaactgcaaaatgcgctgactacgcccgagcgtaataatctggtggcaattgtttcgctgaccgaaatggtggtgttgaaaccggcgttgaactcttttgggcgctgggatgcagaagatcatcgtaagcgagttgaacaactgattacccgcatgaaagagtacggccagctgcgttttcgcgtttcactgggcaactattttaccggtcctggcagtattgcccgatcctatcgtacggcgaaaacgacgatggtggtgggtaaacagcggatgccagaaagtcgctgctatttttatcaggatctgatgttacctgtgttactcgacagtttgcgtggcgactggcaggccaacgaactggcgcgaccgctggcgcggctgaaagcgatggacaataatggcttgctgcgacgaacgctggcggcgtggtttcgccacaatgtgcaaccgctggctacgtcaaaggcgctgtttattcatcgtaatactctggagtatcggcttaatcgtatatcggaactgaccgggcttgatttgggtaattttgatgacaggttgctgctgtatgtggcgttacaactggatgaagagcggtag

SEQ ID NO: 483400 - DNA, 1425 bp, Shigella sonnei
atgaaaaaaaccacattagcactgagtgcactggctctgagtttaggtttggcgttatctccgctctctgcaacggcggctgagacttcttcagcaacgacagcccagcagatgccaagccttgcaccgatgctcgaaaaggtgatgccttcagtggtcagcattaacgtagaaggtagcacaaccgttaatacgccgcgtatgccgcgtaatttccagcagttcttcggtgatgattctccgttctgccaggaaggttcaccgtttcagagctctccgttctgccaggggggccagggcggtaatggcggcggccagcaacagaaattcatggcgctgggttccggcgtcatcattgatgccgataaaggctatgtcgtcaccaacaaccatgttgttgataacgcgacggtgattaaagtccagctgagcgatggtcgtaagttcgacgcgaagatggttggcaaagatccgcgctctgatatcgcgctgatccaaatccagaacccgaaaaacctgaccgcaattaagatggcggattctgatgcactgcgcgtgggtgattacaccgtagcgattggtaacccgtttggtctgggcgagacggtaacttccgggattgtctctgcgctggggcgtagcggcctgaatgctgaaaactacgaaaacttcatccagaccgatgcagcgatcaaccgtggtaactccggtggtgcgctggttaacctgaacggcgaactgatcggtatcaacaccgcgatcctcgcaccggacggcggcaacatcggtatcggttttgctatcccgagtaacatggtgaaaaacctgacctcgcagatggtggaatacggccaggtgaaacgcggtgagctggggattatggggactgagctgaactccgaactggccaaagcgatgaaagttgacgcccagcgcggtgctttcgtaagccaggttctgcctaattcctccgctgcaaaagcgggcattaaagcgggtgatgtgatcacctcactgaacggtaagccgatcagcagctttgccgcactgcgtgctcaggtgggtactatgccggtgggcagcaaactgaccctgggcttactgcgcgacggtaagcaggttaacgtgaacctggaactgcagcagagcagccagaatcaggttgattccagctccatcttcaacggcattgaaggcgctgagatgagcaacaaaggcaaagatcagggcgtggtagtgaacaacgtgaaaacgggcactccggctgcgcagatcggcctgaagaaaggtgatgtgattattggcgcgaaccagcaggcagtgaaaaacatcgctgaactgcgtaaagtgctcgacagcaaaccgtctgtgctggcactgaacattcagcgcggcgacagcaccatctacctgttaatgcagtaa

SEQ ID NO: 483401 - DNA, 636 bp, Shigella sonnei
ttgcacgaggcgtggggtcagcatgagaaaggttcgctcttttcgctagtggttgaaaatgcctgggaaaaatcacgctcaaatagtttaagccgcagtacggaagatcagttttttatgtatttacgggtaaacaccctaaataaactggtaccctacgcggcacaacgatttattgataatctgcctgcgattttcgccggaacgtttaatcatgcattattggaagatgccagcgaatgcagcgatcttcttaagctatataaaaatgtcgctgtaaaacatgtgtttagccatccggatgtcgagcagcttgaattgcagggctatcgggtcattagcggattattagagatttatcgtcctttattaagcctgtcgttatcagactttactgaactggtagaaaaagaacgggtgaaacgtttccctattgagtcgcgcttattccacaaactctcgacgcgccatcggctggcctatgtcgaggctgtcagtaaattaccgtcagattctcctgagtttccgctatgggaatattattaccgttgccgcctactgcaggattatatcagcggtatgaccgacctctatgcgtgggatgaataccgacgtctgatggccgtagaacaataa

SEQ ID NO: 483402 - DNA, 378 bp, Shigella sonnei
ttgttattaattgcccgtatcgccgtggtcttaattttcattatttttggttttcccaaaatgatgggctttgacggtacggtccaatatatggcctcgttgggcgcgccaatgccgatgctggcagcgattattgcggtagttatggaagtgcccgccgcgatattaatcgtgcttggctttttcacccgtccgctggcggtgctgtttattttctacacgctgggtacggcggtgattggtcaccattactgggatatgaccggcgatgcggttgggccaaatatgattaatttctggaagaatgtcagtatcgctggcgcgttcttgctattggcaattaccgggccgggggcaatttctctcgatcggcgttag

SEQ ID NO: 483403 - DNA, 873 bp, Shigella sonnei
atgaccatctataccttatcccacgggtcgctaaagctggacgtttctgaccagggcggcgtaatcgaaggcttctggcgcgatacgacgccgctcttacgtcctggtaaaaaaaacggtgtggcaaccgatgcctcatgttttccgctggtgccatttgcaaaccgggtgagcggcaaccgttttgtctggcaggggcgtgagtatcaactgcaaccgaatgttgagtgggatgcgcactatctacacggcgatggctggctgggcgagtggcaatgtgtctcgcacagcgatgatagtttgtgtctggtgtatgaacatcgcagcggtgtctatcactatcgggtaagtcaggcgtttcatttaacggcggatacgctgacggtgacgctctctgtcaccaatcaaggggcagagacgctgccatttggtaccggctggcatccttattttccgttgtcaccacaaacgcggattcaggcgcaggcgagcggttactggctggaacgggagcagtggctggcgggtgagttttgcgagcagctaccgcaggaactggattttaaccagctcgcgccgttgccgcgccagtgggtgaacaatggttttgccggatggaatggtcaggcccgcatcgagcagccgcaggaaggttatgccatcatcatggaaacgacgccacctgcaccgtgttatttcatctttgtttccgaccctgcgtttgataaaggatatgcgtttgatttcttctgtctggaaccgatgagccatgcgccggatgatcatcatcgcccggaagggggtgatctcattgcgctagcaccaggggaatcaacaacttcagagatgtcgttgcgggtagagtggctgtaa

SEQ ID NO: 483404 - DNA, 1062 bp, Shigella sonnei
atgaaaacgatgctggcagcttatttaccaggaaattcaaccgtcgatctgcgggaagttgcggtgccgacgccggggattaaccaggtactgatcaaaatgaaatcctccgggatttgcggaagcgatgtccactatatctatcatcaacaccgtgccacggcggcggcacccgataaaccgttataccagggatttatcaacggtcatgaaccgtgcgggcagattgtggcgatggggcaaggctgccgccattttaaagagggcgaccgcgtgctggtgtatcacatttctggctgtggtttttgcccgaactgccgccgcggctttcctatctcttgtactggcaaaggaaaagcggcttacggctggcagcgtgacggcggtcatgccgaatatctgctggcggaagaaaaagatctgatcctcctgccggatgcgctgagctacgaagatggtgcgtttatcagttgcggcgttggcacggcctatgaagggattttgcgcggcgaagtttccggcagcgataacgtgctggtggtcggtctggggccggtcggcatgatggcgatgatgctggcgaaaggtcgcggtgcaaaacggatcatcggcgttgatatgctgccggaacgtctggcgatggcaaaacagttaggggtgatggatcacggctatttagcaaccaccgaaggtctgccgcagattatcgccgaactcacccacggtggcgcggatgttgcgctcgattgttctggtaatgccgcaggtcgcttgctggcactgcaatccaccgctgactggggacgggtggtttacattggtgaaaccggaaaagtggaattcgaggtcagcgccgatctgatgcaccatcaacggcggattatcggctcctgggtgaccagtctgttccatatggaaaaatgcgcccacgatttgactgactggaagctgtggccgcgtaacgccattacccatcgcttctcgctggaacaggcaggtgatgcctatgcgctgatggcgagcggcaaatgcgggaaagttgtgattaacttcccggattaa

SEQ ID NO: 483405 - DNA, 999 bp, Shigella sonnei
atgtctgcttcgtcattaccattgccgcagggcaagagcgtctcgctcaaacaatttgtcagtcgccatattaatgagatcggtttgctggtggtgattgccattctttatctggtcttctccctgaacgcgcctggctttatctcattgaataaccagatgaacgtgctgcgcgatgccgccaccattgggattgccgcctgggcgatgacgctgattattatctccggtgaaattgatgtcagcgttgggccgatggtggcttttgtctcggtgtgcctggcatttttgctgcaatttgaagttccgttggcgattgcttgtctgctggtgttgctgttaggcgcgctgatgggaacgctcgccggggtgctgcgcggcgtgtttaacgtaccaagtttcgttgccacactggggctgtggagcgccctgcgcggaatggggctgtttatgaccaacgcactgccagtgccgattgacgaaaacgaggtgctggactggctgggcggacaatttctcggtgtgccagtatccgcgctgatcatgatggtgttgtttgcgctgtttgtgttcattagccgaaaaaccgccttcgggcgctcggtttttgccgttggcggtaatgccacggcggcgcagttgtgcggtattaacgttcgtcgggtgcgcattcttatctttaccctttcgggattattagcggcggtgaccggcattttgctggcggcacgcctcggttccggtaacgcaggtgccgcaaacggtctggagtttgacgtcatcgccgcggtcgtggtcggcggtacggcactttccggcggtcgcggttccctgttcggtacattgcttggtgtgctggtgattacgctaatcggtaacggtctggtgctgctcggtattaactcctttttccagcaggtggtacgcggcgtcatcatcgtggtggcggtgctggcgaatatcttgctgacccagcgaagcagtaaagcgaaacgctaa

SEQ ID NO: 483406 - DNA, 1512 bp, Shigella sonnei
atgttcacggcaacagaggcagtcccggtagcaaaagtggtggcaggaaataagcgttaccccggcgtcgttgcgctggataacgttaacttcacgctcaataaaggcgaagttcgtgcgctgttaggtaaaaacggcgcgggcaaatcgactctcattcgaatgcttaccggcagcgaacgcccggatagcggtgatatctggattggcgagacgcgactggaaggtgacgaagctacgttgactcgccgtgccgctgaactgggggttcgtgcggtttatcaggaattaagtctggtggaagggctgacggtggcagaaaacctctgccttggtcaatggcctcgccgcaacggcatgattgattacctgcaaatggcgcaggatgcccaacgttgcttacaggcgctgggcgttgacgttagtcctgaacaacttgtttcaacgctaagcccggcgcaaaagcaactggtggaaattgcacgggtgatgaagggcgagccgcgcgtggtcattcttgatgaacccaccagctcgcttgccagtgcagaagttgaactggtgatcagtgcggtgaaaaagatgtcggcactgggcgtggcggtgatttatgtcagccaccggatggaagaaatccgccgcattgcctcctgtgccaccgttatgcgcgatggtcaggtggcgggcgatgtgatgctcgaaaacacctccacgcatcatattgtgtcgctaatgctagggcgtgatcacgttgatattgcgccggttgcccctcaggaaattgtggatcaggccgtactggaagtccgtgcgttacgccataagcccaagctggaggatatcagctttacgttacgtcgcggcgaagtgcttggcattgctggcctgctgggggcagggcgcagtgaattgctgaaggcgattgttgggctggagacgtatgaacagggcgaaattgttatcaacggcgagaaaatcacgcgccccgattacggcgacatgctgaaacgcggcattggctatacgccagaaaaccgcaaagaagcggggatcattccctggttgggcgttgacgaaaatacagtgctgaccaatcggcaaaaaatcagcgccaacggagtgctgcaatggtccaccatccgccgcctgaccgaagaggtgatgcagcggatgacggtcaaggccgctagtagcgaaacgcccatcggcacgctttctggtggcaatcagcaaaaagtggtgatcggtcgttgggtctatgccgccagccagattttgttgctcgacgagccaacgcgcggcgtcgatatcgaagccaaacagcagatttaccgtattgtccgtgagctggctgccgaaggaaaaagcgtggtgtttatctccagtgaagtggaggagttgccgctggtgtgtgaccgcatcctgttattacagcacggcacgttctcgcaggagtttcactcgccggtcaatgtggatgagctgatgtccgccattctgtctgtgcactga

SEQ ID NO: 483407 - DNA, 984 bp, Shigella sonnei
atgcctaaaaaaatgagaacaacccgtaatctattattaatggctacgctattaggtagcgcactatttgccagggctgcggataaagaaatgaccattggtgcaatataccttgataccctgggatattacgctggagtgcgtcagggcgttcaggatgcggcaaaagattcttcagtacaggtacagttaattgaaactaacgcccagggtgatatttcgaaagaaagtacctttgttgataccctcgtggcgcgtaatgtcgatgccattattttatcggcagtgtctgaaaatggcagtagccgtaccgttcgtcgcgccagtgaagcgggtattccggtgatttgctacaacacctgtattaatcaaaagggtgtcgataaatatgtctcggcgtatctggtcggcgatccactggaatttggtaaaaaactgggtaacgctgccgccgattattttattgccaataaaattgaccagccgaaaattgccgtcatcaattgcgaagcctttgaagtttgtgtgcagcgacgtaaaggatttgaagaagtattaaaatcccgcgttcccggcgcgcaaattgtcgctaatcaggaagggactgttttaaataaagcgatttccgttggtgaaaaactgattatctccacgccggatctcaacgccattatgggggagtcaggcggtgcgacactcggcgcggtaaaagcggtacgtaatcaaaatcaggccggaaaaattgctgttttcggttcggatatgacaaccgaaattgctcaggagctggaaaacaatcaggtgctgaaagcggtagtggatatttccggtaagaaaatgggcaatgctgttttcgcgcaaacattgaaggttatcaataaacaagccgacggtgaaaaagtgattcaggtgccaatcgatctctataccaaaacggaagatggtaaacagtggctggcaacgcacgttgatggtctgccctaa

SEQ ID NO: 483408 - DNA, 2700 bp, Shigella sonnei
gtgaaagggggtgaagggcatcagagcgttttcccaccggatttgactgcggtgtttgatcacggcaaacgggccgtctccgctttccccatcgctaccggcacttactacaaagtggactactccgctggagtggacatttctcgctataaaaatgtgcccgttccaacctcatatatggccgaaaaatcgcagtacgattttgtcggcgcgtggtgtcacgatgaagatggcggtttgctgcacgttgccaaccaccatattgcgccaggtaaaaaacagtggagttggggacacagtgaatttggccaggcgtgggataagagtctgaccgacaataacggcccgtatatcgaactgatgaccggtatttttgccgataaccagcccgattttacctggcttgatgcttacgaagagaagcgttttgagcagtatttcctgccttatcattctctgggcatggtgcaaaatgcctcccgcgatgcggtgataaaactccagcgtagtgagcaggggattgagtgggggctgtatgccatctctccgttgaacggataccgcctggcgatccacgaaatcggcaaatgcaacgcgttacttgatgatgccgtggcactgatgcctgcgaccgccatccagggcgtgttgcacggtatcaatcctgataggctgaccattgagctttccgatgccgacggcaatattgtactgagttatcaggaacatcagccgcaagcgttgccgttaccggacgtcgccaaagcgccactggcagcacaagacattaccagtacagatgaagcctggtttatcggtcagcatctggagcaatatcatcacgccagccgttcaccgttcgattactacctgcgcggcgtggcgctggacccgctggattatcgctgtaacctggcgctggcgatgctggaatataaccgcgcagatttcccgcaagcggtggcgtatgccagtcaggcgctgaaacgcgcacatgcgctgaacaaaaacccgcagtgtggacaagcaagtttgattcgcgccagtgcttacgaacgtcagggacaatatcaacaagccgaagaggatttctggcgtgcggtctggagcggcaacagcaaagccggtggctattatggcctggcacgactggcggcgcgtaatggtaacttcgacgctggtctggatttttgccaacaaagtcttcgcgcctgcccaaccaatcaggaagtgctttgcctgcataatctgctgctggtgttaagtggtcgtcaggacaacgcgcgtttgcagcgcgcgaaactgctgcgtgattatccgctgaacgccattctgtggtggctgaactggttcgatggtcgtagcgaatcagccctcgcgcagtggcgcggtctgtgtcagggacgcgacgttaacgccctgatgaccgccgggcaactgattaactggggaatgcccactctggcgacagagatgctgaacgcactggactgtcagcgcacgttatcgctttatctacaagccagcttgctgccgaaagccgaacgcggcgaactggtcgcaaaagccattgatgtcttcccgcagtttgtccgtttcccgaatacgctggaagaagtggcggcgctggagagtattgaagagtgctggtttgcccgtcatttactggcctgcttctactacaacaagcgcagctacaacaaagccattactttatggcaacgttgcgtagagatgtcgccggagtttgccgatggctggcgcgggttggcgatccatgcgtggaataagcaacacgattatgaactggccgcgcgttatcttgataatgcttatcagcttgcgccgcaggatgcacgtctgcttttcgaacgggatttgctggataagttaagtggagccacaccggagaaacgactggcgcgtctggaaaataatctggaaattgcgctgaaacgcgacgacatgaccgcagaactgctcaatttgtggcatctcacgggtcaggcagacaaagcggcggacattctcgccacgcgcaaattccacccgtgggaaggcggggaagggaaggtcaccagtcagtttatcctcaaccagttattacgcgcctggcagcatcttgatgccagacagccgcagcaggcctgcgaactgcttcatgccgcgctgcattatccggagaatttaagcgaaggccgtttaccggggcaaactgataacgacatctggttctggcaggcgatatgcgccaacgcgcagggcgatgaaactgaagcgacgcgttgtttacgtctggcggcgaccggcgatcgcaccattaacatccacagttattacaacgatcagccggttgattatctcttctggcaaggaatggcgctgcgactgctgggcgaacaacaaatcgcacagcaactgtttagtgaaatgaaacagtgggcgcaagagatggcgaaaaccagtattgaggcggatttctttgctgtttcacaacctgacctgttgtcgctgtatggcgatttacaacagcagcataaagaaaaatgcctgatggtggcgatgctggcgtccgcgggactcggggaggttgcgcaatatgaatctgctcgcgctgaattgacggcgattaatccggcctggccgaaagcggcattattcaccaccgtgatgccttttatttttaactacgttcactaa

SEQ ID NO: 483409 - DNA, 582 bp, Shigella sonnei
atgactccagtaaaagtgtggcaagagcgcgttgagatcccgacctatgaaaccgggccgcaggatatacatcccatgttcctggaaaatcgcgtttatcagggatcgtccggcgcggtttatccctacggcgtgaccgatacgctgagcgagcagaaaaccctgaaatcctggcaggcggtgtggctggaaaacgactacatcaaagtgatgatcctgccggaactgggcggtcgggtgcatcgcgcgtgggataaagtgaaacagcgcgattttgtttatcacaatgaagtcattaaacctgcgctggtggggctgctggggccgtggatttccggtgggattgagtttaactggccgcaacatcatcgcccgaccacctttatgcccgttgatttcaccctcgaagcccatgaagacggtgcacagacggtgtgggtaggcgaaacggagccgatgcatggtttacaggtgatgacaggtttcaccctgcgccctgggcggcgctggaaatcgccagccgcgtctataacggcaacgccacgccgcgtcatttcttgtggtgggccaacccggcagtga

SEQ ID NO: 483410 - DNA, 897 bp, Shigella sonnei
atgagagcctgcattaacaatcaacagattcgccaccataacaaatgcgtgattctggaactgctgtaccggcaaaagcgcgccaataaatcaacgctggcccggctggcgcaaatttcgattccggcagtcagtaatattttgcaggaactggaaagcgaaaaacgggtggtgaatatcgacgatgaaagccagacgcgcgggcatagtagcggtacatggctgattgcgccggaaggtgactggacgctgtgcctgaacgtgacgcccaccagtattgagtgtcaggttgctaatgcttgtttaagtccgaaaggtgaatttgagtatttacagattgatgcaccgacgccgcaggcgctgctgtccgaaatcgaaaaatgctggcatcgccaccgtaaattgtggccggaccgcaccatcaatctggcgctggcaatccacggtcaggttgatccggtgaccggcgtgtcgcaaaccatgccgcaagcgccgtggacaacgccggttgaggtgaagtatctgctggaagagaagctcggcattcgggtgatggtcgataatgactgcgtgatgctggcgctggcggagaaatggcaaaataattcgcagaaacgggatttctgcgtgatcaacgttgattacggcattggctcgtcgttcgtgattaacgagcaaatttatcgcggcagtttgtatggtagcggacagattagtcacaccatcgttaatccggatggcgtcgtctgcgactgtggacgttacggctgcctggaaaccgtcgcctcgttaagtgcattaaaaaaacaggcgcgggtatggctaaaatcacaaccggttaatactcagcttgatccggaaaaactgactacagcgcagttaatcgctgcctggtag

SEQ ID NO: 483411 - DNA, 243 bp, Shigella sonnei
ttgagtctgtataacttcctcaacatcctcaatattaatcagatttggttgtacggtcgcagttgtgcctttggtgagcactggcttaataccattattcgccagacgggatttaacccgttcgaccgcgacgaagggccgagcgtgaaagcaacgcaaattggctttgggcaattaagccgcgcacaacaggtgttggggattggctatttgtatgttgaggcgcagttacgacagatttga

SEQ ID NO: 483412 - DNA, 1254 bp, Shigella sonnei
atgttaaagcgtgaaatgaacattgccgattatgatgccgaactgtggcaggctatggagcaggaaaaagtacgtcaggaagagcacatcgaactgatcgcctccgaaaactacaccagcccgcgcgtaatgcaggcgcagggttctcagctgaccaacaaatatgctgaaggttatccgggcaaacgctactacggcggttgcgagtatgttgatatcgttgaacaactggcgatcgatcgtgcgaaagaactgttcggcgctgactacgctaacgtccagccgcactccggctcccaggctaactttgcggtctacaccgcgctgctggaaccaggtgataccgttctgggtatgaacctggcgcatggcggtcacctgactcacggttctccggttaacttctccggtaaactgtacaacatcgttccttacggtatcgatgctaccggtcatatcgactacgccgatctggaaaaacaagccaaagaacacaagccgaaaatgattatcggtggtttctctgcatattccggcgtggttgactgggcgaaaatgcgtgaaatcgctgacagcatcggtgcttacctgttcgttgatatggcgcacgttgcgggcctggttgctgctggcgtctacccgaacccggttcctcatgctcacgttgttactaccaccactcacaaaaccctggcgggtccgcgcggcggcctgatcctggcgaaaggtggtagcgaagagctgtacaaaaaactgaactctgccgttttccctggtggtcagggcggtccgttgatgcacgtaatcgccggtaaagcggttgctctgaaagaagcgatggagcctgagttcaaaacttaccagcagcaggtcgcgaaaaacgctaaagcgatggtagaagtgttcctcgagcgcggctacaaagtggtttccggcggcactgataaccacctgttcctggttgatctggttgataaaaacctgaccggtaaagaagcagacgccgctctgggccgtgctaacatcaccgtcaacaaaaacagcgtaccgaacgatccgaagagcccgtttgtgacctccggtattcgcgtgggtactccggcgattacgcgtcgcggcttcaaagaagcagaagcgaaagaactggctggctggatgtgtgacgtgctggacagcatcaatgatgaagccgttatcgagcgcatcaaaggtaaagttctcgacatctgcgcacgtttcccggtttacgcataa

SEQ ID NO: 483413 - DNA, 1191 bp, Shigella sonnei
atgcttgacgctcaaaccatcgctacagtaaaagccaccatccctttactggtggaaacggggccaaagttaaccgcccatttctacgaccgtatgtttactcataacccagaactcaaagaaatttttaacatgagtaaccagcgtaatggcgatcaacgtgaagccctgtttaacgctattgccgcctacgccagtaatattgaaaacctgcctgcgctgctgccagcggtagaaaaaatcgcgcagaagcacaccagcttccagatcaaaccggaacagtacaacatcgtcggtgaacacctgttggcaacgctggacgaaatgttcagcccggggcaggaagtgctggacgcgtggggtaaagcctatggtgtactggctaatgtatttatcaatcgcgaggcggaaatctataacgaaaacgccagcaaagccggtggttgggaaggtactcgcgatttccgcattgtggctaaaacaccgcgcagcgcgcttatcaccagcttcgaactggagccggtcgacggtggcgcagtggcagaataccgtccggggcaatatctcggcgtctggctgaagccggaaggtttcccgcatcaggaaattcgtcagtactctttgactcgcaaaccggatggcaaaggctatcgtattgcggtgaaacgcgaagagggtgggcaggtatccaactggttgcacaatcacgccaatgttggcgatgtcgtgaaactggtcgctccggcaggtgatttctttatggctgtcgcagatgacacaccagtgacgttaatctctgccggtgttggtcaaacgccaatgctggcaatgctcgacacgctggcaaaagcaggccacacagcacaagtgaactggttccatgcggcagaaaatggcgatgttcacgcctttgccgatgaagttaaggaactggggcagtcactgccgcgctttaccgcgcacacctggcatcgtcagccgagcgaagccgatcgcgctaaaggtcagtttgatagcgaaggtctgatggatttgagcaaactggaaggtgcgttcagcgatccgacaatgcagttctatctatgcggcccggttggcttcatgcagtttaccgcgaaacagttagtggatctgggcgtgaagcaggaaaacattcattacgaatgctttggcccgcataaggtgctgtaa

SEQ ID NO: 483414 - DNA, 339 bp, Shigella sonnei; identical to SEQ ID NO: 458712

SEQ ID NO: 483415 - DNA, 1335 bp, Shigella sonnei
atgagccataaacctgcgcatttattattggtcgatgacgatccgggattgctgaaactgcttggcctgcgcctgaccagcgaaggctacagtgtggtcacggcggaaagtggcgctgaaggattacgggtactgaatcgcgaaaaagtagatttagttatcagcgacctgcggatggatgaaatggacggtatgcagctatttgctgaaatccagaaagtgcagccgggaatgccagtaattattcttactgcgcatggttctatccccgatgccgttgctgcaacacagcagggcgtttttagtttcctcaccaagcctgtcgataaagatgcgctatatcaggcaattgacgatgcgctggagcaatccgcgccagccaccgatgaacgctggcgcgaggcaattgtcacccgcagcccgctgatgctgcgtttgctggaacaggcgcggctggtggcgcaatcagacgtcagcgttttgattaacggtcagagcggcaccgggaaagagattttcgcccaggctatccacaacgccagcccgcgcaacagcaaaccatttattgctattaactgtggcgcattgcccgagcaattgctggagtcggagctgtttggtcatgcgcgtggcgcgtttactggcgctgtcagcaatcgcgaaggtttattccaggcggcggaaggcggaacgctatttctcgatgaaattggcgatatgcctgcgccgttacaggtcaaactgctgcgcgtgttgcaggagcgtaaagtgcgcccgctgggcagtaaccgcgatattgatatcaatgtgcggattatttctgccactcaccgtgatctgccaaaagcgatggcgcgcggggaattccgcgaagatctctattaccgcctcaacgttgtcagcctgaaaattccggcactggcggagcgcacagaagacattccgctactggcaaatcacctgttgcgccaggcggcagagcgacataaaccgtttgtccgcgcgttctctaccgatgcgatgaaacgcctgatgaccgcgagctggccgggtaatgtgcgccagttggtcaacgtgattgaacagtgcgtggcgctgacctcatctccggtgattagtgatgcgctggtggagcaggcgctggagggtgaaaatacggcgctgccaacctttgttgaggcacgtaatcagtttgaactcaactatttgcgtaagctgctgcaaatcaccaaaggcaacgtcacccacgcggcgagaatggcggggcgcaaccggacagaattttataaactgctttcccgacacgagctggatgcaaacgatttcaaggaatga

SEQ ID NO: 483416 - DNA, 714 bp, Shigella sonnei
atgcgacacatttttcaacgattattgccccgacggctgtggctggcagggctgccatgtctggcattgctgggttgcgtgcagaatcacaataagccagccattgatacgccagcagaagaaaaaattccggtttatcaactggctgactatctttctactgaatgtagcgacatctgggcgctgcaaggtaaatcaaccgaaaccaatccgctttactggctgcgggcgatggattgtgctgatcgtttaatgcctgcgcagtcgcgtcagcaagctcgccaatatgacgacggcagctggcaaaatacctttaaacaagggattttgctcgccgacgccaaaattacgccgtatgagcgccgccagctggtcgcgcgtattgaagcgttaagtaccgagatcccggcacaggttcgcccactgtatcaactctggcgcgacggtcaggcgctgcaactgcaactggcggaagagcgccaacgttacagtaaactccagcagtccagcgacagcgagctggatacattgcgccagcaacatcacgttctacagcagcaactggaactcaccacccgcaagctggaaaacctgaccgatattgaacgccagctctcgacccgcaaaccgactggaaatttctcgccggatacgccgcacgagagtgaaaagcccgcgccatccacccatgaggtcactcctgatgagccataa

SEQ ID NO: 483417 - DNA, 1383 bp, Shigella sonnei; identical to SEQ ID NO: 458709

SEQ ID NO: 483418 - DNA, 3888 bp, Shigella sonnei
atgatggaaattctgcgtggttcgcctgcactgtcggcattccgaatcaacaaactgctggcacgttttcaggctgccaggctcccggttcacaatatttacgccgagtatgtccattttgctgacctcaatgcgccgttaaacgatgatgagcacgcacaacttgaacgcctgctgaaatatggcccggcactcgccagccacgccccgcaaggcaaactcctgctggtgaccccgcgtcctggcaccatctctccctggtcttcgaaagcgaccgatattgcccataactgcgggctacaacaggtaaaccgccttgagcgcggcgttgcttactatatagaagccggtacgctgaccaatgaacaatggcagcaggttaccgctgaactgcacgaccgcatgatggaaacggtcttttttgctttagatgatgcagagcagttgtttgcccaccatcaaccgactccggttaccagcgttgatttgctggggcagggccgtcaggcgctgatcgacgctaacctgcgtcttggcctggctctggcggaagatgaaattgactatctgcaggatgctttcacaaagcttggtcgtaacccgaacgacatcgagctgtatatgttcgctcaggcgaactctgagcactgccgccacaaaatttttaatgccgactggattatcgacggtgaacagcagccgaaatcgctgttcaagatgatcaaaaatactttcgaaaccacgccagatcacgttctctctgcttataaagataacgccgccgtaatggaaggttctgaagtgggccgctactttgctgaccacgaaacgggccgctacgatttccatcaggaaccggcgcatattctgatgaaagtcgaaactcacaaccacccgacggcgatttctccgtggccgggcgcggcgacgggttccggcggcgaaattcgtgatgaaggcgccaccggacgcggtgcgaagccgaaggctggtctggttggtttctccgtttccaacctgcgaattcctggcttcgaacagccgtgggaagaagatttcggtaagcctgagcgcattgtcaccgcgctggacatcatgaccgaaggcccgctgggcggcgcggcgtttaacaacgaatttggtcgtccggcactgaatggctacttccgtacttatgaagaaaaagtgaacagccacaacggcgaagagctgcgcggttatcacaaaccgatcatgctggcgggcgggatcggcaacattcgcgccgatcacgtacaaaaaggcgagatcaacgtcggtgcgaagctggtcgttctcggcggcccggcaatgaacatcggtcttggcggcggagcggcgtcttccatggcgtcaggtcagtctgatgccgacctcgactttgcttccgtacagcgcgacaacccggagatggagcgtcgctgccaggaagtgatcgaccgttgctggcagcttggtgatgccaacccaatcctgtttatccacgacgtcggcgctggcggtctttctaacgcgatgccggaactggtgagcgacggcgggcgcggcggtaaatttgaactgcgcgatattctaagcgacgaaccgggcatgagcccgctggaaatctggtgtaacgaatcccaggaacgctacgtgctggcggttgctgccgatcaattaccgctgtttgacgaactgtgtaagcgtgagcgcgcaccctacgcggtgattggtgaagcgaccgaagaactgcatctttctctgcacgatcgtcattttgataatcagccgatcgatctgccgctggacgtcctgcttggtaaaacgccgaagatgacccgcgatgtacaaacgctgaaagcgaagggcgatgcgctggtccgtgaagggatcaccattgcagacgcggtgaaacgcgtactgcatctgccgaccgtggcagagaaaaccttcctggtgaccatcggcgaccgcagcgtaaccggcatggtagcgcgcgatcagatggtggggccgtggcaggtgccggtcgctaactgcgcggtcactaccgccagcctcgacagctactacggtgaagcgatggcgattggcgagcgtgcgccggttgcactgctggatttcgccgcctctgcccgtctggcggtcggtgaagcgttaaccaatattgccgcaacacagattggcgatatcaaacgcattaaactttccgccaactggatggcggcggcaggccaccctggtgaagatgcgggcctgtatgaagccgttaaagccgtgggcgaagagctttgtccggcgctgggcctgacgatcccggtgggtaaagactctatgtcgatgaaaacccgctggcaggaaggtaacgaagagcgcgaaatgacgtcgccgctgtcgctggtgatttctgcatttgcccgcgtggaagatgtgcgtcacaccatcacgccacagctttctaccgaagataacacactgctgctgattgatttgggcaaaggcaataacgcgctgggcgcaacggcgctggcgcaggtttatcgtcagcttggcgacaaaccggcagatgtacgcgacgtcgcgcaactgaaaggcttctatgacgcgattcaggcgctggttgcacagcgtaagctgctcgcataccacgaccgctctgatggcggcctgctggtaacgctggcggaaatggcctttgctggtcattgcggcattaacgcggatattgcctctctgggcgacgatcgcctggcggcgttgtttaacgaagaactgggtgcggtgattcaggttcgtgccgctgaccgtgaagcggtcgagtccgtactggcacagcatgggcttgctgattgtgtccattatgtagggcaggcggtttccggtgaccgttttgtgattaccgccaacgggcagactgtattcagcgaaagccgcaccacgttgcgtgtctggtgggcagaaactacctggcagatgcagcgcctgcgtgacaacccggagtgtgctgaccaggagcaccaggcgaaatcaaacgacgccgatccgggcctgaatgtgaaactgtcgttcgatatcaacgaagatgtggcagcaccgtatattgccactggcgcacgtccgaaagttgctgtgctgcgtgagcagggcgtgaactcgcatgttgaaatggcggcagctttccaccgtgcaggctttgatgctatcgacgtgcatatgagtgacctgctgaccggacgcacgggcctggaagatttccacgccctggtcgcgtgcggtggtttctcctacggtgatgtgctgggtgccggtgaaggttgggcgaagtcaatcctgttcaatgaccgtgtacgcgatgagtttgcaaccttcttccaccgtccgcaaacgctggcgctgggggtatgtaacggttgccagatgatgtctaacctgcgtgaactgatcccggggagcgagttgtggccacgttttgtgcgtaacacctccgatcgctttgaagcgcgtttcagcctggttgaagtaacccaaagcccgtctctgctgttgcaggggatggtgggctcgcaaatgccgattgctgtctctcatggtgaagggcgcgtggaagtgcgtgatgcggcgcatctggcggcactggaaagcaaagggctggtggcactgcgctatgtcgataacttcggcaaagtcactgaaacctacccggctaacccgaacggttcaccgaacggtattacggcggttacgactgaaagtggtcgagtcaccattatgatgccgcacccggaacgtgttttccgtactgtcagcaactcctggcatccggaaaactggggcgaggatggcccatggatgcgcattttccgcaatgcgcgtaagcagttggggtaa

SEQ ID NO: 483419 - DNA, 1557 bp, Shigella sonnei
ttgaaaaaattaaagattaattatctgttcatcggcattctggcactgctgctcgcggtcgctctctggccatccattccctggtttggtaaagccgacaaccgtatcgccgccattcaagcgcggggagagttgcgtgtgagcaccattcatactcccctgacttataacgaaatcaacgggaaaccttttggcctggattacgaactggcgaaacagtttgccgattacctcggtgtaaaactgaaagtgaccgtgcggcagaatatcagccagctgtttgacgacctcgataatggtaacgccgacctgctggcggcaggactggtctataacagtgagcgggtaaaaaattatcagcctggccctacctattattccgtgtcacaacaactggtttataaagtgagtcagtatcgcccgcgcacactgggcaacctgacggcggagcaactcaccgttgcaccgggtcacgtggtggttaacgatctccaaaccctgaaagacacaaaattcccggaattaagctggaaggtagacgacaaaaaaggctctgcggaattaatggaagatgtcatcgaaggaaaactcgattacaccattgctgattctgtcgccatcagcctgtttcagcgcgttcacccggagctcgccgtagcgctcgatatcaccgatgaacaaccggtgacttggtttagcccgttagatggcgataataccctttccgccgccctgctcgacttcttcaacgaaatgaatgaagacggtacgctggcacgcattgaagagaaatacctggggcatggcgatgattttgattacgtcgatacgcgcacatttttacgcgccgtcgatgcggtactgccgcagttaaagcccctgtttgagaaatacgccgaagaaattgactggcgtttgctggccgctattgcttatcaggaatcgcactgggatgcacaggccacttcaccgacgggtgtgcgcggcatgatgatgttaaccaaaaataccgcgcaaagcctcggcattacggatcgtaccgatgccgaacagagcatcagcggtggcgtgcgttatttgcaggatatgatgagtaaagtgccggaaagtgtgccggagaacgagcggatctggtttgccctcgctgcgtacaatatgggctatgcgcatatgctggatgcccgcgccctgacggcaaaaaccaaagggaatcctgacagttgggctgacgtaaaacagcgtctgcctttacttagccagaaaccctattacagcaagctgacttacggctacgctcgtggacatgaagcctacgcttatgtcgaaaatattcgtaagtatcagattagcctggtgggttatctgcaagagaaagagaagcaggctacagaagcggcgatgcaactggcgcaggattatccggcggtatcgcctacggagttgggcaaagagaaatttccttttctctcgtttctttcccagtcgtcatcaaactatttgacccattctccctctctgctgttttccaggaaagggagtgaagagaaacaaaattaa

SEQ ID NO: 483420 - DNA, 504 bp, Shigella sonnei
ttgtctgaagtcgaatttagccacgaatactggatgcgtcacgcgctgacgctggcgaaacgtgcctgggatgagcgggaagtgccggtcggcgcggtattagtgcataacaatcgggtaatcggcgaaggctggaaccgcccgattggtcgccatgatcccaccgcacatgcagaaatcatggccctgcggcagggtggtctggtgatgcaaaattatcgtctgatcgacgccacgttgtatgtcacgcttgaaccatgtgtaatgtgtgccggagcgatgatccacagtcgcattggtcgcgtggtctttggtgcgcgtgacgcgaaaactggcgctgcgggatctttaatggatgtgctgcatcatccgggtatgaatcaccgagtggaaattacggaaggaatactggcggatgagtgcgcggcgttgctcagtgacttctttcgcatgcgccgccaggaaattaaagcgcagaaaaaagcgcaaccctcgacggattaa

SEQ ID NO: 483421 - DNA, 636 bp, Shigella sonnei
ttggcaactcacgagcgtcgtgtggtgttttttgacttagatggaacattgcatcagcaggatatgttcggcagttttctgcgctatttactgcgtcgccaaccgctgaatgcgttacttgtcctgccgttgttaccgattatagccattgcgttattgataaaaggtcgtgcggcacgctggccgatgagtctgcttctgtgggggtgcacttttggtcacagcgaagcacgtttacagacgttgcaggccgatttcgtgcgctggtttcgcgacaatgttaccgcctttccgctggttcaggagcgattaaccacctacctgttaagttccgatgctgatatctggttgattaccggctctccgcagccgctggttgaagcggtttatttcgatacgccctggctgccgcgggttaatcttatcgccagccaaattcagcgtggctatggtggttgggtattgacgatgcgttgtctgggacatgaaaaggtcgcacaactggagcgcaaaatcggcactccgctgcggctgtacagtggctatagcgacagtaatcaggacaatccgctgctttatttctgtcagcatcgttggcgagtaaccccgcgcggtgaactccagcaactggaatag

SEQ ID NO: 483422 - DNA, 849 bp, Shigella sonnei; identical to SEQ ID NO: 458704

SEQ ID NO: 483423 - DNA, 399 bp, Shigella sonnei
atgcttattggctatgtacgcgtatcaacaaatgaccagaataccgatctacaacgtaatgcgttgaactgtgcaggatgcgagctgatttttgaagacaagataagtggcacaaagtccgaaaggccggggctgaaaaaactgctcaggacattatcggcaggcgacacactggttgtctggaagctggatcggctggggcgcagtatgcggcatcttgtcgtgctggtggaggagttgcgcgaacgaggcatcaactttcgtagtctgactgattcaattgataccagcacaccaatgggacgctttttcttccatgtgatgggtgccctggctgaaatggaacgtgaactgattgttgaacgaacaaaagcaggactggaagctgctcgcgcatag

SEQ ID NO: 483424 - DNA, 207 bp, Shigella sonnei; identical to SEQ ID NO: 470272

SEQ ID NO: 483425 - DNA, 1674 bp, Shigella sonnei
atggctgcgcaagggttcttactgattgccacgtttttactggtattaatggtgctggcgcgtcctttaggcagcgggctggcgcggctgattaatgacattcctcttccaggtacagcgggcgttgaacgtatactctttcgtttacctggcgtctctgaccatgagatgaactggaagcaatatctttgtgccattctcggcctgaacatgctggggctggcggtgctgttttttatgttgctcggtcagcactatctgccgcttaatccacagcagttgccggggctgtcgtgggatctggcgctgaataccgccgtcagctttgtcacgaataccaactggcaatcttatagcggtgaaaccacgttgagctatttcagccagatggcaggcttaacggtacaaaactttctttctgccgccagcgggattgcggtgatttttgccttcatccgtgcgtttactcgccagagcatgagcacactcgggaatgcctgggtcgatctgctacgcatcacgttatgggtgctagtccctgtggcgttgttgatcgcactgttttttattcaacaaggtgcgctgcaaaactttctgccctatcaggcagtgaataccgttgaaggagcgcaacagctgttacccatgggaccagtagcttctcaggaagcgatcaagatgctcggtactaacggcggtggcttctttaatgccaactcgtcgcatccgtttgaaaacccaaccgcactgaccaacttcgtgcagatgctggcgatcttcttgatcccaacagcgctgtgctttgcctttggtgaagtgacgggcgatcgccgccaggggcgcatgttgctgtgggcgatgtcagtgatttttgtcatctgcgtaggcgtggttatgtgggcagaagttcagggtaatcctcatctgctggcgctcggcgcagacagcagcatcaatatggaaggtaaagagagccgtttcggcgtgctggtcagtagcctgtttgcggtcgtgactacggcggcgtcctgtggcgcggtgattgcgatgcatgattcgtttaccgctctcggcggcatggtgccgatgtggctaatgcaaattggtgaagtggtgttcggcggtgtcggttctggtctttacggcatgatgctgtttgtcctgctggcggtgtttattgccgggctgatgattggtcgtacaccggaatatctgggtaaaaaaatcgacgtacgcgagatgaaactgactgcactggcgattctggttactccaacactggtactgatgggcgcggcgttggcgatgatgaccgacgccggacgtagcgccatgcttaaccctggcccgcatggttttagcgaagtgctgtacgccgtgtcgtccgccgctaacaacaacggcagcgcctttgccggattaagcgccaactctccgttctggaactgtttactggcgttctgcatgtttgtcggtcgcttcggggtgattatcccggtgatggcaattgccggttcgctggtgagtaaaaagagccaacccgccagctccggcacgctgccaacgcacggcccgctgtttgttggcctgttaatcggcaccgtgttgctggttggcgcactgacctttatccctgccctggcgcttggtccggtggcggaatatctctcctga

SEQ ID NO: 483426 - DNA, 2049 bp, Shigella sonnei
atgagtcgtaaacaactggcgctattcgaaccaacacttgtcgttcaggcgctgaaagaagcggtgaaaaaattaaacccgcaggcgcaatggcgcaatccggtgatgtttatcgtctggatcggcagtctgctgaccacctgtattagcatcgcgatggcaagcggtgcgatgcctggcaatgcgctgtttagcgcggcaattagcggctggctgtgggtcaccgtactgttcgctaatttcgccgaggcgctggcagaaggccgcagtaaagcgcaggccaacagtcttaaaggggtgaaaaaaactgcctttgcccgcaagctgcgtgagccgaaatatggcgctgcggcggacaaagttcctgccgatcaactgcgtaaaggtgacatcgtgctggtagaagctggcgatattatcccctgcgatggtgaagtcattgaaggcggcgcatcggtcgatgaaagcgccatcaccggggaatcggcaccggtgatccgtgaatccggcggcgattttgcctccgtcaccggcggcacgcgtattctttctgactggctggtgattgagtgtagcgttaaccccggtgagacatttctggatcggatgatcgcgatggtggaaggcgcacagcgacgcaaaacaccgaacgagattgccctgactatcctgctgattgctctgaccatcgtctttttactggcaaccgccacgctgtggccgttttccgcgtggggcggtaatgccgtgagtgtaacggtactggtggcgctgctggtctgtctgatcccaaccactattggcggcctgttgtcagcgatcggcgtcgccgggatgagtcggatgctgggcgcgaatgtgattgccaccagcggacgtgcagttgaagcggcaggtgacgttgacgttctgctactggataaaaccggcaccatcacactcggtaaccgtcaggcgtcggagtttatccccgcgcagggcgtggatgaaaaaacgctggctgacgccgcacaactggcttcgctggctgatgaaacgccggaaggtcgcagtattgtgatcctcgccaagcaacgttttaacctgcgcgagcgcgatgtgcagtcgctccatgccacctttgtaccgtttactgcgcaaagccggatgagcgggatcaacatcgacaaccgcatgatccgtaaaggttctgtcgatgccattcgccgccatattgaggctaacggcggtcacttccctgccgatgttgatcaaaaagtcgatcaggttgcgcgtcagggagccacgccgctggtggtggtggaaggttctcgtgtgctgggcgttattgcgctgaaagatatcgtcaaaggcggtattaaagagcgcttcgcccagctgcgcaaaatgggcattaaaacggtgatgattaccggcgataaccgtctgactgccgccgcgatagctgcggaagcgggtgtcgatgattttctcgccgaagcaacaccggaggccaagctggcattgatccgtcagtatcaggcggaaggtcgtttggtagcgatgaccggcgacggcaccaacgatgctccggcgctggcgcaggcagatgtcgcggtggcgatgaactccggcacccaggcggcgaaagaggcgggcaatatggtggatctcgactctaacccgaccaagttgatcgaggtggtgcacattggcaaacagatgctgatgacccgtggctcgctgaccaccttcagcattgccaacgatgtggcgaaatacttcgccattattccggcggcgttcgcggcaacatatccgcagttaaatgcgctgaacatcatgcgcctgcattcgcccgactccgccattctcagtgcggtcattttcaacgccttgattatcgtctttttgattcctctggcgttaaaaggcgtgagttataaaccgcttaccgcttctgccatgttgcgccgtaacttatggatttacggtctgggtgggctgctggtgccgtttattggtatcaaagtcattgatttactgctgaccgtttgcggtctggtgtga

SEQ ID NO: 483427 - DNA, 573 bp, Shigella sonnei
atgagtggattacgtccggcattatcgacatttctctttctgttattgattactggcggcgtttacccgctgctgaccaccgcactggggcaatggtggtttccctggcaggccaacggttcgttgatccgtgaaggtgatacggtgcgtggctcggcattaatcgggcagaattttaccggcaacggctattttcatggtcgcccgtcagcaacggctgaaatgccctataatccacaggcttctggcgggagcaatctggcggtcagtaaccctgagctggataaactaatagccgcacgcgttgctgcattacgggccgctaacccggatgccagcgcgagcattccggttgaactggtgacggcatcggcaagcgggctggacaataatatcaccccgcaagcggcggcctggcagatcccacgcatcgcgaaagcgcgtaatctcagcgttgaacagctcacgcagctgatcgcaaaatacagccaacaaccgctggtgaaatatatcggccagccggtcgtcaacattgtcgaactcaatctggcgctggataagcttgatgaataa

SEQ ID NO: 483428 - DNA, 2685 bp, Shigella sonnei
atgaataacgaacccttacgtcccgaccccgatcgtctgctggaacaaactgccgcgccgcatcgggggaagctgaaagttttcttcggtgcctgtgcaggcgtcgggaagacctgggcgatgctggcagaagcccagcgactgcgggcgcaagggctggatattgtggttggcgtggtagaaacccacgggcgaaaagataccgccgcaatgctggaagggctggctgttctgccgccaaaacgcctggcgtaccgtgggcggcacatctgcgagtttgacctcgatgccgccctcgcccgccgtccggcgctgatcttaatggacgaactggcgcacagtaatgcgccaggttctcgtcaccctaaacgctggcaggacatcgaagagctgctggaagcaggcattgatgttttcactaccgtcaacgttcagcatctggaaagtctgaatgatgtggtcagcggcgtcaccggaattcaggtacgggaaaccgtgcccgatccttttttcgatgccgccgacgacgtggttctggtggacttgcccccggacgatctgcgccagcggctgaaagaaggcaaagtctatattgccgggcaggcggagcgcgccattgaacattttttccgcaaaggcaatctgatcgccctgcgcgaactggcactgcgccgtactgccgatcgcgttgatgagcaaatgcgcgcctggcgggggcatcctagcgaagagaaagtctggcacacgcgcgacgcgatccttttatgcatcggccataacaccggtagtgagaagctggtccgcgcggcggcgcggctggcgtcacggctgggtagcgtctggcacgcggtgtatgttgaaacccctgccctgcatcgcttaccggagaaaaaacgtcgtgcaattctcagcgccttacgtctggcgcaggaactgggcgcggagacggcaacactttctgatccagcggaagagaaagcggtagtgcgttatgcccgtgaacataatctcggcaagattattctcggtcgcccggcctcgcgccgctggtggcgtcgggaaacgtttgctgaccgactggcgcgcatcgcccccgatctcgatcaggtgctggtcgcgcttgatgaaccacccgcccgcacgattaacaacgcgccggatagccgctcttttaaagacaagtggcgggtacagattcagggatgcgtggttgccgccgcgttatgcgccgttatcaccttaattgccatgcagtggctgatggcgtttgatgccgccaacctggtgatgctgtatctgcttggcgtggtggtggtggcgctattttatggacgctggccttcggtggttgccaccgtcattaatgtggtgagtttcgatctcttttttatcgccccacgcggcacgctcgccgtctctgatgtgcaatatctgctgaccttcgcggtgatgttaaccgtcgggctggtgatcgggaaccttactgctggcgtgcgttatcaggcgcgggtagcccgttaccgcgagcaacgcacacggcacttatatgaaatgtcgaaagctctggcggtgggccgcagtccgcaggacatcgccgccaccagcgaacaatttattgcctccacgtttcatgcccgcagtcaggtgttgttgcccgatgacaacggtaaattgcagccgttaacacatccgcaaggaatgacgccatgggacgatgccatcgcgcagtggagttttgataaaggcctgcctgcgggcgcgggcaccgacacgttacccggtgtaccgtaccagattttgccgctaaaaagcggcgagaaaacctacgggctggtggtggtggagccggggaatctgcgccagttgatgatcccggaacagcagcgcctgctggagacgtttacgctgttagtcgccaatgcccttgagcggctgacgctaaccgccagcgaagaacaggcgcggatggcaagcgaacgtgaacagatccgcaacgccctgctggcagcgctttcgcatgatttacgcacgccgcttacggtgctgtttggtcaggcagaaatcttaacgctcgatctggcaagcgaaggatcaccccacgcccgccaggccagcgagattcgtcagcatgtgctgaacactacccgactggtgaataatctactggatatggcgcgaattcagtccggcggctttaatttgaagaaagagtggttaacgctggaagaagtagtcggcagcgcgctgcaaatgctggaaccgggtttatcgtcgcccatcaatctttctctgccagaaccgctgaccttaatccacgttgacgggccactctttgaacgggtgctgattaatctgctggagaacgcggtgaaatatgcgggtgcgcaggccgaaattggtatcgatgcccactttgagggcgaaaatctacaactggatgtctgggataacggccccggtcttccgccaggccaggagcagacgatatttgataagtttgctcgcgggaataaagagtcggcggtgccgggtgtcgggcttgggttggcaatttgtcgggcgattgtggatgtacacggcggcaccattaccgcgttcaaccgaccggaaggtggtgcctgttttcgtgttacacttccccagcaaaccgctcctgaacttgaagactttcatgaggatatgtga

SEQ ID NO: 483429 - DNA, 678 bp, Shigella sonnei
gtgacaaacgttctgattgttgaagatgaacaggctattcgtcgctttctgcgcacggcgctggagggcgacgggatgcgcgtctttgaggccgaaactctgcaacgcggcttgctggaagcggcaacccgtaagccagatttgattattctcgatctcggcctgcccgatggtgatgggattgagtttatccgcgacctgcgccagtggagcccggtgccggtgattgtgctttccgcacgcagcgaagagagcgacaagatcgccgcgctggatgccggagcggatgattatctgagtaagccgtttggcattggcgaattgcaggcccgtctgcgcgtcgctttacgccgccactccgccaccgccgcgcccgatccgctggtgaaattttccgatgttaccgtcgatttagccgcccgcgtgattcaccggggtgaggaagaggtgcatctcacaccaattgagttccgcctgctggcggtgctgctcaacaatgccggaaaagtactcacccagcgccagctccttaaccaggtgtgggggccaaacgcggtcgaacacagtcactatttgcgtatttatatgggacatctgcgacaaaaactggaacaggatccggcccggcctcgccacttcattactgaaaccggtattggatatcggtttatgctttga

SEQ ID NO: 483430 - DNA, 2199 bp, Shigella sonnei
atgtcagaattaaaaattgccgttagccgttcttgcccggattgtttttccactcatcgtgcatgcgtgaatattgacgaaagtaattatattgacgttgccgccattattttatcagtcaatgatgttgaacgtggaaaactcgatgaaatagacgctactggctatggcattcctgtttttattgcaacggaaaatgaagaacgtgtaccagcagaatatctgccacgtatttctggtgtcttcgagcattgcgaatcacggaaagagttttatggacgtcagttagaaaccgctgctagccattatgaaacgcaactgcgcccgcccttcttccgcgcactggtcgattatgtcaatcagggcaatagcgcttttgactgcccgggtcatcagggaggtgagtttttccgtcgtcatccggcagggaatcagttcgtggagtacttcggagaaacgctgttccgttccgacttatgcaacgcagacgtagcaatgggcgatctgctgattcacgaaggcgcgccatgcattgcacagcaacatgcggcaaaagtgtttaatgccgataaaacatacttcgttctaaatggcacttcatcttctaacaaagtggttttaaacgccctgctaacaccgggtgatctggtgctgtttgatcgcaataaccacaaatctaaccaccacggagcgttgctacaggctggtgcaacaccggtttatctggaaacggcacgtaacccgtatggctttatcggtggcattgatgcgcactgttttgaagaaagttacctgcgtgagctgatcgcggaagtcgcaccgcagcgggcaaaagaggctcgtcctttccgcctcgctgtgattcagttaggcacctacgacggtacgatttataacgcccgccaggtggtggataaaattggtcatctgtgtgactacattctgtttgactccgcatgggttggctatgagcaatttatcccgatgatggctgactgttcgccgctgttgctggatcttaatgagaacgatccgggtattctggttacgcaatccgtacataaacagcaggctggtttttctcaaacttcacaaatccataaaaaagacagccacatcaaagggcaacagcgttatgtaccgcacaaacgcatgaacaacgcctttatgatgcacgcctccaccagcccgttctatccgctgtttgccgcactggatatcaacgccaaaatgcatgaaggtgtcagcggtcgtaatatgtggatggattgtgtggtaaatggcattaatgcccgcaaactgatcctcgataactgtcagcatattcgtccgttcgtacctgaactggtggatggtaaaccctggcagtcgtatgaaacagcgcaaattgcggttgatctgcgcttcttccagtttgtaccaggggaacactggcattcttttgaaggctatgcagagaatcaatactttgtcgatccttgcaaactgttgctgacaaccccaggtattgatgcacgtaacggcgaatatgaagcgttcggtgtacccgcgacgattcttgctaacttcctgcgcgaaaatggcgtagtgccggaaaaatgcgatcttaactccatcctcttcctgctgactccggcagaagatatggccaaacttcagcaacttgttgccctgctggtacgcttcgaaaaactgcttgagtccgacgcgccattagcagaagtgctgccttccatctacaaacagcatgaagagcgctacgccggttataccctgcgtcagttgtgccaggaaatgcatgatttgtatgcccgccacaacgtgaaacaactgcaaaaagagatgttccgcaaagcgcacttcccacacgtcagcatgaatccgcaagaagccaactacgcctatttacgcggtgaagtggagctggttcgtctgccggatgccgaaggtcgtatcgctgccgaaggggcgcttccttatcctccgggtgtgctgtgtgttgttccgggtgaaatctggggtggtgctgttttgcgttacttcagcgctctggaagaagggatcaacctgctgccaggttttgcaccggagctgcagggtgtctatatcgaagaacatgatggtcgtaagcaagtttggtgctatgtcatcaagcctcgtgatgcgcaaagcaccctgttgaaaggggaaaaattatga

SEQ ID NO: 483431 - DNA, 1320 bp, Shigella sonnei
atgagtcaggctaaatcgaacaaaatgggcgtcgttcagttaaccatactgacgatggtcaacatgatgggctccggtatcatcatgctgccgacaaagcttgccgaagttgggacaatttcaattatctcctggctggtgacagccgtaggctcaatggcactggcatgggcattcgcaaaatgcggtatgttcagccgtaaatcaggtggtatgggcggttatgccgagtatgctttcggtaaatccggtaactttatggcgaactatacctacggcgtctcactgctgattgctaacgtcgcgattgctatttcggcggttggttacggcaccgaactgctcggcgcgagtttgtcgccagtgcagattggtcttgcgaccatcggggtgctgtggatttgtaccgtggctaactttggtggtgcgcgcattaccgggcaaatcagtagcattaccgtgtggggggtcattattccggtggtaggcctgtgcattatcggctggttctggtttagcccgacgctttacgttgattcctggaatccgcatcatgcaccgttcttcagtgcagtaggttcttccatcgctatgacgctgtgggcttttctcggtctggagtctgcgtgtgcgaatactgatgtagtggaaaacccggaacgtaatgtgccaatcgcggtactcggcggtacgttaggtgcggcggtgatttatatcgtctccaccaacgtgattgcagggattgtgcctaatatggagctggcaaattcaacggcaccatttggcctggccttcgcacagatgttcacaccagaagtgggtaaagtcattatggcgctgatggtgatgtcctgctgcggttcgctgcttggctggcagttcaccattgcccaggtgtttaagtcttcatctgatgaaggctacttccctaaaattttctcccgtgtaaccaaagtggatgcaccggtgcagggaatgttgaccattgtgattatccagagcgggttggcgctgatgacgattagcccgtcgctaaacagtcagttcaacgtgctggttaacctggccgtggtgaccaatatcattccgtatattctgtcaatggcggcattagtcattattcagaaggtcgctaatgtgcccccctcaaaagcgaaagttgcaaactttgttgcttttgttggcgcgatgtatagcttttatgcgctgtactcatccggggaagaagccatgctgtacggttccatcgtgaccttccttggttggacactgtatggtctggtatcaccacgctttgaactgaaaaataaacacggttaa

SEQ ID NO: 483432 - DNA, 1641 bp, Shigella sonnei
atggcaatccacaatcgtgcaggccaacctgcacaacagagtgatttgattaacgtcgcccaactgacggcgcaatattatgtactgaaaccagaagcagggaatgcggagcacgcggtgaaattcggtacttccggtcaccgtggcagtgcagcgcgccacagctttaacgagccgcacattctggcgatcgctcaggcaattgctgaagaacgtgcgaaaaacggcatcactggcccttgctatgtgggtaaagatactcacgccctgtccgagcctgcgttcatttccgtactggaagtgctggcagcgaacggcgttgatgtcattgtgcaggaaaacaatggcttcactccgacgcctgccgtttccaatgccatcctggttcataataaaaaaggtggcccgctggcagacggtatcgtgattacaccctcccataacccgccggaagatggtggtatcaagtacaatccgccaaatggtggcccggctgataccaacgtcactaaagtggtggaagatcgtgccaacgcactgatggccgatggcctgaaaggcgtgaagcgtatctccctcgacgaagcgatggcatccggtcatgtgaaagagcaggatctggtgcagcagtttgtggaaggtctggccgatatcgttgatatggcggcgattcagaaaacgggcctgacgctgggcgttgatccgctgggtggttccggtatcgaatactggaagcgaattggcgagtattacaacctcaacctgaccatcgttaacgatcaggtcgatcaaaccttccgctttatgcacctcgataaagacggcgcgatccgtatggactgctcctccgagtgtgcgatggcgggcctgctggcattgcgtgataagttcgatctggcgtttgctaacgacccggattatgaccgtcacggtatcgtcactccggcaggtttgatgaatccgaaccactacctggcggtggcgatcaactacctgttccagcatcgtccgcagtggggcaaagatgttgctgtcggtaaaacgctggtttcttctgcgatgatcgaccgtgtggtcaatgacttgggccgcaagctggtagaagtcccggtaggtttcaaatggtttgttgatggtctgttcgacggcagcttcggctttggcggcgaagagagcgcaggggcttccttcctgcgtttcgacggcacgccgtggtccaccgacaaagacggcatcatcatgtgtctgctggcggcggaaatcaccgctgtcaccggtaagaacccgcaggaacactacaacgaactggcaaaacgctttggtgcgccgagctacaaccgtttgcaggcagctgcgacttccgcacaaaaagcggcgctgtctaagctgtctccggaaatggtgagcgccagcaccctggcaggcgacccgatcaccgcgcgcctgacggcggcaccgggcaatggtgcttctatcggcggtctgaaagtgatgactgacaacggctggttcgccgcgcgtccgtcaggcacggaagacgcatataagatctactgcgaaagcttcctcggtgaagaacatcgcaagcagattgagaaagaagcggttgagattgttagcgaagttctgaaaaacgcgtaa

SEQ ID NO: 483433 - DNA, 546 bp, Shigella sonnei; identical to SEQ ID NO: 458288

SEQ ID NO: 483434 - DNA, 765 bp, Shigella sonnei
atgaaattgaatatccgcgcgcaaactgcacaaaaccagcacaataattctcccatcgttcttgtccatggtctgtttggtagcctcgacaaccttggcgtactggctcgcgatctggtaaacgatcacaatatcatccaggttgatatgcgtaaccacggtctttcaccgagagatccggtaatgaattacccggcgatggcgcaggatcttgttgatactctggatgcacagcagatcgacaaagcaacatttatcggtcactccatgggcggtaaagcggtaatggcacttacggcactggcccgcgatcgcatcgataaactggtggcgatcgatatcgcaccggtcgactatcacgtacgccgtcatgatgagattttcgcggctatcaacgcagtcagtgaatcggacgcacaaactcgccagcaagcagcagcaataatgcaccagcatcttaatgaagaaggggtgattcagtttctgttgaaatcttttgttgacggggagtggcgctttaacgtgccggtattgtgggatcagtatccgcatattgtgggttgggagaaaatcccggcatgggatcaccctgccctgtttatccctggcggcaattctccgtatgttagcgagcagtaccgtgatgatttactggcacaatttccacaggcacgggcgcatgtgattgcaggcgcgggtcactgggtccatgctgaaaaaccggatgcggtattacgcgctatccgtcgctatctcaatgattaa

SEQ ID NO: 483435 - DNA, 363 bp, Shigella sonnei; identical to SEQ ID NO: 458290

SEQ ID NO: 483436 - DNA, 531 bp, Shigella sonnei; identical to SEQ ID NO: 458291

SEQ ID NO: 483437 - DNA, 447 bp, Shigella sonnei
atgactgataacaataccgccctaaagaaagctggcctgaaagtaacgcttcctcgtttaaaaatcctagaagttcttcaggagccggacaaccatcacgtcagtgcggaagatttatacaaacgtctgatcgatatgggtgaagaaattggtctggctacggtatatcgcgtactgaaccagtttgacgacgctggtatcgtcacccgccacaattttgaaggcggtaaatccgtatttgaactgacacagcaacatcaccacgatcacctgatctgcctcgactgcggcaaggttatcgaatttagtgatgattccatcgaagcgcgtcagcgtgaaattgccgcaaaacatggcattcgcctgactaaccacagtctctatctttacggtcactgtgccgaaggcgattgccgcgaagatgaacatgcgcacgaaggcaaataa

SEQ ID NO: 483438 - DNA, 327 bp, Shigella sonnei
atgaaaaaactgattctcatcgccataatggcatcggggctggtagcttgtgcgcaatcaaccgcgccacaggaagacagtcgtctgaaagaggcatacagcgcctgtatcaacaccgcacaaggttcgccagaaaaaattgaagcctgccagagcgtgttaaacgtgctgaagaaagagaaacaacatcagcattttgccgaccaggaaagtgtccgcgtactggattatcagcagtatctgcgtgcaacgcaaaccggaaatgatcaggcggtgaaagccgattgtgataaagtttggcaggaaattcgcagtaataacaaataa

SEQ ID NO: 483439 - DNA, 1170 bp, Shigella sonnei
atgcgtacgtttagtggcaaacgtagtacgctggcgctggctatcgccggtgttacagcaatgtcgggctttatggcaatgccggaggctcgcgccgaaggattcatcgacgattcaaccttaaccggcggtatatattactggcagcgtgaacgcgaccgtaaagatgttaccgacggcgacaaatacaaaaccaacctttctcactccacctggaatgccaacctcgattttcagtccggttatgctgctgatatgttcggccttgatattgctgcgtttacggcgattgaaatggcggaaaacggcgacagctcccacccgaacgaaatcgcgttttcaaaaagtaataaagcctatgacgaagactggtccggcgacaaaagcggtataagcctgtataaagctgcggccaaatttaaatacggtccggtttgggcgagggcaggttacattcagccaactggtcaaacgctgttagcgccgcactggagctttatgccaggtacttatcagggggcggaagccggggcgaattttgattacggcgatgctggtgcgttgagtttctcctacatgtggaccaacgaatacaaagcgccgtggcatctggaaatggatgagttttatcagaacgataaaaccaccaaagttgattatctgcactcccttggggcgaaatacgacttcaaaaataacttcgtactggaagcggcatttggtcaggcggaagggtatatcgatcaatattttgccaaagccagctacaaatttgatatcgccggtagcccgttaaccaccagctaccagttctatggtacgcgcgataaagttgacgatcgcagcgtcaacgacctttatgacggcaccgcctggctgcaagcgttgacctttggttaccgggcggctgacgtagtggatttgcgcctcgaaggcacctgggttaaggctgacggtcagcagggatacttcctgcaacgtatgactccaacctacgcttcctccaacggccgcctggatatctggtgggataaccgttccgacttcaacgctaacggcgaaaaagcggtcttcttcggtgcgatgtatgacctgaaaaactggaatcttccaggcttcgccatcggcgcttcctacgtttacgcatgggatgctaaacctgcgacctag

SEQ ID NO: 483440 - DNA, 1665 bp, Shigella sonnei
atgagtgaggcagaagcccgcccgactaactttatccgtcagatcatcgatgaagatctggccagtggtaagcacaccacagtacacacccgtttcccgccggagccgaatggctatctgcatattggccatgcgaaatctatctgcctgaacttcgggatcgcccaggactataaaggccagtgcaacctgcgtttcgacgacactaacccggtaaaagaagatatcgagtatgttgagtcgatcaaaaacgacgtagagtggttaggttttcactggtctggtaacgtccgttactcctccgattattttgatcagctccacgcctatgcgatcgaactgatcaataaaggcctggcgtacgttgatgaactgacgccggaacagatccgcgaataccgcggcaccctgacgcaaccgggtaaaaacagcccgtaccgcgaccgcagcgttgaagagaacctggcgctgttcgaaaaaatgcgtgccggtggttttgaagaaggtaaagcctgcctgcgtgcgaaaatcgacatggcttcaccgtttatcgtgatgcgcgatccggtgctgtaccgcattaaatttgctgaacaccaccagactggcaacaagtggtgcatctacccgatgtacgacttcacccactgcatcagcgatgccctggaaggtattacgcactctctgtgtacgcttgagttccaggacaaccgtcgcctgtacgactgggtgctggacaacatcaccattcctgttcacccgcgccagtacgaattctcgcgcctgaatctggaatacactgtgatgtccaagcgtaagctgaacctgctggtgaccgacaagcacgttgaaggctgggatgacccgcgtatgccgaccatttccggtctgcgtcgtcgtggttacactgctgcttctattcgtgagttctgcaaacgcatcggcgtgaccaagcaggacaacaccattgagatggcgtcgctggaatcctgcatccgtgaagatctcaacgaaaacgccccgcgcgcaatggcggttatcgatccggtgaaactggttatcgaaaactatcagggcgaaggcgaaatggttaccatgccgaaccatccgaacaaaccggaaatgggtagccgccaggtgccgtttagcggtgagatttggatcgatcgcgccgatttccgcgaagaagctaacaagcagtacaaacgtctggtgctgggtaaagaagtgcgtctgcgtaatgcttacgtcattaaggcagaacgcgtggagaaagatgccgaaggcaatatcaccaccatcttctgtacttatgacgccgacaccttaagcaaagatccggcagatggtcgtaaagtcaaaggtgttattcactgggtgagcgcggcacatgcgctgccggttgaaatccgtctgtacgaccgtctgttcagcgtgccgaaccctggtgctgcggatgatttcctgtcggtgattaacccggaatcgctggtgatcaaacagggctttgctgaaccgtcgctgaaagatgcggttgcgggtaaagcattccagtttgagcgtgaaggttacttctgcctcgatagccgccattctacggcggaaaaaccggtatttaaccgcaccgttgggctgcgtgatacctgggcgaaagtaggcgagtaa

SEQ ID NO: 483441 - DNA, 1947 bp, Shigella sonnei
atgaatattttaggttttttccagcgactcggtagggcgttacagctccctatcgcggtgctgccggtggcggcactgttgctgcgattcggtcagccagatttacttaacgttgcgtttattgcccaggcgggcggtgcgatttttgataacctcgcattaatcttcgccatcggtgtggcatccagctggtcgaaagacagcgcaggtgcggcggcgctggcgggtgcggtaggttactttgtgttaaccaaagcgatggtgaccatcaacccagaaattaacatgggtgtactggcgggtatcattaccggtctggttggtggcgcagcctataaccgttggtccgatattaaactgccggacttcctgagcttcttcggcggcaaacgctttgtgccgattgccaccggctttttctgcctggtgctggcggccatttttggttacgtctggccgccagtacagcacgctatccatgcaggcggcgagtggatcgtttctgcaggcgcgctgggttccggtatctttggtttcatcaaccgtctgctgatcccaaccggtctgcatcaggtgctgaacaccatcgcctggttccagattggtgaattcaccaacgcggcgggtacggttttccacggcgacatcaaccgtttctacgctggtgacggcaccgcggggatgttcatgtccggcttcttcccgatcatgatgttcggtctgccgggtgcggcgctggcgatgtacttcgcagcaccgaaagagcgtcgtccgatggttggcgggatgctgctttctgttgctgttactgcgttcctgaccggtgtgactgagccgctggaattcctgttcatgttccttgctccgctgctgtacctcctgcacgcactgctgaccggtatcagcctgtttgtggcaacgctgctgggtatccatgctggcttctctttctctgcgggggctatcgactacgcgttgatgtataacctgccggccgccagccagaacgtctggatgctgctggtgatgggtgttgtcttcttcgctatctacttcgtggtgttcagtttggttatccgcatgttcaacctgaaaacgccgggtcgtgaagataaagaagacgagatcgtaactgaagaggctaacagcaatactgaagaaggtctgactcaactggcaaccaactatattgctgcggttggcggtactgacaacctgaaagcgattgacgcctgtattacccgtctgcgccttaccgtggctgactcagctcgcgtcaacgatgcgatgtgtaaacgtctgggtgcttctggtgtagtaaaactgaacaaacagaccattcaggtgattgttggcgcgaaagcagaatccattggcgatgcgatgaagaaagtcgttgcccgtggcccggtagcagctgcgtcagctgaagcaactccggcaactgccgctcctgtagcaaaaccgcaggctgtaccaaacgcggtatctatcgcggagctggtatcgccgattaccggtgatgtcgtggcactggatcaggtttctgacgaagcattcgccagcaaagcggtgggtgacggtgtggcggtgaaaccgacagataaaatcgtcgtatcaccagccgcagggacaatcgtgaaaatcttcaacaccaaccacgcgttctgcctagaaaccgaaaaaggcgcggagattgtcgtccacatgggtatcgacaccgtagcgctggaaggtaaaggctttaaacgtctggtggaagagggcgcgcaggtgagcgcagggcaaccgattctggaaatggatctggattacctgaacgctaacgcccgttcgatgattagcccggtggtttgcagcaatatcgacgatttcagtggcttgatcattaaagctcagggcaatgttgtggcgggtcaaacaccgctgtatgaaatcaaaaagtaa

SEQ ID NO: 483442 - DNA, 801 bp, Shigella sonnei
atgagactgatccccctaactaccgctgaacaggtcggcaaatgggctgctcgccatatcgtcaatcgtatcaatgcgttcaaaccgactgccgatcgtccgtttgttctgggcctgccgactggcggcacgccgatgaccacctataaagcgttagtcgaaatgcataaagcaggccaggtcagctttaagcacgttgtcaccttcaacatggacgaatatgtcggtctgccgaaagagcatccggaaagctactacagctttatgcaccgtaatttcttcgatcacgttgatattccagcagaaaacatcaaccttctcaacggcaacgccccggatatcgacgccgaatgccgccagtatgaagaaaaaatccgttcttacggaaaaattcatctgtttatgggcggtgtaggtaacgacggtcatattgcatttaacgaaccggcgtcttctctggcttctcgtactcgtatcaaaaccctgactcatgacactcgcgtcgcgaactctcgtttctttgataacgatgtcaatcaggtgccaaaatatgccctgactgtcggtgttggtacattgctggatgccgaagaagtgatgattctggtgctgggtagccagaaagcactggcactgcaggctgcagttgaaggttgcgtgaaccacatgtggaccatcagctgtctgcaactgcatccaaaagcgatcatggtgtgcgatgaaccttccaccatggagctgaaagttaagactttaagatatttcaatgaattagaagcagaaaatatcaaaggtctgtaa

SEQ ID NO: 483443 - DNA, 1149 bp, Shigella sonnei
atgtatgcattaacccagggccggatctttaccggccacgaatttcttgatgaccacgcggttgttatcgctgatggcctgattaaaagcgtctgtccggtagcggaactgccgccagagatcgaacaacgttcactgaacggggccattctctcccccggttttatcgatgtgcagttaaacggctgcggcggcgtacagtttaacgacaccgctgaagcggtcagcgtggaaacgctggaaatcatgcagaaagccaatgagaaatcaggctgtactaactatctgccgacgcttatcaccaccagcgatgagctgatgaaacagggcgtgcgcgttatgcgcgagtacctggcaagacatccgaatcaggcgttaggtctgcatctggaaggtccgtggctgaatctggtaaaaaaaggcacccataatccgaattttgtgcgtaagcctgatgccgcgctggtcgatttcctgtgtgaaaacgccgacgtcattaccaaagtgaccctggcaccggaaatggttcctgcggaagtcatcagcaaactggcaaatgccgggattgtggtttctgccggtcactccaacgcgacgttgaaagaagcgaaagccggtttccgcgcggggattacctttgccacccatctgtacaacgcgatgccgtatattaccggtcgtgaaccgggcctggcgggcgcgatcctcgacgaagctgacatttattgcggtattatcgctgatggcctgcatgttgattacgccaacattcgtaacgctaaacgccttaaaggcgacaaactgtgtctggttaccgacgccaccgcgccagcaggtgccaacattgaacagttcatttttgcgggtaaaacaatatactaccgtaacggactttgtgtggatgagaacggtacgttaagcggttcatccttaaccatgattgaaggcgtgcgtaatctggtcgaacattgcggtatcgcactggatgaagtgctgcgtatggcgacgctctatccggcgcgtgcgattggcgttgagaaacgtctcggcacactcgccgcaggtaaagtagccaacctgacctcattcacacctgattttaaaatcaccaagaccatcgttaacggtaacgaggtcgtaactcaataa

SEQ ID NO: 483444 - DNA, 1221 bp, Shigella sonnei
atgacaccaggcggacaagctcagataggtaatgttgatctcgtaaaacagcttaacagcgcggcggtttatcgcctgattgaccagtacgggccaatctcgcggattcagattgccgagcaaagccagcttgcccccgccagcgtaaccaaaattacgcgtcagcttatcgaacgcgggctgatcaaagaagttgatcagcaggcctccaccgggggccgccgcgctatctccatcgtcaccgaaacccgcaatttccacgcaatcggcgtacggcttggtcgtcacgacgccaccatcaccctgtttgatctcagcagcaaagtgctggcagaagaacattacccgctgccggaacgtacccagcaaacgctggaacatgccctgttgaatgccattgctcagtttattgatagctaccagcgcaaactgcgcgagctgatcgcgatttcggtgatcctgccagggcttgttgacccggacagcggcaaaattcattacatgccgcatattcaggtagaaaactgggggctggtagaagctctggaagaacgttttaaagtgacctgtttcgttggtcacgatatccgtagtctggcgctggcggagcactacttcggtgcaagtcaggattgcgaagactccattctggtgcgtgtccatcgcggaaccggggccgggattatctctaacgggcgcatttttattggccgcaacggtaacgtcggtgaaattggccatattcaggtcgaaccgctgggtgaacgctgccactgcggcaactttggctgcctggaaactatcgccgccaacgctgccattgaacaacgggtgttgaatctgttaaagcagggctaccagagccgcgtgccgctggacgactgcaccatcaaaactatctgcaaagccgcgaacaaaggcgatagtctggcgtcggaagtaattgagtatgtcggtcgtcatctgggtaaaaccatcgccattgctatcaacttatttaatccgcaaaaaattgttattgccggtgaaatcaccgaagccgataaagtgctgctccctgctattgaaagctgcattaatacccaggcgctgaaggcgtttcgtactaatctgccggtggtacgttctgagctggatcaccgctcggcaatcggcgcttttgcgctggtaaaacgcgccatgctcaacggtattttgctccagcatttgctggaaaattaa

SEQ ID NO: 483445 - DNA, 753 bp, Shigella sonnei
atgaccattaaaaatgtaatttgcgatatcgacggcgtgctgatgcacgataacgtcgccgtaccgggtgcagcggaatttttgcacgggattatggataaaggcctgccgctggtgttgctgaccaactatccttcgcagaccgggcaagatctggcgaaccgctttgccactgccggtgtcgatgtgccggatagcgtgttttatacctctgcgatggcgaccgccgatttcctgcgtcgccaggaaggcaagaaagcatatgtggtgggcgaaggcgcactgattcatgaactgtacaaagccggtttcactattaccgatgtgaaccctgatttcgtgattgttggcgaaacgcgttcctacaactgggacatgatgcataaagcggcctatttcgtcgctaacggtgcacgctttatcgccaccaacccggacacccacgggcgcggtttttatcccgcttgtggcgcgttgtgtgcagggattgagaaaatctccgggcgcaaaccgttctatgttggtaagcccagcccgtggatcatccgcgcagcattaaacaaaatgcaggcgcattcggaagaaacggtgattgtcggcgataacttgcgcaccgacattctggcgggcttccaggcaggtctggaaacgattctggtgctttctggtgtttcatcgctcgacgatatcgacagtatgccgttccgcccaagctggatttacccgtcagtcgctgaaatcgacgttatctga

SEQ ID NO: 483446 - DNA, 2115 bp, Shigella sonnei
atggctcgtacaacacccatcgcacgctaccgtaacatcggtatcagtgcgcacatcgacgccggtaaaaccactactaccgaacgtattctgttctacaccggtgtaaaccataaaatcggtgaagttcatgacggcgctgcaaccatggactggatggagcaggagcaggaacgtggtattaccatcacttccgctgcgactactgcattctggtctggtatggctaagcagtatgagccgcatcgcatcaacatcatcgacaccccggggcacgttgacttcacaatcgaagtagaacgttccatgcgtgttctcgatggtgcggtaatggtttactgcgcagttggtggtgttcagccgcagtctgaaaccgtatggcgtcaggcaaacaaatataaagttccgcgcattgcgttcgttaacaaaatggaccgcatgggtgcgaacttcctgaaagttgttaaccagatcaaaacccgtctgggcgcgaacccggttccgctgcagctggcgattggtgctgaagaacatttcaccggtgttgttgacctggtgaaaatgaaagctatcaactggaacgacgctgaccagggcgtaaccttcgaatacgaagatatcccggcagacatggttgaactggctaacgaatggcaccagaacctgatcgaatccgcagctgaagcttctgaagagctgatggaaaaatacctgggtggtgaagaactgactgaagcagaaatcaaaggtgctctgcgtcagcgcgttctgaacaacgaaatcatcctggtaacctgtggttctgcgttcaagaacaaaggtgttcaggcgatgctggatgcggtaattgattacctgccatccccggttgacgtacctgcgatcaacggtatcctggacgacggtaaagacactccggctgagcgtcacgcaagtgatgacgagccgttctctgcactggcgttcaaaatcgctaccgacccgtttgttggtaacctgaccttcttccgtgtttactccggtgtggttaactctggtgataccgtactgaactccgtgaaagctgcacgtgagcgtttcggtcgtatcgttcagatgcacgctaacaaacgtgaagagatcaaagaagttcgcgcgggcgacatcgctgctgctatcggtctgaaagacgtaaccactggtgacaccctgtgtgacccggatgcgccgatcattctggaacgtatggaattccctgagccggtaatctccatcgcagttgaaccgaaaaccaaagctgaccaggaaaaaatgggtctggctctgggccgtctggctaaagaagacccgtctttccgtgtatggactgacgaagaatctaaccagaccatcatcgcgggtatgggcgaactgcacctcgacatcatcgttgaccgtatgaagcgtgaattcaacgttgaagcgaacgtaggtaaaccgcaggttgcttaccgtgaaactatccgccagaaagttaccgatgttgaaggtaaacacgcgaaacagtctggtggtcgtggtcagtatggtcatgttgttatcgacatgtacccgctggagccgggttcaaacccgaaaggctacgagttcatcaacgacattaaaggtggtgtaatccctggcgaatacatcccggccgttgataaaggtatccaggaacagctgaaagcaggtccgctggcaggctacccggtagtagacatgggtattcgtctgcacttcggttcttaccatgacgttgactcctctgaactggcgtttaaactggctgcttctatcgcctttaaagaaggctttaagaaagcgaaaccagttctgcttgagccgatcatgaaggttgaagtagaaactccggaagagaacaccggtgacgttatcggtgacttgagccgtcgtcgtggtatgctcaaaggtcaggaatctgaagttactggcgttaagatccacgctgaagtaccgctgtctgaaatgttcggatacgcaactcagctgcgttctctgaccaaaggtcgtgcatcatacactatggaattcctgaagtatgatgaagcgccgagtaacgttgctcaggccgtaattgaagcccgtggtaaataa

SEQ ID NO: 483447 - DNA, 471 bp, Shigella sonnei; identical to SEQ ID NO: 470343

SEQ ID NO: 483448 - DNA, 375 bp, Shigella sonnei; identical to SEQ ID NO: 459879

SEQ ID NO: 483449 - DNA, 288 bp, Shigella sonnei
atgctgcacacattacatcgttcaccctggctggcggattttgctgcgctgctgcgtctgctcagtgaaggcgacgaactgctattattgcaagatggcgtaactgccgcagttgacggtaaccgctaccttgaaagtctgcgtaatgcccccattaaggtctatgccctgaacgaagaccttattgcccgcggtttgactggtcaaatttcgaacgacatcattcccattgactatactgatttcgtcagacttacggttaagcactccagccagatggcctggtga

SEQ ID NO: 483450 - DNA, 360 bp, Shigella sonnei
atgaaacgaattgcgtttgttttttctactgcgcctcatggtacagctgctggtcgggaaggtttagatgctttactggcaacttccgcattaactgatgatctggctgtcttctttatagctgatggcgtttttcagctgctgccaggacaaaagcccgatgcagtgctggcgcgtgattacattgccacttttaaattgttgggtctgtacgacattgaacagtgctgggtttgtgcggcttcactgcgcgaacgcgggttagatccgcagaccccctttgttgtcgaagccacgccgctcgaagcagatgccttacgccgcgaactcgccaactacgatgttattttgaggttttga

SEQ ID NO: 483451 - DNA, 387 bp, Shigella sonnei
atgcgttttgccatcgtggtgaccgggccagcatacggtacgcaacaggcgagtagtgcttttcagtttgcgcaggcgctgatagtagaaggccatgagttaagcagcgtctttttttatcgggaaggggtctataacgctaaccaattgacctcaccggcaagcgacgaatttgaccttgtgcgcggctggcaacagttgaatgcgcaacatggtgtggcgctgaatatctgcgtagcggcagcattacgccgtggcgttgttgatgaaacggaggccggaaggctggggctggcctcgtcaaaccttcagccgggatttaccttaagcggacttggcgcgctggcggaagcctcgctgacctgtgacagggtggtacagttctga

SEQ ID NO: 483452 - DNA, 723 bp, Shigella sonnei
atgtccaggtcgcttttaaccaacgaaaccagtgagttggatttactggatcaacgtcctttcgaccagaccgattttgatattctgaaatcctacgaagcggtggtggacgggttagcgatgcttattggctcccactgtgaaatcgttttgcactctttgcaggatctaaaatgttcagccattcgcattgctaacggtgaacatacaggccggaagattggttcgccaattactgacctggcgctacgtatgctgcacgatatgacgggagcggatagcagcgtttctaaatgctactttactcgcgccaaaagcggcgtattaatgaagtccctgactatcgcgattcgtaaccgcgaacagcgtgtaattggtctgctgtgcatcaatatgaatcttgatgttcccttctcgcagattatgagcacttttgtgccgccagaaaccccggatgtcggttcaagcgtcaactttgcctcttctgttgaagatctggttacccaaacgctggagttcaccatcgaagaagtaaatgccgatcgcaatgtttctaataacgccaaaaatcgtcagatcgtgctgaatctctacgagaaagggatcttcgatattaaagacgcgatcaaccaggttgctgaccgcctgaacatctccaaacacactgtctatctctacatccgccagttcaaaagcggtgatttccaggggcaagataagtaa

SEQ ID NO: 483453 - DNA, 813 bp, Shigella sonnei
atgaaatcactgtttaaagtaacgctgctggcgaccacaatggccgttgccctgcatgcaccaatcacttttgctgctgaagctgcaaaacctgctacaactgctgacagcaaagcagcgttcaaaaatgacgatcagaaatcagcttatgcactgggtgcttcgctgggtcgttacatggaaaactctcttaaagaacaagaaaaactgggcatcaaactggataaagatcagctgatcgctggtgttcaggatgcatttgctgataagagcaaactctccgaccaagagatcgaacagactctgcaagcattcgaagctcgcgtgaagtcttctgctcaggcgaagatggaaaaagacgcggctgataacgaagcaaaaggtaaagagtaccgcgagaaatttgccaaagagaaaggtgtgaaaacctcttcaactggtctggtttatcaggtagtagaagccggtaaaggcgaagcaccgaaagacagcgatactgttgtagtgaactacaaaggtacgctgatcgacggtaaagagttcgacaactcttacacccgtggtgaaccgctctctttccgtctggacggtgttatcccggggtggacagaaggtctgaagaacatcaagaaaggcggtaagatcaaactggttattccaccagaactggcttacggcaaagcgggtgttccggggatcccaccgaattctaccctggtgtttgacgtagagctgctggatgtgaaaccagcgccgaaggctgatgcaaagccggaagctgatgcgaaagccgcagattctgctaaaaaataa

SEQ ID NO: 483454 - DNA, 219 bp, Shigella sonnei; identical to SEQ ID NO: 459885

SEQ ID NO: 483455 - DNA, 591 bp, Shigella sonnei; identical to SEQ ID NO: 459886

SEQ ID NO: 483456 - DNA, 201 bp, Shigella sonnei; identical to SEQ ID NO: 459887

SEQ ID NO: 483457 - DNA, 1806 bp, Shigella sonnei
atggaaggttccgattttttactcgcaggagtgctgtttctcttcgcggcggtggctgcggtgccgttggcatcgcggctggggattggcgctgtgttgggatatttgctggcagggattgcaattggcccgtgggggctggggtttattagcgacgtcgatgagatcctccacttttcggaactcggcgtggtattcctgatgtttatcatcggccttgagttgaatccctccaaactttggcaactgcggcgttcgatttttggcgtaggcgcggcacaggtgctgttaagcgcggcgttgctggcgggattattgatgctgacggatttcgcctggcaggcggcggtggtcggtggcattggccttgcgatgtcttcaactgcaatggcgttgcaattgatgcgtgagaaagggatgaatcgcagcgaatccggccagctcgggttttcggttctgctgtttcaggatctggcagtgatcccagcactggcgttagtgccgttgttggcggggtcggcagacgaacatttcgactggatgaagatcggcatgaaggtgctggcgtttgtcggcatgctgattggtgggcgctatttactgcgtccggtattccgctttattgcagcttctggcgtgcgggaagtgttcaccgccgcgacgctgctgctggtgttgggttccgcattgtttatggatgcgctggggctgtcgatggcgctcggtacatttattgcgggcgtgctgctggcggaaagtgaatatcgccatgaactggaaacggctatcgatcccttcaaaggcttgctgctcggtttgttctttatctctgtcggcatgtcgctcaacctcggggtgctttatacccatctgttgtgggtagtgataagcgtggttgtgctggtggcggtgaaaattctcgtgctgtatctgctggcgcgattgtatggcgtgcgtagctcagagcggatgcagtttgctggcgtgttgagtcagggcggtgagtttgcctttgtcctcttttctaccgcttcttcacaacgtttattccagggcgaccagatggcgctgttgctggtgacggtgacgctttccatgatgaccacgccgttgctgatgaagctggtggataaatggctatcccgccagtttaacggaccggaagaagaagacgaaaaaccgtgggtcaacgatgataaaccccaggtcattgtcgtgggcttcgggcgttttggtcaggtgattggtcgtttgctgatggcaaataaaatgcgcattaccgtgctggagcgggatatcagcgccgttaacctgatgcgtaaatatggctacaaagtttattacggcgacgccacgcaggtcgatctattacgttctgcgggtgcagaggccgctgagtctatcgtcattacctgtaacgagccggaagacaccatgaagctggtggaaatatgccagcagcactttccgcatttgcatattcttgcgcgagcgcgcggacgtgtggaagcgcatgagttattacaggcaggggtgacgcagttttcccgtgaaacattctccagtgcgttagagctggggcgcaagactttggtcacgcttgggatgcatccgcatcaggcgcagcgggcgcaactgcattttcgccgcctggatatgcggatgctgcgagagctcatcccaatgcatgccgatactgtacaaatttctcgcgccagggaagcccgacgcgaactggaagagattttccagcgtgaaatgcaacaagaacgacgccagctggacggctgggatgaatttgagtag

SEQ ID NO: 483458 - DNA, 552 bp, Shigella sonnei
atgtctcagccagcgaaagttttgctgctgtatgcccatccggaatctcaggactcggtggcaaaccgggtactgcttaaaccggccacgcagctcagcaatgttaccgtgcacgacctttacgcgcactatcccgatttttttattgatatcccccgtgagcaggcattactgcgcgagcacgaggtgattgtctttcagcatcctctttatacctatagctgcccggcgctactgaaagagtggctggaccgggtattaagtcgtggttttgccagcgggccgggaggaaaccaactggcgggaaagtactggcgtaacgtgattaccaccggcgagccggaaagtgcttaccgttatgacgcgctgaatcgctacccgatgagcgatgtgctgcgcccctttgaactggcggcgggcatgtgccggatgcattggttaagtcccatcattatttactgggcgagacggcaaagcgcaaaggagctggcgagccacgccagagcctacggtgactggctggcaaatccgctgtctccaggaggccgctga

SEQ ID NO: 483459 - DNA, 1914 bp, Shigella sonnei
atgattgttttctcctcgttacaaattcgtcgcggcgtgcgcgtcctgctggataatgccaccgccaccatcaaccccgggcagaaagtcggcctggtgggtaaaaacggctgtggtaaatctaccctgctggcattgctgaaaaatgaaatcagcgccgacggcggcagctacacctttccgggaagctggcaactggcgtgggtgaatcaggaaacgccagcgttaccgcaagcggcgctggaatatgtcattgacggcgaccgtgaatatcgtcaactggaagcgcagctgcacgacgccaacgaacgtaacgacgggcacgccattgcgaccattcatggcaagctggatgctattgacgcatggagtattcgctcccgtgccgccagcctgctgcacggcctcggtttcagcaatgaacaactggagcgcccggtaagtgatttctccggtggctggcgtatgcgtcttaaccttgcccaggcgctgatttgccgttcagacttgctgctgctcgacgaaccgactaaccacctcgatctcgatgccgttatctggctggaaaaatggttgaagagctatcagggcacgctgatcctgatctctcacgaccgcgacttcctcgatccgatcgttgataaaattattcatatcgaacaacaaagcatgttcgagtacaccggcaactacagttcgtttgaagtacagcgcgccacccgtctggcgcagcaacaagcgatgtatgaaagccagcaggaacgcgtggcacatctgcaaagttatatcgaccgtttccgtgccaaagccaccaaagcgaagcaggcccagagccgcattaagatgcttgagcgtatggagctgattgcccccgcgcacgtcgacaacccgttccgctttagcttccgcgcgccggaaagcctgccaaatccgttactgaagatggaaaaagtcagcgcgggctatggcgatcgcattattctcgactcgattaaactgaacctggtgcccggctcgcgcattggtctgttaggccgcaacggcgcgggtaaatcgacattaatcaaactgttagccggtgaacttgcgccagtcagcggtgaaattggtctggcgaaagggatcaagctcggctacttcgcccagcatcaacttgaatacctgcgcgccgacgaatcacctattcaacatctggcacgtttagcgccgcaggagctggaacaaaaactgcgtgactacctcggcggctttggtttccagggcgataaagtaaccgaagaaacgcgccgcttctccggtggggaaaaagcccgcctggtgctggcattaattgtctggcagcgtccgaatctgctgctgctcgacgaaccgactaaccaccttgacctcgacatgcgtcaggcactcaccgaagcattaatcgagtttgaaggcgcgctggttgtcgtttcgcacgaccgtcatttgctgcgttccaccactgacgatctctacctggttcacgatcgtaaagtcgaaccgttcgacggcgatctggaagattatcaacagtggttgagcgacgtacaaaagcaggaaaaccagaccgacgaagcgccaaaagagaacgcgaacagcgcccaggcacgtaaagatcagaagcgtcgggaagcggagctgcgtgcgcaaacccagccgctgcgtaaagagattgcccgtctggaaaaagagatggagaagctgaacgcgcaactggcgcaggcggaagagaaactcggagacagcgaactgtatgaccagagccgtaaagcggagttgaccgcctgcctgcaacagcaagccagcgccaaatccggcctggaagagtgcgaaatggcgtggctggaagcccaggagcagcttgagcagatgctgctggaaggccaaagcaactga

SEQ ID NO: 483460 - DNA, 1023 bp, Shigella sonnei
atggcgcagataacgacgaccgatgccaatgaattcagcagcagtgctgaattcacccctatgcgcggctttagcaattgtcatctacaaactatgctgccgcgtttgtttcgtcgtcaggtgaaattcaccccgtactggcagcggctggagttgcccgacggcgattttgtcgatctcgcgtggagtgaagcccctgcacaggctcggcataaaccgcgtttagtggtatttcacgggctggaaggcagtctcaatagcccttacgcccacggtctggttgaggcggcgcaaaagcgcggctggctgggcgtggtgatgcattttcgcggatgcagcggtgaaccaaaccgtatgcaccgcatttaccattcgggcgaaaccgaagacgccagttggtttttacgctggctgcaacgcgaatttggtcatgcgccaacggctgccgtcggctattcgctcggcggtaatatgctggcctgtttgctggcaaaggaaggcaatgatctcccggttgatgcggcggtgattgtctctgcgccgtttatgctggaagcctgtagctatcatatggaaaagggcttttcccgcgtttatcagcgttacttgctgaacctgttaaaagccaatgccgcgcgcaagctggcagcctaccccggaacgctgccgattaatctcgcgcagttaaaatcggtacgtcgcatccgtgaatttgacgatctaatcaccgccagaattcacggctacgccgacgctatcgactattatcgtcagtgtagcgccatgccgatgctgaaccggatcgccaaaccgacgctgattattcacgccaaagacgatccgtttatggatcatcaggtgatcccgaaaccggaaagtctccccccgcaggtggagtatcaactgactgaacatggcggtcatgttggctttattggcggtacattacttcatccgcaaatgtggctggagtcacgcattcctgactggttaacaacgtatctggaggcgaaatcatgttga

SEQ ID NO: 483461 - DNA, 219 bp, Shigella sonnei
atgttgattccgtggcaagacctctcccccgaaacgctggaaaatttaattgaaagctttgtgttacgtgaaggcaccgattatggtgaacatgagcgtacacttgaacagaaagtcgccgacgtcaaacgccagctacagtgcggagaagcggtgctggtatggtcggagctgcacgaaacggtcaatatcatgccgcgcagtcagtttcgcgaatag

SEQ ID NO: 483462 - DNA, 870 bp, Shigella sonnei
atgtctgccaaacatccggtcattgcggtaacaggatccagcggcgcggggaccaccaccaccagcctcgcgtttcgtaaaatattcgcgcagttaaatctgcatgcagctgaggtggaaggcgacagttttcaccgttacacccgcccggaaatggacatggcgatccgcaaagcgcgcgacgccgggcggcatatcagctacttcggccccgaggctaacgacttcggcctgctggaacaaaccttcattgaatacggtcagagcggcaaagggaaatctcgcaaatatctgcatacctacgacgaagccgtaccgtggaatcaggtaccggggacattcaccccctggcaacctttaccggaacccactgatgtactgttttatgaaggtttacacggcggcgtagtcacgccacagcataacgttgcgcagcatgtggacttactggtcggcgtggtgcctatcgttaaccttgagtggattcaaaaactgatccgcgacaccagcgagcgcgggcactcacgagaagcagtgatggactcagtagtgcgttcaatggaagactatatcaactacatcacaccgcagttttcccgcacccatcttaacttccagcgcgttcccaccgtcgacacttcaaacccgttcgcggcaaaaggtatcccgtcgctcgatgaaagctttgtggtgatccattttcgtaatctggaagggatcgatttcccctggctgctggcgatgttgcaaggctcattcatttcccacatcaatacgttagtggtaccgggcggcaaaatgggtctggcaatggaattaattatgctgccgctggtgcaacgattgatggaaggaaagaaaatcgagtaa

SEQ ID NO: 483463 - DNA, 405 bp, Shigella sonnei
atgcaagcgcgagtgaagtgggtcgaagggttaacttttctgggcgaatccgcctctggtcaccagattttaatggacggcaactcaggcgataaagcaccaagtccgatggaaatggtgttgatggcggcgggtggttgcagtgccatcgatgtggtttctatcctgcaaaaagggcgtcaggatgtggtcgattgtgaagtaaaattgacctctgaacgccgcgaagaggcaccacgcctgtttacgcacattaatctgcattttatcgtcaccggtcgcgacctgaaagacgcagcggttgcgcgtgcggttgatctctctgctgagaaatattgttcagtggcgttgatgctggaaaaagcggtgaatattactcactcgtatgaagtggttgccgcgtga

SEQ ID NO: 483464 - DNA, 633 bp, Shigella sonnei
atggtgcttggcaaaccgcaaacagacccgactctcgaatggttcttgtctcattgccacattcataagtacccatccaagagcacgcttattcaccagggtgaaaaagcggaaacgctgtactacatcgttaaaggctctgtggcagtgctgatcaaagacgaagagggtaaagaaatgatcctctcctatctgaatcagggtgattttattggcgaactgggcctgtttgaagagggccaggaacgtagcgcatgggtacgtgcgaaaaccgcctgtgaagtggctgaaatttcgtacaaaaaatttcgccaattgattcaggtaaacccggacattctgatgcgtctgtctgcacagatggcgcgtcgtctgcaagtcacttcagagaaagtgggcaacctggcgttcctcgacgtgacgggccgcattgcacagactctgctgaatctggcaaaacaaccagacgctatgactcacccggacggtatgcaaatcaaaattacccgtcaggaaatcggtcagattgtcggctgttctcgtgaaaccgtgggacgcattctgaagatgctggaagatcagaacctgatctccgcacacggtaaaaccatcgtcgtttacggcactcgttaa

SEQ ID NO: 483465 - DNA, 2091 bp, Shigella sonnei
atgtggcgcagactgatttatcaccccgatatcaactatgcacttcgacaaacgctggtgctatgtttgcccgtggccgttgggttaatgcttggcgaattacgattcggtctgctcttctccctcgttcctgcctgttgcaatattgcgggccttgatacgcctcataaacgttttttcaaacgcttaatcattggtgcgtcgctgtttgccacctgtagcttgctgacacagctactactggcaaaagatgttcccctgccctttttgctgaccggattaacgctggtacttggcgtcactgctgagctggggccattgcacgcaaaattgcttcctgcatcgctgctcgccgccatttttaccctcagtctggcgggatacatgccggtctgggaaccgttgctcatctatgcgttgggcactctctggtacggattgtttaactggttttggttctggatctggcgcgaacaaccgctgcgcgagtcactaagtctgctgtaccgcgaactggcagattattgtgaagccaaatacagcctgcttacccagcacaccgaccctgaaaaagcgctgccgccgctgctggtgcgccagcaaaaagcggtcgatctaattacccagtgctatcagcaaatgcatatgctttccgcgcaaaataatactgattacaagcggatgctgcgtattttccaggaggcgctggatttacaggaacatatttcggtcagtttgcatcagccggaagaggtgcaaaagctggtcgagcgtagccatgcggaagaagttatccgctggaatgcgcaaaccgtcgccgctcgcctgcgcgtgctggctgatgacattctttaccatcgcctgccaacgcgttttacgatggaaaagcaaattggcgcactggaaaaaatcgcccgccagcatccggataatccggttgggcaattctgctactggcatttcagccgcatcgcccgcgtgctgcgcacccaaaaaccgctctatgcccgtgacttactggccgataaacagcggcgaatgccgttacttccggcgctgaaaagttatctgtcactaaagtctccggcgctacgcaatgccggacgactcagtgtgatgttaagcgttgccagcctgatgggcaccgcgctgcatctgccgaagtcgtactggatcctgatgacggtattgctggtgacacaaaatggctatggcgcaacccgtctgaggattgtgaatcgctccgtgggaaccgtggtcgggttaatcattgcgggcgtggcgctgcactttaaaattcccgaaggttacaccctgacgttgatgctgattaccaccctcgccagctacctgatattgcgcaaaaactacggctgggcgacggtcggttttactattaccgcagtgtataccctgcaactattgtggttgaacggcgagcaatacatccttccgcgtcttatcgataccattattggttgtttaattgctttcggcggtactgtctggctgtggccgcagtggcagagcgggttattgcgtaaaaacgcccatgacgctttagaagcctatcaggaagcgattcgcttgattcttagcgaggatccgcaacctacgccactggcctggcagcgaatgcgggtaaatcaggcacataacactctgtataactcattgaatcaggcgatgcaggaaccggcgtttaacagccattatctggcagatatgaaactgtgggtaacgcacagccagtttattgttgagcatattaatgccatgaccacgctggcgcgggaacaccgggcattgccacctgaactggcacaagagtatttacagtcttgtgaaatcgccattcagcgttgtcagcagcgactggaatatgacgaaccggggagttctggcgatgccaatatcatggattcgccggagatgcagccgcacgaaggcgcggcaggtacgctggagcagcatttacagcgggttattggtcatctgaacaccatgcacaccatttcgtcgatggcatggcgtcagcgaccgcatcacgggatttggctgagtcgcaagttgcgggattcgaaggcgtaa

SEQ ID NO: 483466 - DNA, 1221 bp, Shigella sonnei
atggcaattgaacaaacagcaattacacgcgcgactttcgatgaagtgatcctgccgatttatgctccggcagagtttattccggtaaaaggtcagggcagccgaatctgggatcagcaaggcaaggagtatgtcgatttcgcgggtggcattgcagttacggcgttgggccattgccatcctgcgctggtgaacgcgttaaaaacccagggcgaaattctgtggcatatcagtaacgttttcaccaatgaaccggcgctgcgtcttgggcgtaaactgattgaggcaacgtttgccgaacgcgtggtgtttatgaactccggcacggaagctaacgaaaccgcctttaaactggcacgtcattacgcctgtgtgcgtcatagcccgttcaaaaccaaaattattgccttccataacgcttttcatggtcgctcgctgtttaccgtttcggtgggtgggcagccaaaatattccgacggctttgggccgaaaccggcagacatcatccacgttccctttaacgatctccacgcagtgaaagcagtgatggatgatcacacctgtgcggtggtggttgagccgatccagggcgagggcggcgtgacggctgcgacgccagagtttttgcagggcttgcgcgagctgtgcgatcaacatcaggcattattggtgtttgatgaagtgcagtgcgggatggggcggaccggcgatttgtttgcttacatgcactacggcgtgacgccggatattctgacctctgcgaaagcgttaggcggcggcttcccgattagcgccatgctgaccacggcggaaattgcttctgcgtttcatcctggttctcacggttccacctacggcggtaatcctctggcctgtgcagtagcgggggcggcgtttgatatcatcaatccccctgaagtgctggaaggcattcaggcgaaacgccagcgttttgttgaccatctgcagaagatcgatcagcagtacgatgtgtttagcgatattcgcggtatggggctgttgattggcgcagagctgaaaccacagtacaaaggtcgggcgcgtgatttcctgtatgcgggcgcagaggctggcgtaatggtgctgaatgccggaccggatgtgatgcgttttgcaccgtcgctggtggtggaagatgcggatatcgatgaagggatgcaacgtttcgcccacgcggtggcgaaggtggttggggcgtaa

SEQ ID NO: 483467 - DNA, 564 bp, Shigella sonnei
atgatcctgcttatagataactacgattcttttacctggaacctctaccagtacttttgtgaactgggggcggatgtgctggttaagcgcaacgatgcgttgacgctggcggatatcgacgcccttaaaccacaaaaaattgtcatctcacctggcccctgtacgccagatgaagccgggatctcccttgacgttattcgtcactatgccgggcgcttgccgattcttggcgtctgcctcggtcatcaggcaatggcgcaggcatttggcggcaaagttgtgcgcgccgcaaaggtcatgcacggcaaaacctcgccgattacacatagcggtgagggcgtatttcgggggctggcaaatccacttaccgtgacacgctaccattcgctggtggtggaacctgactcattaccagcgtgctttgacgtgacggcctggagcgaaacccgcgagattatggggattcgccatcgccagtgggatctggaaggtgtgcagttccatccagaaagtattcttagcgaacaaggacatcaactgctggctaatttcctgcatcgctga

SEQ ID NO: 483468 - DNA, 603 bp, Shigella sonnei
atgagcgataaattcggcgaagggcgcgatccgtatctttatcctggccttgatatcatgcgtaaccggctgaacatccgtcagcagcagcggctggaacaggccgcttacgaaatgacggcgctgcgtgctgcgaccattgagcttggtccgctggtgcgcggtttaccgcatttgcgcactatccatcgccagctgtaccaggatattttcgactgggcagggcaactgcgtgaagttgatatttatcagggcgatacgccgttctgccactttgcttatatcgaaaaagagggcaatgccctgatgcaggatctggaggaagaaggttatctggttggcctggagaaagcgaagttcgtcgagcggctggcgcattactattgtgaaatcaacgtgctgcatcccttccgggtgggaagtggtctggcacagcggatcttcttcgagcaactggcgattcatgccggatatcaactgagctggcagggtatcgaaaaagaggcctggaatcaggcaaatcagagtggggcaatgggggatctcaccgcactgcagatgatatttagcaaagtggtaagcaaagccggggaatctgagtaa

SEQ ID NO: 483469 - DNA, 168 bp, Shigella sonnei; identical to SEQ ID NO: 260864

SEQ ID NO: 483470 - DNA, 573 bp, Shigella sonnei
atgttcaaatcgaccctggcggcgatggctgctgttttcgctctttctgctctttctcccgcagcaatggcagcgaaaggggacccgcacgtattgttgacaacctcagctggtaacatcgaactggagctggataaacaaaaagcgccagtgtctgtgcaaaactttgtcgattatgtgaacagcggtttttataacaacactacctttcaccgcgtcattcctggctttatgattcagggcggcggtttcaccgagcagatgcagcagaaaaaaccaaacccgccaatcaaaaatgaagccgataacggcctgcgcaacacgcgtggcaccatcgcgatggcgcgtaccgctgacaaagacagcgccaccagccagttctttatcaacgttgccgataacgccttccttgaccatggtcagcgtgatttcggttacgcggtatttggtaaagtggtgaaaggcatggacgttgccgataagatttcccaggtgccgactcatgatgttggtccgtaccagaatgtgccgtcaaaaccggtagttatcctttccgctaaagtcctgccgtaa

SEQ ID NO: 483471 - DNA, 1182 bp, Shigella sonnei
atgactaacagcaatcgcatcaagctcacatggattagctttctctcctacgcactgactggtgcgttggttattgtcaccgggatggtgatgggaaatatcgccgattatttcaatctgcctgtttccagtatgagtaacaccttcaccttcctcaacgccggcattttaatctctatcttcctcaacgcctggctgatggaaatcgtcccgttgaaaacgcagttacgttttggctttctcctgatggtgctggcggttgccggtttgatgttcagccacagcctggcgctgttctcgacggcgatgttcattctcggggtggtcagcggcattactatgtcgattggtacattcctgataacacaaatgtatgaagggcgtcagcgcggttcccgcctgttatttactgactccttcttcagtatggctgggatgattttcccaatgatcgccgcgtttctactggcgcgcagcattgagtggtactgggtttatgcctgcatcgggctggtgtatgtcgctatttttattctgaccttcggctgtgagttcccggcactgggcaaacatgcaccaaaaacggatgctccggtagagaaagaaaagtgggggatcggcgtactgtttctctctgttgcggcgctgtgctacatcctcggtcagttaggttttatctcctgggtgcctgagtatgccaaaggcctgggcatgagcctgaacgacgcgggcacgctggtgagtaacttctggatgtcatacatggtcggcatgtgggcgttcagctttattcttcgcttctttgatttgcaacgcattctgaccgtactggctggtctggctgcgattctgatgtacgtctttaacaccggaacaccagcacatatggcgtggtcaattctcgctctgggcttcttctccagcgcgatctataccaccatcatcaccctgggttcacagcagaccaaagtaccgtcgccaaaactggttaactttgtcctgacctgcggaaccatcggtactatgttgacctttgtggttaccggcccgattgttgaacatagcggtccgcaggcggcactgcttacagcaaacggtctgtacgctgtcgtctttgtgatgtgcttcctgttaggtttcgtcagccgtcaccgtcagcataacaccctgacctctcattaa

SEQ ID NO: 483472 - DNA, 2544 bp, Shigella sonnei
atgagcaaagtcagactcgcaattatcggtaacggtatggtcggccatcgctttatcgaagatcttcttgataaatctgatgcggccaactttgatattaccgttttctgtgaagaaccgcgcatcgcttatgaccgcgtacacctctcgtcttacttctctcaccacaccgccgaagagctgtcgctggtgcgcgaaggcttctacgagaaacacggcatcaaagttctggtcggcgaacgcgctatcaccatcaaccgtcaggagaaggtgattcactccagcgccggacgtaccgttttttatgacaagctgatcatggcaaccggttcctacccgtggatcccaccaatcaaaggttctgatactcaggactgctttgtctatcgcaccattgaagacctcaacgccattgaatcctgcgcccgtcgcagcaaacgcggtgccgttgttggtggcggcctgttaggtctggaagccgctggcgcgctgaaaaacttaggtattgaaacccacgttatcgaatttgcccctatgctgatggcggaacagcttgatcagatgggtggcgagcagctgcgtcgcaaaatcgaaagtatgggcgtgcgcgttcacaccagcaaaaacacccttgagattgtgcaggaaggtgtcgaagcgcgtaaaaccatgcgttttgccgacggcagcgaactggaagtcgactttatcgtcttctctaccggtatccgtccgcgcgataagctggcaacccagtgtggtctggacgttgctccgcgtgggggtatcgtcattaatgattcctgccagacttccgatccggatatctacgccatcggtgaatgcgcaagctggaacaaccgtgtatttggtctggtagcacctggctacaaaatggcgcaggtcgccgttgaccatattctcggtagcgaaaacgcctttgaaggtgctgaccttagcgccaagctgaaactgctgggcgtagacgtaggcggtattggtgatgcgcacggtcgcacgcctggcgcacgtagctacgtttacctcgacgaaagtaaagagatctacaaacgcctgattgtcagcgaagacaacaaaaccctgctcggtgcggtactggtgggcgataccagcgactacggtaacctgctgcaactggtgctgaacgctatcgaactgccggaaaacccggattccctgatcctgccagcacactctggtagcggcaagccgtctatcggtgttgataaactgccggacagcgcgcaaatctgctcctgcttcgacgtcactaaaggtgatctgattgctgccatcaacaaaggctgccacacagttgcggcgctgaaagctgaaaccaaagcgggtactggctgcggtggctgtatcccgctggtcactcaggtactgaacgcggaactggcgaaacagggcatcgaagttaacaacaacctgtgcgaacactttgcttattcgcgtcaggaactgttccatttgatccgcgttgaaggcattaaaaccttcgaagaactgctggcgaaacacggcaaaggctacggttgtgaagtttgtaaaccaaccgtcggttcgctgctggcctcctgctggaacgaatacattctgaagccggaacatactccgctgcaggattctaacgacaacttcctcgctaacatccagaaagacggcacctactcggtgatcccgcgttctccgggcggtgaaatcaccccggaagggctgatggcagtgggtcgtatcgcgcgtgaatttaatctctacaccaaaatcaccggctcccagcgcctggcgatgtttggcgcacagaaagacgatctgccggaaatctggcgtcagctgattgaagctggcttcgaaaccggtcatgcctatgcgaaagcactgcgtatggcgaaaacctgcgtgggtagcacctggtgccgctacggtgttggcgatagcgtcggcctcggcgtggaactggaaaaccgctacaaaggcatccgtacgccgcacaaaatgaagttcggtgtctccggctgtacccgtgaatgttcagaagctcagggtaaagacgtgggtattatcgccactgaaaaaggctggaacctgtatgtttgcggtaacggcggcatgaaaccgcgtcatgcggatctgctggcagcggatatcgatcgcgaaacgctgatcaaatatctcgaccgcttcatgatgttctacatccgtaccgccgacaaactgacgcgtaccgcgccgtggttagaaaacctcgaaggcggcatcgattacctgaaagcggtgatcattgacgacaaactggggctgaacgctcatctggaagaagagatggcgcgcctgcgtgaagcggtagtgtgtgagtggactgaaacggtcaatacgccgtctgcgcagactcgcttcaaacacttcatcaacagcgacaagcgtgacccgaacgtgcagatggtgccagagcgcgaacagcaccgtccggcaacgccgtatgaacgtatcccggtaactctggtggaggacaacgcatga

SEQ ID NO: 483473 - DNA, 327 bp, Shigella sonnei
atgagccagtggaaagacatctgcaaaatcgatgacatcctgcctgaaaccggcgtctgcgcgctgttaggtgacgagcaggtagcgattttccgcccgtatcacagcgaccaggtgtttgcgatcagcaacattgatccgttcttcgagtccagcgtgctatcacgcgggctgattgcggaacaccagggcgagctgtgggtcgccagcccgctgaaaaaacagcgttttcgcttaagtgatggcttgtgcatggaagacgaacagttttccgtcaaacattacgaagcgcgagtgaaagacggcgtggtgcagctgcgcggttaa

SEQ ID NO: 483474 - DNA, 807 bp, Shigella sonnei
atgtttacagacactattaataagtgtgcggctaatgctgcgcgcattgcacgcctgtcggcaaataacccgctcggcttttgggtcagctccgccatggcgggcgcatatgtgggtcttgggatcatcctgattttcacgctcggtaatttgctcgacccgtccgtacgtccgctggtgatgggcgcgacctttggtatcgccttaacgctggtgattatcgccggttctgaactgttcaccggacacgccatgttcctcacctttggggtaaaagcgggcagcatcagccacgggcaaatgtgggcaatcctgccgcaaacctggctgggtaacctggtcggttccgtcttcgttgccatgctctatagctggggcggcggtagcctgctgccggtagataccagcatcgttcactccgtcgcgctggctaaaaccactgcaccggcaatggtactgttcttcaaaggtgcattgtgtaactggctggtttgcctggctatctggatggcgctgcgcactgaaggggcggcgaaatttatcgctatctggtggtgtctgctggcatttatcgcgtccggctacgagcactccatcgctaacatgacgctgttcgccctctcctggttcggcaaccacagcgaagcctacacgctggcgggtattggtcataacctgctgtgggtgacgctgggtaatactttatcgggtgccgtattcatgggattgggttattggtatgctacgccgaaagcgaatcgtccggttgcggacaaatttaatcaaactgaaacggctgccggttaa

SEQ ID NO: 483475 - DNA, 1374 bp, Shigella sonnei
gtggatcatttgcctatattttgccaattacgcgatcgcgactgtctgattgtcggcggtggtgatgtcgcggaacgcaaagcaaggttgctgttagacgcaggcgctcgcttaacggtgaatgcattagcgtttattccacagttcaccgcatgggcagatgcaggcatgttaaccctcgtcgaagggccatttgatgaaagccttctcgacacctgctggctggcgattgcagcgacggatgatgacacgcttaaccagcgcgtcagcgaagccgctgaagctcgtcgcatcttctgtaacgtagtcgatgcgccgaaagccgccagctttattatgccgtcgattattgaccgctcaccgctaatggtagcggtctcctctggcggcacctctccggttctggcgcgcctgttgcgcgaaaaactcgaatcactgctgccgttgcatctgggccaggtggcgaaatatgccgggcaattacgcgggcgagtgaaacaacagttcgccacgatgagtgagcgtcgccgtttctgggagaaattgttcgttaacgaccgcctggcgcagtcgctggcaaacaacgatcagaaagccattactgaaacgaccgaacagttaatcaacgaaccgctcgaccatcgcggtgaagtggtgctggttggtgcaggtccgggcgatgccgggctgctgacgctgaaaggactgcaacaaattcagcaggcagatgtggtggtctacgaccgtctggtttctgacgatattatgaatctggtacgccgcgatgctgatcgcgttttcgtcggcaaacgcgcgggataccactgtgtaccgcaggaagagattaaccagatcctgctgcgggaagcgcaaaaaggcaaacgcgtggtgcggctgaaaggtggcgatccgtttatttttggccgtggtggcgaagagctggaaacactgtgcaacgcgggtattccgttctcggtggttccgggtattaccgcagcttctggttgctctgcctattcgggtattccactcacgcatcgcgattatgcccagagcgtacgcttaattaccggacacttaaaaaccggtggcgagctggactgggaaaacctggcggcagaaaaacagacgctggtgttctatatgggattgaatcaggccgcgactattcagcaaaagctgattgaacacggtatgcctggcgaaatgccggtggcaattgtcgaaaacggaacggcagtcacgcagcgcgtgattgacggtacgctcacgcaactcggtgaacttgctcagcaaatgaacagtccatcgctaattattattggtcgggttgttggcctgcgcgataaactgaactggttctccaaccattaa

SEQ ID NO: 483476 - DNA, 168 bp, Shigella sonnei; identical to SEQ ID NO: 460788

SEQ ID NO: 483477 - DNA, 252 bp, Shigella sonnei
atgaagccccaggagatatttctatcaatcctggggctgccactccgaacctcaacaactcggatggtagtcccttcttcgcatggaggcaatataaacatgctgacgaaatatgcccttgtggcagtcatagtgctgtgtttgacggtgctgggatttacgcttctggtcggagactcgctgtgtgagttcaccgtaaaggaacgtaatattgagtttaaggctgttctcgcttacgaaccgaagaagtag

SEQ ID NO: 483478 - DNA, 744 bp, Shigella sonnei
gtgaacgccttatccggcctacaaaaatcttgccaattcaatatattgcaggaccatgtaggcctgataagcgtagcgcatcaggcagttttgcgtttgtcatcagtctcgaatatggtcgatatgaaaactacgcatacctccctcccctttgccggacatacgctgcattttgttgagttcgatccggcgaatttttgtgagcaggatttactctggctgccgcactacgcacaattgcaacacgctggacgtaaacgtaaaacagagcatttagccggacggatcgctgctgtttatgccttacgggaatatggctataaatgtgtgcccgcaatcggcgagctacgccaacctgtctggcctgcggaggtatacggcagtattagccactgtgggactacggcattagccgtggtatctcgtcaaccgattggcattgatatagaagaaattttttctgtacaaaccgcaagagaattgacagacaatattattacaccagcagaacacgagcgactcgcggactgtggtttagccttttctctggcgctgacactggcattttccgccaaagagagcgcatttaaggcatcggagagacaaactgaagcaggttttctggattatcagataattagctggaataaacagcaggtcatcattcatcgtgagaatgagatgtttgctgtgcactggcagataaaagaaaaaatagtcataactctgtgccaacacgattaa

SEQ ID NO: 483479 - DNA, 2241 bp, Shigella sonnei
atgaacaagaagattcattccctggccttgttggtcaatctggggatttatggggtagcgcaggcacaagagccgaccgatactcctgtttcacatgacgataccattgtcgttaccgccgccgagcagaacttacaggcgcctggcgtttcgaccatcaccgcagatgaaatccgcaaaaaccccgttgcccgcgatgtgtcggagatcatccgtaccatgccaggcgttaacctgaccggtaactccaccagtggtcagcgtgggaataaccgacagattgatattcgcggtatgggtccggaaaacacgctgattttgattgacggcaagccggtaagcagccgtaactcggtgcgtcagggctggcgtggcgagcgcgatacccgtggtgatacctcctgggtgccacctgaaatgattgaacgtattgaagttctgcgtggtccggcagctgcgcgttatggcaacggcgcggcgggcggcgtggttaacatcattaccaaaaaaggcagcggtgagtggcacggctcctgggacgcttatttcaatgcaccagaacataaagaggaaggtgccactaaacgcaccaacttcagcctgaccggtccgctgggcgacgaattcagcttccgcttgtatggcaacctcgacaaaacccaggctgacgcgtgggatatcaaccagggccatcagtccgcgcgtgccggaacgtatgccacgacgttaccagccgggcgcgaaggggtgatcaacaaagatattaatggcgtggtgcgctgggatttcgcgccattgcaatcgctggaactggaagcaggttacagccgccagggcaacctgtatgcgggcgacacccagaacaccaactccgattcctatacccgctcgaaatatggcgatgaaaccaaccgtctgtatcgccagaactactcgctgacctggaacggcggctgggataacggagtgaccaccagcaactgggtgcagtatgaacacacccgtaactcgcgtattccggaaggtctggcaggcggtaccgaagggaaatttaacgaaaaagcgacacaggatttcgtcgatatcgatcttgatgacgtgatgctgcacagcgaagttaacctgccgattgatttcctcgttaaccaaacgctgacgctgggtacggagtggaatcagcaacggatgaaggacttgagttccaatacccaggcgctgaccggggcgaacaccggcggcgctattgatggtgtgagtgccaccgaccgtagcccgtattcaaaagcagaaattttctcgctgtttgccgaaaacaacatggagctgactgacagcaccatcgtaacgccggggctgcgtttcgatcatcacagtattgtcggcaataactggagcccggcgctgaacatatcgcaaggtttaggcgatgacttcacgctcaaaatgggcattgcccgtgcttataaagcaccgagcctgtaccagactaacccgaactacattctctacagtaaaggtcagggctgctatgccagcgcgggcggctgctatcagcaaggtaacgatgacctgaaagcagaaaccagcatcaacaaagagattggtctggagttcaaacgcgacggctggctggcgggcgtcacctggttccgtaacgattatcgcaataagattgaagcgggctatgtggctgtagggcaaaacgcagtcggcaccgatctctatcagtgggataacgtgccgaaagcagtggttgaaggtctggaaggatcgttaaacgtaccagttagcgaaatggtgatgtggaccaataacatcacttatatgctgaagagtgaaaacaaaaccacgggcgaccgtttgtcgatcatcccggagtacacgttgaactcaacgctgagctggcaggcgcgggaagatttgtcgatgcaaacgaccttcacctggtacggtaagcagcagccgaaaaaatacaactacaaaggtcagccagcggttggcccggaaaccaaagaaatcagtccttacagcattgtgggtctgagcgcgacctgggatgtgacgaagaatgtcagtctgaccggcggcgtggacaacctgttcgacaaacgtttgtggcgtgcgggtaatgcccagaccacgggcgatctggcaggggccaactatatcgcgggtgccggggcgtatacctataacgagccgggacgtacgtggtacatgagcgtaaacactcacttctga

SEQ ID NO: 483480 - DNA, 1203 bp, Shigella sonnei
gtgacggcgttaaaagtaggaagtgagagctggtggcagtcgaaacatggcccggaatggcagcgtctgaatgacgaaatgtttgaggtcactttctggtggcgtgatccccaaggttctgaagaatactcgacgataaagcgcgtatggatctacatcactggtgtgaccgatcatcatcagaacagccagccccagtcgatgcagcgaattgcaggtactgatgtctggcagtggacgacacaactcaatgccaactggcgcggcagctactgctttattcccaccgaacgcgatgacattttttctgcaccatcccccgatcgcctcgaattacgtgaaggctggcgaaaactattaccccaggcaatagccgatccgctgaatccacaaagctggaaaggcgggcgagggcacgctgtttctgcactcgaaatgccgcaagcgcctctgcaaccgggatgggattgtccgcaagtgccagaaatagcagccaaagaaattatctggaaaagtgaacggttgaaaaattcacgtcgtgtatggatttttaccaccggcgatgtaacagcagaagaacgtccgctggcagttttgctcgatggcgaattttgggcgcaaagtatgcccgtctggcctgtgctgacttcgctgacccatcgtcagcaacttcctcccgccgtgtatgtgttgatcgacgctatcgacaccacgcaccgcgcccacgaactgccgtgtaatgcggatttctggctggcagtacagcaagagttattacccctggtgaaagctattgccccttttagcgatcgcgccgatcgcaccgtggtcgccgggcagagttttggtgggctgtccgcgctgtatgccggactgcactggcctgaacgctttggctgtgtattaagccagtcaggatcgtactggtggccgcatcgggacgggcagcaagagggcgtgttacttgaaaagctaaaagctggtgaagttagcgccgaaggtctgcgcattgtgctggaagcgggtattcgcgagccgatgatcatgcgggccaatcaggcgctgtatgcgcaattgcaccctataaaagaatccattttctggcgtcaggttgacggcggacatgatgcgctttgttggcgcggtggcttgatgcaggggttaatcgacctctggcaaccacttttccatgacaggagttga

SEQ ID NO: 483481 - DNA, 219 bp, Shigella sonnei
atggcattcagtaatcccttcgatgatccgcagggagcgttttacattttgcgcaatgcgcaggggcaattcagtctgtggccgcaacaatgcctcttatcggcaggctgggacattgtgtgtcagccgcagtcacaggcgtcctgccagcagtggctggaagtccactggcgtactctgacaccggccaatttcacccagttgcaggaggcacaatga

SEQ ID NO: 483482 - DNA, 3882 bp, Shigella sonnei
atgagccagcatttacctttggtcgccgcacagcccggcatctggatggcagaaaaactgtcggatttaccctccgcctggagcgtggcgcattacgttgagttaactggagatgttgatgcgccattactggcccgcgcggtggttgccggactagcgcaagcagatacgttgcggatgcgttttacggaagataacggcgaagtctggcagtgggtcgatgatgcgctgatattcgaacagccagaaattatcgacctgcgaaccaatattgatccgcacggtactgcgcaggcattaatgctggcggatttgcaacaagatttgcgcgtcgatagcggtaaaccactggtctttcatcagctgatacatgttgcggataaccgctggtactggtatcagcgttatcaccatttgctggtcgatggcttcagtttcccggccattactcgccagatcgccaatatttactgcacatggctgcgtggcgaaccaacgcctgcttcgccgtttacgcctttcgctgatgtagtggaagagtaccagcaataccgcgaaagcgaagcctggcagcgtgatgcggcattctgggcagaacagcgtcgtcaactgccgccgcccgcgtcactttctccggcacctttaccggggcgcagcgcttcggcagatattctgcgcctgaaactggaatttaccgacggggaattccgccagctggctacgcaactttcaggtgtgcagcgtaccgatttagcccttgcgctggcagccttgtggctggggcgattgtgcaatcgcatggactatgccgccggatttatctttatgcgtcgactgggctcggcggcgctgacggctagcggacccgtgctcaacgttttaccgttgggtattcacattgcggcgcaagaaacgctgccggaactggcaacccgactggcggctcaactgaaaaaaatgcgtcgccatcaacgttacgatgccgaacaaattgtccgtgacagcgggcgagcggcaggtgatgaaccgctgtttggtccggtactcaatattaaggtatttgattaccaactggatattcctggtgttcaggcgcaaacccataccctggcaaccggtccggttaatgaccttgaactggccctgttcccggatgaacacggtgatttgagtattgagatcctcgccaataaacagcgttacgatgagccaacgttaatccagcatgctgaacgcctgaaaatgctgattgcccagttcgccgcggatccggcgctgttgtgcggcgatgtcgatattatgctgccaggtgagtatgcgcagctggcgcagatcaacgccactcaggttgagattccagaaaccacgctgagcgcgctggtggcagaacaagcggcaaaaacaccggatgctccggcgctggcagatgcgcgttacctgttcagctatcgggaaatgcgcgagcaggtggtggcgctggcgaatctgctgcgtgagcgcggcgttaaaccaggggacagcgtggcggtggcactaccgcgctcggtctttttgaccctggcactccatgcaatagttgaagctggcgcggcctggctaccgctggataccggctatccggacgatcgcctgaaaatgatgctggaagatgcgcgtccgtcgctgttaattaccaccgacgatcaactgccgcgctttagcgatgttcccaatttaacaagcctttgctataacgccccgcttaccccccagggcagtgcgccgctgcaactttcacaaccgcaccacacggcttatatcatctttacctctggctccaccggcaggccgaaaggggtaatggtcgggcagacggctatcgttaaccgcctgttatggatgcaaaatcactacccgcttacaggcgaagatgtcgttgcccaaaaaacgccgtgcagttttgatgtctcggtgtgggagtttttctggccgtttatcgcaggggcaaaactggtgatggctgaaccggaagcgcaccgtgacccgctcgctatgcagcaattctttgccgaatatggcgtaacgaccacgcactttgtgccgtcgatgctggcggcatttgttgcctcgctgactccgcaaaccgctcgccagagttgcgcgacgttgaaacaggttttctgtagtggtgaagccttaccggctgatttatgccgtgaatggcaacagttaaccggtgcgccgttacataatctgtatggcccgacggaagcggcggtagatgtcagctggtatccggcttttggcgaggaactggcacaggtgcgcggcagcagtgtgccgattggttatccggtgtggaacatggggctgcgtattcttgatgcgatgatgcatccggtgccgccgggtgtggcgggtgatctctatcttaccggcattcaactggcgcagggctatctcggacgccccgatctgaccgccagccgctttattgccgatccttttgctcctggcgaacggatgtaccgtaccggagacgttgcccgctggctggataacggcgcggtggagtacctcgggcgcagtgacgatcagctaaaaattcgcgggcagcgtatcgaactgggcgaaatcgatcgcgtgatgcaggcgctgccggatgtcgaacaagccgttacccacgcctgtgtgattaaccaggcggcagccactggtggtgatgcgcgtcagttggtgggctatctggtgtcgcaatcgggcctgccgttggataccagcgcattgcaggcgcagcttcgtgaaacattgccaccacatatggtaccggtggttctgctgcaacttccacagttacctcttagcgccaacggcaagctggatcgcaaagccttaccgttgcctgaactgaagacacaagcgtcgggacgtgcaccgaaagcgggcagtgaaacgattatcgccgcggcattcgcgtcgttgctgggttgtgacgtgcaggatgccgatgctgatttctttgcgctgggcggtcattcgctactggcaatgaaactggcagcgcagttaagtcgacagtttgctcgtcaggtgacgccggggcaggtgatggtcgcgtcaaccgtcgccaaactggcaacgattattgatggtgaagaggacagctcccggcgcatgggattcgaaaccattctgccgttgcgtgaaggtaatggcccgacgctgttttgtttccatccggcgtccggttttgcctggcagtttagcgtactctcgcgttatctcgatccacaatggtcgattattggcattcagtcgccgcgccctcatggacccatgcagacagcgacaaacctggatgaagtctgcgaagcgcatctggcaacgttacttgagcaacaaccgcacggcccttattacctgctggggtattcccttggcggtacgctggcgcagggtattgcggcgcgactgcgtgcccgtggcgaacaggtggcatttcttggcttgctggatacctggccgccagaaacgcaaaactggcaggaaaaagaagctaatggtctggacccggaagtgctggcggagattaaccgcgagcgcgaggccttcctggcggcacagcagggaagtacttcaacggagttgtttaccaccattgaaggcaactacgctgatgctgtgcgcctgctgacgactgctcatagcgtaccgtttgacggtaaagcgacgttgtttgttgctgaacgcacgcttcaggaaggtatgagtcctgaacgcgcctggtcgccgtggattgcggagctggatatctatcgtcaggattgtgcgcatgtggatattatctctccaggggcgtttgtaaaaattgggccgattattcgcgcaacgctaaacaggtaa

SEQ ID NO: 483483 - DNA, 1134 bp, Shigella sonnei
atgtcatcattgaatattaaacagggaagtgacgctcatttttctgagtatcctctggcgtcgcccagtaataatgaaattgatttacttaatctaatcgaagttttatggcgggccaaaaaaacggtcatggcggtcgtttttgcatttgcctgcgcaggtttactgatctctttcatcctgccgcaaaaatggaccagctcagccgttattactcccgccgaagccattcagtggcaggacctggagaaaacctttaccaaactccgcgttcttgatctcgatgttaatatcgaccgtggcggtgcatttaacctgtttatcaagaagtttcagtctgttagcttgctggaagagtacctgcgttcatcaccttatgtgatggaccaattaaaagaggcgaaaatcgatgaactggatttgcatcgcgctattgttgcattgagcgaaaaaatgaaagcggttgatgacaatgccagtaagaaaaaagatgaaccgtcactgtatacctcctggacgctaagttttaccgcgccaaccagtaaagaggcgcagaccgttttgagcgggtatatcgattatatctctgcgttggtggtgaaagagtcgatagaaaacgtccgtaataaactggagatcaaaacccagtttgaaaaagaaaaactggctcaggatcgcattaaaacgaaaaatcaacttgatgcaaacattcagcgcctcaattattcactcgacattgccaacgcggcaggaattaaaaagcccgtatacagtaatggtcaggccgttaaagatgaccccgatttctctatttctctcggcgcagacggtattgaacgcaaactggaaattgaaaaagcggttactgacgttgcggaactgaacggtgaattacgtaatcggcagtatcttgtcgagcaattaacaaaagcaaatgtcaacgatgtgaattttacgccgtttaaatatcagttaagcccgtcattgccagtgaaaaaagacggtccgggtaaggcgattattgtgatcctttccgcgctgatcggcgggatggtggcttgtggtagcgtgttattgcgctatgcgatggcatccagaaaacaggatgccatgatggcagaccacttagtttaa

SEQ ID NO: 483484 - DNA, 816 bp, Shigella sonnei
atgaccgaatcagtagcccgtttgcgcggcgaacagttaaccctgggatatggcaaatataccgttgcggaaaatctgactgtagaaattcctgatggtcacttcacggcaattatcggaccaaatggctgtggtaaatccacgttactgcgtaccttaagccgcctgatgacgcctgctcacgggcatgtctggctggatggcgagcacattcaacattacgccagtaaagaagttgcacgccggattggtctgttggcgcaaaatgctaccacgccgggcgatatcaccgtgcaggagctggtggcgcgtggacgttatccgcatcaaccgctgtttacccgctggcgcaaagaggatgaagaagcggtaacgaaagcgatgcaggccacgagaataactcatctggcagatcaaagcgtggataccctttctggcggacaacgccagcgagcgtggatcgcgatggtgctagcccaggaaacggcaattatgctgctcgacgaacccacgacctggctggatatcagtcatcagattgatctactggaactgttaagcgaactgaaccgcgagaaaggctataccctggcggcggtgctgcacgatcttaatcaggcctgtcgttacgccagccatttgattgcattgcgggaagggaaaattgttgctcagggagcgccgaaggagattgtcactgctgaactgattgagcgcatttatggtctgcgatgcatgatcattgacgatccggtagccggaacgccgcttgtggtgccgctcggacgaacggcaccttcaaccgcaaatagttaa

SEQ ID NO: 483485 - DNA, 993 bp, Shigella sonnei
atgatttacgtctctcgccgattactcatcacctgtttgctgctgatttccgcctgtgtggttgcaggtatctggggattacgcagcggtgccgtcacgctggaaatctcgcaggtattcgccgcgttgatgggcgatgcgccgcgcagtatgacgatggtggtcaccgaatggcgtttaccacgcgtgctgatggcgctgttgattggcgcggcgctgggcgtcagcggcgcgatttttcagtcgctgatgcgtaacccgctcggcagccctgacgtaatgggctttaacaccggggcgtggagcggcgtgctggtggcgatggtgctgtttggtcaggacctgacggctatcgcgctggcagcaatggtgggcggcattgtcacttctctgttggtctggctgctcgcctggcgtaacggtatcgacacctttcggttgattattatcggcatcggcgttcgcgccatgctggtggcctttaatacttggctgttgctgaaagcgtctttagaaacggcgctaacagcgggtttgtggaatgccggatcgctcaatggcctgacgtgggcaaaaacttcgccttccgcacccatcatcatattgatgctcattgccgccgccttgctggtgcggcgaatgcgcttgctggagatgggcgatgataccgcctgcgcgctgggcgtcagcgtcgagcgttcgcgtctgttaatgatgctggttgcagtggtgcttaccgctgcggcaacggcgcttgccgggccgatttcctttattgctttagtcgcgccgcacattgcccgacgcattagcggcaccgctcgctgggggctgacccaggcggcgctgtgcggagcgctgttactgctggcggccgatctctgcgcccaacaactgtttatgccgtatcaacttccggttggcgtcgttaccgtcagcctcggcggtatttaccttatcgtcttgttaattcaggagtctcgcaaaaaatga

SEQ ID NO: 483486 - DNA, 1005 bp, Shigella sonnei
atgtctggttctgttgccgtgacacgcgccattgccgtgcccggattgctgttattactgattatcgcgacggcattaagcctgctcattggggcaaaatcactccccgcgtcagtagtgctggaggccttctcaggcacctgccagagcgccgactgcaccatcgtgctcgacgcgcgactgccgcgcacccttgccggtttacttgcaggcggtgcgcttgggcttgctggggcgttaatgcaaaccctcacccgaaatccacttgccgaccccggcttgcttggcgtgaacgccggagccagctttgccattgtgctgggtgcggcgctgtttggttactcatccgcgcaggaacaactggcgatggccttcgccggggcgctggtggcctcattgattgttgcctttatcggcagtcagggcggcgggcagttaagtccggtgcgtttaaccctggcgggcgtggcgctggcggcggtgctggaagggctgaccagcggcatcgccctgcttaatcctgacgtctacgatcaactgcgtttctggcaagccggttcgctggatattcgcaatctacataccttaaaagtggtgctgatcccggttctgatcgccggagcaactgcgctattactgagtcgcgcgctgaacagtttgagcctcggcagtgacaccgcgacggcgctgggcagtcgcgtggcgcgcacacagttgattggtctgctggcgattaccgtgctttgtggtagtgcgacggcggtagttggcccgattgcctttatcggcctgatgatgccgcacatggcgcgctggctggtaggtgccgatcatcgctggtcgctgcccgtcacgctacttgctacccctgccctgctgctgtttgccgatatcatcgggcgggtgattgtgcccggcgaactgcgcgtttctgtggtcagtgcgtttattggtgcaccggtgctgatcttcctcgtgcgacgtaaaacgcgaggtggtgcatga

SEQ ID NO: 483487 - DNA, 1251 bp, Shigella sonnei
atgaataaacaatcctggctgcttaacctcagcctgttgaaaacgcacccggcgtttcgcgcagtattcctcgctcgttttatctcaattgtgtctctgggtttgctcggcgtcgcggtgccggtgcagatccagatgatgacgcattctacctggcaggtggggctttcggtgacgctgaccggcggcgcgatgtttgttggcctgatggttggcggtgtgctggcggatcgctatgagcgcaaaaaagtgattttgctggcgcgcggcacctgtggcattggcttcattggactgtgcctgaacgcgctgctgccggagccgtcattgctggcaatctatttacttggtttatgggatggttttttcgcatcacttggtgttacggcgctactggcggcaacacctgcactggtagggcgtgaaaacttaatgcaggccggggcgatcaccatgttgaccgtgcgtctggggtcggtgatttcgcccatgattggcggtttattgctggcgaccggcggcgtagcctggaactacgggctggcggcggcgggcacgtttattaccttgctaccgttgttaagccttccggcgttgccaccgccaccgcagccgcgcgagcatccgttgaaatcattactggcaggatttcgttttctgctcgccagcccgctggtaggagggattgcgttgctgggtggtttattgacgatggcgagcgcggtgcgggtactgtatccggcgctggctgacaactggcagatgtcggcggcacagattggttttctctatgcggcgatcccgctcggtgcggctattggtgcgttaaccagcgggaagctggcacatagtgcgcgaccagggttattgatgctgctctccacgctgggatcgttcctcgccattggtctgtttggcctgatgccgatgtggattttaggcgtggtttgtctggcgctgttcggctggctgagcgcggttagttcgttgctgcaatatacaatgctgcaaacgcaaaccccggaagcgatgttagggcggattaacggtttgtggacggcgcagaacgtgacgggcgatgccataggcgcggcgctgttgggtggtttgggcgcgatgatgacaccggttgcttccgcaagcgcgagcggttttggtttgttgattatcggcgtgttgttattgctggtgctggtggagttgcgacgttttcgccagacgccgccgcaggtgacagcgtctgacagttag

SEQ ID NO: 483488 - DNA, 966 bp, Shigella sonnei
gtgagactcgccccgctctaccgcaacgcccttctattaacaggacttttgctttcaggaatagccgtagttcaggccgccgactggccgcgtcagattactgacagccggggcactcataccctggaaagccagccgcagcgtattgtttccaccagcgtcaccctgaccggatcactgctggcgattgatgctccggtgatcgccagcggcgcgaccacgccgaataaccgcgtcgcagatgaccagggctttttacgccagtggagcaaggtggcgaaagaacgcaaactgcaacggctctatatcggcgaaccgagcgccgaagccgttgccgcgcaaatgccggatctgattttaattagcgcaaccggcggggattcggcgctggcgctgtatgatcagctttccaccatcgccccgacattaatcatcaattacgacgacaaaagctggcagtcgctgttaacgcagcttggcgaaattaccgggcatgagaaacaagcggcagagcggattgcacagtttgataagcaactggcagcggcgaaagagcaaatcaaattaccgccgcagccggtcactgccattgtctataccgccgctgcacacagtgccaatctctggacgccggaatcagcacaagggcagatgctggaacaactcggctttacgctggcgaagttgcccgcagggttaaacgccagccaaagccagggcaaacgctatgacatcattcagcttggtggggaaaatctggctgctgggttaaacggtgaatcgctattcctgttcgccggtgatcagaaagacgccgatgcgatttatgccaatccactgctcgcgcacctgcctgcagtacaaaacaagcaggtttatacgctgggaaccgagacgttccgcctggattactacagcgccatgcaagtgctggacagacttaattcactgttaaaaaaagattga

SEQ ID NO: 483489 - DNA, 1176 bp, Shigella sonnei
atggatacgtcactggctgaggaagtacagcagaccatggcaacacttgcgcccaatcgctttttctttatgtcgccgtaccgcagttttacgacgtcaggatgtttcgcccgcttcgatgaaccggctgtgaacggggattcgcccgacagtcccttccagcaaaaactcgccgcgctgtttgccgatgccaaagcgcagggcatcaaaaatccggtgatggtcggggcgattcccttcgatccacgtcagccttcgtcgctgtatattcccgaatcctggcagtcgttctcccgtcaggaaaaacagacctcagcccactgttttacccgcagccagtcgctgaacgtggtggaacgccaggcaattcctgaacaaaccacgtttgaacagatggttgcccgcgccgccgcacttaccgccacgccgcaggtcgacaaagtggtgttgtcacgattgattgatatcaccactgacgccgccattgatagtggcgtattgctggaacggttgattgcgcaaaacccggttagttacaacttccatgtcccgctggctgatggtggcgtcctgctgggggccagcccggaactgctgctacgtaaagacggcgagcgttttagctccattccgttagccggttccgcgcgtcgtcagccggatgaagtgctcgatcgcgaagcgggtaatcgtctgctggcgtcagaaaaagatcgccatgaacatgaactggtgactcaggcgatgaaagaggtactgcgcgaacgcagtagtgagttacacgttccctcctctccacaattgattaccacgccgacgctgtggcatctcgcaactccctttgaaggtaaagcgaattcgcaagaaaacgcactgactctggcctgtctgctgcatccgacccccgcgctgagcggtttcccgcatcaggccgcgacccaggttattgctgaactggagccgtttgaccgcgaactgtttggcggcattgtgggttggtgtgacagcgaaggtaacggcgaatgggtggtgaccatccgctgcgcgaagctgcgggaaaatcaggtgcgtctgtttgccggagcggggattgtgcctgcgtcgtcaccgttgggtgagtggcgcgaaacaggcgtcaaactttctaccatgttgaacgtttttggattgcattaa

SEQ ID NO: 483490 - DNA, 1611 bp, Shigella sonnei
atgagcattccattcacccgctggccggaagagtttgcccgtcgctatcgggaaaaaggctactggcaggatttgccgctgaccgacattctgactcgccacgctgcgagtgacagcatcgcggttatcgacggcgagcgacagttgagttaccgggagctgaatcaggcggcggataacctcgcgtgtagtttacgccgtcagggcattaaacccggtgaaaccgcgctggtacaactgggtaacgtcgctgaactttacattacctttttcgcactgctgaaactgggcgttgcgccggtgctggcgttgttcagccatcagcgtagtgaactgaacgcctatgccagccagattgaaccggcgttactgattgccgatcgccaacatgcgctgtttagcggggatgatttcctcaatactttcgtcacagaacattcctccattcgcgtggtgcaactgctcaacgacagcggtgagcataacttgcaggatgcgattaaccatccggcagacggttttactgctacgccatcacctgctgatgaagtggcctatttccagctttccggcggcaccaccggtacaccgaagctgatcccgcgcactcataacgactactactacagcgtgcgtcgtagcgtcgagatttgtcagttcacacaacagacacgctacctgtgcgcgatcccggcggctcataactacgctatgagttcgccaggatcgctgggcgtctttcttgccggaggaacggttgttctggcggccgatcccagcgccacgctttgcttcccgttgattgcaaaacatcaggttaacgttaccgcgctggtgccgccggcagttagcctgtggttgcaggcgctggctgaaggcgaaagccgggcgcagcttgcctcgctgaaactgttacaggtcggcggcgcacgtctttctgccacccttgcggcgcgtatttccgctgagattggctgccagttgcagcaggtgtttggcatggcggaagggctggtgaactacacccgacttgatgatagcgcggagaaaattatccatacccagggttacccaatgtgtccggacgatgaagtatgggttgctgatgctgaaggaaatccactgccgcaaggggaagttggacgcctgatgacgcgcgggccgtacaccttccgcggttattacaaaagtccgcagcacaatgccagtgcctttgatgccaacggtttttactgttccggcgatctgatctctattgatccagagggttacatcaccgtgcaggggcgcgagaaagatcagatcaaccgtggcggcgagaagatcgctgccgaagagatcgaaaacctgctgctgcgccatccggcggtgatctatgccgcactggtgagcatggaagatgagctgatgggcgaaaaaagctgtgcttatctggtggtaaaagagccgctgcgcgcggtgcaggtgcgtcgtttcctgcgtgaacagggtattgccgaatttaaattaccggatcgcgtggagtgtgtggattcacttccgctgacggcggtcgggaaagtcgataaaaaacaattacgtcagtggctggcgtcacgcgcatcagcctga

SEQ ID NO: 483491 - DNA, 858 bp, Shigella sonnei
atggctattccaaaattacaggcttacgcactgccggagtctcacgatattccgcagaataaagttgactgggcctttgaaccgcaacgtgccgcgttgttaatccatgatatgcaggactattttgtcagcttctggggcgagaactgcccgatgatggagcaggtgatcgcgaatattgctgcgctgcgcgactactgcaaacagcacaatatcccggtttattacaccgcccagccgaaagagcagagcgatgaagatcgggcgctgttgaatgatatgtgggggccgggcctgacccgttcgccggaacagcaaaaggtggtggatcgcctgacgccagatgccgacgacacggtgctggtgaagtggcgctacagcgcgtttcatcgttctccgctggagcaaatgctcaaagagagtggacgtaaccagctgattattaccggggtatatgcccacattggctgtatgaccaccgcaaccgacgcatttatgcgcgatattaaaccgtttatggtggcggatgcgctggccgatttcagccgtgacgagcatttgatgtcgctgaaatatgtggccgggcggtctggccgggtggtgatgactgaaggattactgccagcacctgtccccgccaggaaagcggcgctgcgtgaggttatcctgccgttgctggacgagtccgatgaaccgttcgatgacgacaacctgatcgactacggtctggattcggtgcgcatgatggcgctggcggcgcgctggcgcaaagtgcatggcgatatcgactttgtcatgctggcgaaaaacccgaccatcgacgcctggtggaagctactctcccgcgaggtgaaataa

SEQ ID NO: 483492 - DNA, 747 bp, Shigella sonnei
atggatttcagcggtaaaaatgtctgggtaaccggcgcaggtaaaggtatcggctacgccacggcgctggcgtttgttgaagcgggagcgaaagttaccggttttgatcaagcgttcgctcaggagcaatatccctttgcgaccgaagtgatggatgttgccgatgctgcgcaggtcgcgcaggtatgtcagcgactgttagctgaaacggagcgactggacgtgctggtcaatgcggcgggaattttgcgcatgggcgcgaccgatcagctcagtaaagaggactggcagcagacttttgcggttaacgtcggcggtgcgtttaacctgtttcagcaaaccatgaaccagtttcgccgtcagcggggcggggcgattgtcactgtggcgtccgacgccgcacacacgccgcgtattggtatgagtgcttatggcgcatcgaaagcggcgctgaaaagcctggcgttgagcgtcgggctggaactggcggttagcggcgtgcgctgtaatgtggtttcgcctggctccaccgacaccgatatgcaacgcacgctgtgggtgagcgatgacgccgaagaacagcgtattcgcggctttggcgagcagtttaaactcggcattccgctggggaaaatcgcccgtccacaagagatcgccaacacgattttgttcctcgcctctgacctcgccagccatatcaccctacaggatattgtggtcgatggcggctcaacgctgggggcataa

SEQ ID NO: 483493 - DNA, 414 bp, Shigella sonnei
atgatctggaaacgccatttaacgctcgacgaactgaacgccaccagcgataacacaatggtggcgcatctgggaattgtgtatacccgtctgggagatgatgtgctggaagccgaaatgccggttgatacccgtactcatcagccgtttggcctgctgcatggcggcgcgtcggcggcgctggctgaaacgctgggatcgatggccggatttatgatgacccgtgacgggcagtgtgtggtgggtacggaacttaacgccacccatcatcgcccgatgtctgaaggcaaggtacgcggcgtctgccagccgctgcatcttgggcggcaaaatcagagctgggaaatcatcgttttcgatgaacaggggcggcgttgctgcacttgtcggctgggtacggcagttttgggatga

SEQ ID NO: 483494 - DNA, 2106 bp, Shigella sonnei
atgaacaaatcagggaaatacctcgtctggacagtgctctctgtaatgggagcatttgctctgggatacattgctttaaatcgtggggaacagatcaacgcgctgtggattgtggtggcgtcggtctgtatctatctgatcgcttaccgtttttatgggctgtatatcgccaaaaatgtgctggcggttgacccgacgcgtatgacgccagcggtgcgccataacgacgggctggactatgtgccgacggacaagaaagtgctgttcggtcaccattttgcggccattgccggagcagggccgctggtggggccggtgctggcagcgcaaatgggctacctgccggggatgatctggctgctcgccggggtggttctcgccggtgcggtgcaggatttcatggtgctgtttgtttctacgcgccgtgacggtcgctcgctgggtgagctggtcaaagaagagatggggccaactgccggggtgattgcgctggtagcctgctttatgatcatggtcattatccttgcagtactggcgatgatcgtggtgaaagccctgactcatagcccgtggggaacgtataccgttgcgttcaccattccgctggcgatttttatgggaatctacctgcgctatctgcgtccggggcgtattggcgaagtgtcagtgattggcctggtgttccttatttttgccattatctctggcggctgggtggcagaaagcccgacctgggcaccgtactttgactttaccggcgtgcagctgacctggatgctggtgggctacggttttgtggcggcggtgctgccggtgtggttactgctggccccgcgtgactacctctctaccttcctgaaaatcgggactatcgttggtctggcggtaggcattttgattatgcgtccgacgctgaccatgcctgcgctgaccaaatttgtcgatggcactggcccggtatggaccggtaatctgttcccgttcctgtttatcaccatcgcctgtggcgcggtgtcaggcttccatgcgctgatctcttccggcaccacgccgaagatgctggcgaacgaagggcaggcgtgctttatcggctacggtggaatgttaatggaatccttcgtggcgattatggcactggtttccgcctgtatcatcgatccgggcgtgtacttcgccatgaacagcccgatggcggtgctggctccggcagggacggcggatgtggtcgcttctgccgcgcaggtggtgagtagctggggctttgcgattactccggatacgctcaaccagattgccagcgaagtgggtgaacagtcgatcatttcccgtgcgggcggtgcgccgacgctggcggtggggatggcttacatcctgcacggtgcgctgggtggtatgatggatgtggcgttctggtatcacttcgccattctgtttgaagctctgtttattctgacggcggtagatgcgggtacgcgtgctgcgcgctttatgttgcaggatctgctgggcgtggtgtctcctggcctgaagcggaccgattcactgcctgctaacctgctggcaacagcgctgtgcgtactggcgtggggctacttcctccatcagggcgtggtcgatccgctgggcggcattaacactctgtggccgctgtttggtattgccaaccagatgctggcagggatggcgctgatgctctgtgccgtggtgttgttcaagatgaaacgtcaacgttacgcctgggtggcgctggtaccaacggcctggctgctgatttgtaccctgaccgcaggctggcagaaagcgtttagcccggatgcgaaagtcggcttcctggccattgctaataagttccaggcaatgatagacagcggcaatattccgtcgcagtatactgagtcacagctggcgcaactggtgttcaacaaccgtctggatgccgggttaaccatcttctttatggtggtcgtggtggttctggcgctgttctcgattaagtcggcactggcggcattgaaagatccgaagccaacggcgaaagaaacgccgtatgagccaatgccggaaaatgtcgaggagatcgtggcgcaggcaaaaggcgcacactaa

SEQ ID NO: 483495 - DNA, 198 bp, Shigella sonnei; identical to SEQ ID NO: 26913

SEQ ID NO: 483496 - DNA, 1089 bp, Shigella sonnei
atgcctcacaatcctatccgcgtggtcgtcggcccggctaactacttttcacatccaggaagtttcaatcacctgaacgattttttcactgatgaacaactttctcgcgcggtgtggatctacggcaaacgcgccattgctgcggcgcaaaccaaacttccgccagcgtttggacttccaggggcaaagcatattttgtttcgtggtcattgcagcgaaagcgatgtacagcaactggcggctgagtccggtgacgatcgcagcgtggtgattggcgtcggcggcggcgcactgctcgacaccgcgaaagccctcgcccgccgtctcggtctgccatttgttgccgttccgacgatcgccgctacctgcgccgcctggacaccgctctccgtctggtataacgatgccggacaggcgctgcattatgagattttcgacgacgccaattttatggtgctggtggaaccagagattatcctcaacgcgccgcaacaatatctgctggcggggatcggtgacacgctggcgaaatggtatgaagcggtggtgctggctccgcaaccagaaacgttgccgctaaccgtgcgactggggatcaataatgcgcaggccattcgcgacgtattgttaaacagtagcgaacaggcgctgagcgatcagcaaaatcaacagttaacgcaatcattttgcgatgtggtggatgctattattgctggtggtgggatggtcggtgatctgggcgatcgttttacgcgtgtggcggcggctcatgccgtgcataacggtctgactgtcctgccgcaaaccgagaaatttctccacggcaccaaagtcgcttatggcattctggtacaaagcgccttgctaggtcaggatgatgtgctggcgcaattaaccggggcgtatcagcgttttcatctgccgaccacgctggcggagctggaaatggatatcaataatcatgcggagatcgacaaagtgattacccacaccctgcgtccggtggaatacattcattacctgccagtcacgctgacaccagatacgttgcgtgcagcgttcgaaaaagtggaatcgtttaaagcctga

SEQ ID NO: 483497 - DNA, 1161 bp, Shigella sonnei
atgacaaataaccctctgattccacaaagcaaacttccacaacttggcaccactattttcacccagatgagcgcgctggcgcagcaacaccaggcgattaacctgtcgcaaggctttcctgattttgatggtccgcgctatttacaggagcggctggcgtaccacgttgcccagggggcaaaccaatacgcgcccatgaccggcgtgcaggccttgcgcgaggcgattgctcagaaaacggaacgtttgtatggctatcaaccagatgccgatagcgatatcaccgtaacggcaggggcgacggaagcgttatacgcggcgattaccgcactggtgcgcaatggcgatgaagtgatttgttttgatcccagctatgacagttacgcccccgccatcgcgctttctgggggaatagtgaagcgtatggcactgcaaccaccgcattttcgcgttgactggcaggaatttgccgcattattaagcgagcgcaccagactggtgatcctcaacactccgcataactccagtgcaactgtctggcagcaggctgatttcgccgctttgtggcaggcgatcgccgggcacgagatttttgtcattagcgatgaagtctacgagcacatcaacttttcacaacagggccatgccagtgtgctggcgcattcgcagctgcgtgagcgggcagtggcggtttcttcatttggcaagacctatcatatgaccggctggaaagtgggttattgtgttgcgccagcgcccatcagcgccgaaattcgcaaggtacatcagtatctgaccttttcggtgaataccccggcacagctggcgcttgctgatatgctacgtgcagaacctgagcattatcttgcgttaccggacttttatcgccagaagcgcgatattctggtaaatgccttaaatgaaagccggctggagattttaccgtgtgaaggtacatactttttgctggtggattacagcgcggtttctaccctggatgatgttgagttttgccagtggctgacgcaggagcacggcgtagcggcgattccgctgtcggtgttttgcgccgatcccttcccacataaactgattcgtctctgttttgccaagaaggaatcgacgttgctggcagcagctgaacgcctgcgccagctttag

SEQ ID NO: 483498 - DNA, 630 bp, Shigella sonnei
atgggggatactatgcaacaacgattaacgcaggatttaacgcaatttctcgccagcttgccggaagatgatcgcatcaaagcgattaatgaaatccgcatggcgatccatcaggttagcccctttcgtgaagagccagtggattgcgttctgtgggttaaaaacagccaacttatgcctaatgattacaacccaaacaacgtggcaccacccgaaaaaaaactgctgcaaaaatccattgaaatagatggttttacccaacccattgtggtcacacatacggataaaaatgccatggaaatcgtggatggttttcaccgccatgaaattggtaaaggctcatcatcattaaaattacgcttaaaaggttatttgccggtgacctgtctggaaggtacgcgtaatcaacgcatcgccgcgactattcgtcataatcgcgctcgtggacgccatcaaatcaccgccatgtcggaaatcgtccgtgaacttagccagttgggatgggacgataataaaattggcaaagagctgggaatggacagcgacgaagtgctgcgcctgaagcaaattaacggcctgcaagagctgtttgccgaccgtcaatattcccgcgcctggacggttaaataa

SEQ ID NO: 483499 - DNA, 411 bp, Shigella sonnei
atgtgcgcacgagtcagcggggtaaaaagtggcggcatttacgccggacatgataatcatttctatgggcatcggaaaatcctcaagccagaacatttagactggcaagaatatgcattattgctgctcaatagcatgccggaaaaaacagctgagcattaccgcaataaaatcgccatttatttgcactggtatcagaaaaaaggcatcgaggttccacaaacccagcaaggggacattggcgcgaaagatatcccctcctggcggcggatatgcaaagttttactcaataacgattactggtgtcgggcattatcatttagtcctacgaaagcgaagaactatcagcgttataacgaacggataaaaggaaaacgtcaggaatgggggatactatgcaacaacgattaa

SEQ ID NO: 483500 - DNA, 300 bp, Shigella sonnei
atgcctgctgtaatagataaagccctggatttcattggtgccatggatgtatcagcgccaacaccaagttcgatgaatgaaagcacggcgaagggaatctttaaatatttaaaagaactgggagtacctgcgagtgccgctgatattacggcgcgagctgaccaggaaggctggaaccctgggtttacggaaaaaatggttggatgggcaaaaaaaatggagtcaggtgaacgctctgtgattaaaaatcctgaatacttttcaacatatatgcaggaagaactaaaagcactggtctga

SEQ ID NO: 483501 - DNA, 180 bp, Shigella sonnei
atgtttgcaggtttaccttcactcacccatgaacagcagcaaaaagctgtcgagcggatccaggaactgatggcacaagggatgagcagcggccaggcaatcgcgttggtggcagaagagctgcgtgccaaccattccggcgagcgaatcgtggcgcgttttgaggatgaagacgagtaa

SEQ ID NO: 483502 - DNA, 1362 bp, Shigella sonnei
atgaagacgttatctcccgctgtgattactttaccctggcgtcaggacgccgctgaattttatttctcccgcttaagccacctgccgtgggcgatgcttttacactccggctatgccgatcatccgtatagccgctttgatattgtggtcgccgatccgatttgcactttaaccactttaggtaaagaaaccgttgttagtgaaagcgaaaaacgcacaacgaccactgatgacccgctacaggtgctccagcaggtgctggatcgcgcagacattcgcccaacgcataacgaagatttgccatttcagggcggcgcactggggttgtttggctacgatctgggccgccgttttgagtcactgccagaaattgcggaacaagatatcgttctgccggatatggcagtgggtatctacgattgggcgctcattgtcgaccaccagcgtcatacagtttctttgctgagtcataatgatgtcaatgcccgtcgggcctggctggaaagccagcaattctcgccgcaggaagatttcacgcttacttccgactggcaatccaatatgacccgcgagcagtacggcgaaaaatttcgccaggtacaggaatatctgcacagcggtgattgctatcaggtaaatctcgcccagcgttttcatgcgacctattctggcgatgaatggcaggcattccttcagcttaatcaggccaaccgcgcgccatttagcgcttttttacgtcttgaacagggtgcaattttaagcctttcgccagagcggtttattctttgtgataatagtgaaatccagacccgccctattaaaggcacgctaccacgcctgcccgatcctcaggaagatagcaaacaagcagaaaaactggcgaactcagcgaaagatcgtgccgaaaatctgatgattgtcgatttaatgcgtaatgatatcggtcgtgttgccgtagcaggttcggtaaaagtaccagagctgttcgtggtggaacccttccctgccgtgcatcatctggtcagcaccataacggcacaactaccagaacagttacacgccagcgatctgctgcgcgcagcttttcctggtggctcaataaccggggctccgaaagtacgggctatggaaattatcgacgaactggaaccgcagcgacgtaatgcctggtgcggcagcattggctatttgagcttttgcggcaacatggataccagcattactatccgcactctgactgccattaacggacaaatatactgctctgcgggcggtggaattgtcgccgatagccaggaagaagcggaatatcaggaaacttttgataaagttaataagatattacgccaactggagaagtaa

SEQ ID NO: 483503 - DNA, 579 bp, Shigella sonnei
gtggaataccgtagcctgatgcttgatgattttttatcgcgctttcaacttttgcgcccgcaaattaaccgggaaaccctaaatcatcgtcaggctgccgtgttaatccccatcgtccgtcgaccgcaaccggggttgttgctgactcagcgttcaattcatctgcgtaaacacgctggacaagtggcattccctggaggtgcagtcgatgacacggacgcatcagttatcgccgccgcgctgcgcgaagctgaagaagaggtcgctataccgccttccgccgttgaagttatcggcgtgctgccgcccgtcgatagcgtaactggctatcaggtaaccccagtggtcggcattatcccgcccgatctgccgtatcgcgccagtgaagatgaagtctcggcggtgtttgaaatgccgctcgcccaggcattacatctgggtcgttatcaccctttagatatctaccgccgtggcgattcacatcgggtatggctgtcctggtacgaacagtattttgtatggggaatgaccgcaggcataattcgtgagctggcgctgcaaattggtgtgaaaccctga

SEQ ID NO: 483504 - DNA, 1365 bp, Shigella sonnei
gtgattagtctattcgacatgtttaaggtggggattggtccctcatcttcccataccgtagggcctatgaaggcaggtaaacagttcgtcgatgatctggtcgaaaaaggcttactggatagcgttactcgcgttgccgtggacgtttatggttcactgtcgctgacgggtaaaggccaccacaccgatatcgccattattatgggtcttgcaggtaacgaacctgccaccgtggatatcgacagtattcccggttttattcgcgacgtagaagagcgcgaacgtctgctgctggcacagggacggcatgaagtggatttcccgcgcgacaacgggatgcgttttcataacggcaacctgccgctgcatgaaaacggtatgcaaatccacgcctataacggcgatgaagtcgtctacagcaaaacttattattccatcggcggcggttttatcgtcgatgaagaacactttggtcaggatgctgccaacgaagtgagcgtgccgtatccgttcaaatctgccaccgaactgctcgcgtactgtaatgaaaccggctattcgctgtctggtctcgctatgcagaacgaactggcgctgcacagcaagaaagagatcgacgagtatttcgcgcatgtctggcaaaccatgcaggcatgtatcgatcgcgggatgaacaccgaaggtgtactgccaggcccgctgcgcgtgccacgtcgtgcgtctgccctgcgccggatgttagtttccagcgataaactgtctaacgatccgatgaatgtcattgactgggtaaacatgtttgcgctggcagttaacgaagaaaacgccgccggtggtcgtgtggtaactgcgccaaccaacggtgcctgcggtatcgttccggcagtgctggcttactatgaccactttattgaatcggtcagcccggacatctatacccgttactttatggcagcgggcgcgattggtgcattgtataaaatgaacgcctctatttccggtgcggaagttggttgccagggcgaagtgggtgttgcctgttcaatggctgctgcgggtcttgcagaactgctgggcggtagcccggaacaggtttgcgtggcggcggaaattggcatggaacacaaccttggtttaacctgcgacccggttgcagggcaggttcaggtgccgtgcattgagcgtaatgccattgcctctgtgaaggcgattaacgccgcacggatggctctgcgccgcaccagtgcaccgcgcgtctcgctggataaggtcatcgaaacgatgtacgaaactggtaaggacatgaacgccaaataccgcgaaacctcacgcggtggtctggcaatcaaagtccagtgtgactaa

SEQ ID NO: 483505 - DNA, 1599 bp, Shigella sonnei
atgcaaaaagcacaacggatcattaaaacctatcgccgtaatcgaatgattgtttgtacgatttgcgcactcgttacgctcgcttcgaccctgagcgtgcgatttatttcacagcgtaacttaaatcaacaacgggtagtacaattcgccaatcacgctgtagaggaattagataaagtactgcttcccctacaggcaggtagcgaagtcttgcttccgctgattggtctgccctgctctgtcgcccatttgccattacgtaaacaggcggcaaaactccaaactgtgcgatccattggcctggtgcaagacggaacactctattgctccagcatttttggttatcgcaatgtgcccgtcgtggacattctggctgaacttcctgcaccgcaaccacttttacgcctgacgatcgaccgtgccctgattaaaggcagtccggttttgattcaatggacgcctgcagcgggcagtagcaatgctggggtcatggagatgattaacatcgacttactgacggcaatgctccttgagccacaactgccgcaaatcagtagcgccagcctgacggtggacaaacggcatttgctctatggtaatgggctggtagattcccttccgcaacctgaagacaatgaaaactatcaggtttcttcgcaacgctttccttttaccattaacgttaatggtccgggggctacggcgctggcatggcactatcttccaacacaattaccgctggcggtgctgctaagtttactggtgggctacatcgcctggctggcgaccgcttaccggatgagcttttcccgcgaaatcaatctgggcctggcgcaacatgagttcgaattgttctgtcagcctttgcttaatgcgcgcagccagcaatgtattggtgtagagattttgctgcgctggaacaatccgcgtcagggctggatttcaccggatgtgtttattcctatcgcggaagaacatcatttaattgtgccactgacccgctatgtgatggcagaaaccattcgtcagcgccatgttttcccgatgagtagtcagtttcatgttggcattaacgtcgcacccagccattttcgccgtggtgtgctgataaaagatctcaatcagtactggtttagcgctcacccgattcagcaactgatcctcgaaatcaccgaacgcgatgccttactggatgttgattatcggattgcccgcgagctacatcgtaaaaacgtcaaactggcgattgatgacttcggcaccggcaacagttcattttcctggcttgaaacattacgtcctgacatgctgaaaattgataagtcatttaccgcagctataggttctgacgcggttaactcgacggtgaccgatatcatcatcgcgctggggcaaagactgaatattgaactggtggcggagggcgtggaaacgcaagaacaggcgaagtatttgcgccgtcatggcgtgcatattttgcaagggtatttgtacgcacagccgatgccgctacgtgattttcccaaatggctggcgggcagccaaccgccgcccgcccggcataatggacatatcacgcccattatgccgttacgttaa

SEQ ID NO: 483506 - DNA, 1551 bp, Shigella sonnei
atggaattcttaatggacccctcaatttgggcggggctactcacgcttgttgttctcgaaattgtgctgggtatcgataacctggtcttcatcgccattcttgctgacaaactgccgccaaaacaacgcgataaagcgcgtttgctggggttatcactggcgctgattatgcgtctggggctgctgtcgctgatttcatggatggtcacgctgaccaaaccgctatttaccgtcatggatttctccttctccggacgcgacctgattatgttgttcggggggatattcttgctgttcaaagcaacaaccgaactgcatgaacggctggaaaaccgcgatcatgattccggccacggtaaaggctacgccagtttctgggtggtcgtcacacagattgtcatccttgacgccgtcttctcgttggatgcggtaattactgcagtagggatggttaaccatctgccggtgatgatggcggcggtagtgattgcgatggcggttatgttgctggcatccaaaccgctgacgcgattcgttaaccagcaccccacggtggtggtgctctgtctgagcttcctgttaatgattggtctgagtctggtggcagaaggtttcggtttccacattccgaaaggttacctgtatgccgcgattggcttctcgatcatcatcgaagtgtttaaccagattgcgcgtcgcaactttattcgccaccagtcgactttgccgctgcgagcgcgtactgccgatgccatcctgcgtttgatgggcgggaaacgtcaggccaatgttcagcacgatgccgataacccgatgccgatcccggaaggtgcatttgccgaagaagaacgttacatgattaacggcgtactgacgcttgcgtcgcgttctctgcgcgggatcatgacgccgcgcggtgaaataagctgggttgacgctaatctcggggtcgatgaaatccgcgagcaactgctctcttcaccgcacagtctgttcccggtatgtcgcggtgaactggatgaaatcatcggtattgtacgtgctaaagaactgctggtggcgctggaagagggcgttgatgtggcggcgattgcttcggcgtctccggcgattatcgtcccggaaaccctcgatccgatcaacctgttgggcgtgctgcgtcgtgctcgcgggagctttgttatcgtgaccaacgagtttggtgtggtacaaggtctggtcacgccgctggatgtgctggaagccattgcgggtgaattcccggacgctgacgaaacgccggaaatcattactgatggtgacggctggctggtaaaaggcggtacagatttgcatgccttgcagcaggcgcttgatgttgagcaccttgccgatgacgatgatatcgcgacggtcgcgggcctcgtgatctcggcaaatggtcacattccccgtgtgggcgatgtgattgatgtagggccactgcatatcaccatcattgaagccaatgattatcgtgttgatctggttcgcattgttaaagagcaaccggcgcacgatgaagatgagtaa

SEQ ID NO: 483507 - DNA, 210 bp, Shigella sonnei; identical to SEQ ID NO: 460771

SEQ ID NO: 483508 - DNA, 972 bp, Shigella sonnei
gtgaccattgctattgttataggcacacatggttgggctgcagagcagttgcttaaaacggcagaaatgctgttaggcgagcaggaaaacgtcggctggatcgatttcgttccaggtgaaaatgccgaaacgctgattgaaaagtacaacgctcagttggcaaaactcgacaccactaaaggcgtgctgtttctcgttgatacatggggaggcagcccgttcaatgctgccagccgcattgtcgtcgacaaagagcattatgaagtcattgcaggcgttaacattccaatgctcgtggaaacgttaatggctcgtgatgatgacccaagctttgatgaactggttgcgctggcagtagaaacaggccgtgaaggcgtgaaagcactgaaagccaaaccggttgaaaaagccgcgccagcacccgctgccgcagcaccaaaagcggctccaactccggcaaaaccaatggggccaaacgactacatggttattggccttgcgcgtatcgacgaccgtctgattcacggtcaggtcgccacccgctggaccaaagaaaccaatgtctcccgtattattgttgttagtgatgaagtggctgcggataccgttcgtaagacactgctcacccaggttgcacctccgggcgtaacagcacacgtagttgatgttgccaaaatgattcgcgtctacaacaacccgaaatatgctggcgaacgcgtaatgctgttatttaccaacccaacagatgtagagcgtctcgttgaaggcggcgtgaaaatcacctctgttaacgtcggtggtatggcattccgtcagggtaaaacccaggtgaataacgcggtttcggttgatgaaaaagatatcgaggcgttcaagaaactgaatgcgcgcggtattgagctggaagtccgtaaggtttccaccgatccgaaactgaaaatgatggatctgatcagcaaaatcgataagtaa

SEQ ID NO: 483509 - DNA, 801 bp, Shigella sonnei
atggagattaccactcttcaaattgtgctggtatttatcgtagcctgtatcgcaggtatgggatcaatcctcgatgaatttcagtttcaccgtccgctaatcgcgtgtaccctggtgggtatcgttcttggggatatgaaaaccggtattattatcggtggtacgctggaaatgatcgcgctgggctggatgaacatcggtgctgcagttgcgcctgacgccgctctggcttctatcatttctaccattctggttatcgcaggtcatcagagcattggtgcaggtatcgcactggcaatccctctggccgctgcgggccaggtactgaccatcatcgttcgtactattaccgttgctttccagcacgctgcggataaggctgctgataacggcaacctgacagcgatttcctggatccacgtttcttctctgttcctgcaagcaatgcgtgtggctattccggccgtcatcgttgcgctgtctgttggtaccagcgaagtacagaacatgctgaatgcgattccggaagtggtgaccaatggtctgaatatcgccggtggcatgatcgtggtggttggttatgcgatggttatcaacatgatgcgtgctggctacctgatgccgttcttctacctcggcttcgtaaccgcagcattcaccaactttaacctggttgctctgggtgtgattggtactgttatggcagtgctctacatccaacttagcccgaaatacaaccgcgtagccggtgcgcctgctcaggcagctggtaacaacgatctcgataacgaactggactaa

SEQ ID NO: 483510 - DNA, 852 bp, Shigella sonnei; identical to SEQ ID NO: 460768

SEQ ID NO: 483511 - DNA, 459 bp, Shigella sonnei
atgacaatcacggacctggtactgattcttttcatcgccgcactcctggccttcgcgatctacgatcagttcatcatgccccgccgtaacggccccaccctgctggcaattcctttgctccggcgtggtcgcatcgatagcgttatcttcgtcggattgattgtcattcttatctataacaacgtcacgaatcatggtgcgttaataacgacatggttattaagcgcactggctctgatgggtttttatatattctggatccgcgttccgaagatcatctttaaacaaaaaggttttttcttcgccaatgtctggattgaatatagccgaatcaaagcgatgaacttgtcggaagatggcgtgttggtgatgcaattagaacagcgtcggctgttaatccgcgttcgaaatatcgacgatctggaaaaaatttataagcttctcgtttcaactcaataa

SEQ ID NO: 483512 - DNA, 567 bp, Shigella sonnei; identical to SEQ ID NO: 460766

SEQ ID NO: 483513 - DNA, 810 bp, Shigella sonnei
atgtctttttcctgtccactttgccatcagcctctttcgcgtgaaaaaaacagctatatctgtccccagcgacatcagtttgatatggcgaaagaagggtatgtcaatctgctgtccgttcagcataaacggtctcgtgatccgggcgacagcgcggaaatgatgcaagcacgccgcgcattcttagatgccggacattatcagccgctgcgtgatgcaattgtcgcccaactgagggaacggcttgatgataaggccacggcggtgctggatattggctgtggtgaagggtattacacacacgcatttgccgatgcgttgcccgaaatcaccacgtttggtctggatgtttcgaaggtagcgataaaagcggcggcgaaacgctatccgcaggtcactttttgtgtcgcttccagccaccgtttgccgttttccgataccagtatggacgccataatacgtatttacgcgccgtgtaaagcagaagaattagcacgagtagtgaagcccggcggctgggtcattactgccacgccgggaccgcgacatttgatggagctgaaggggctgatttacaatgaagtacatcttcatgcacctcatgcagaacaactggaaggttttacattacagcagagtgcggagttgtgttatccgatgcgtcttcgcggtgatgaagccgtcgcattattgcagatgacgccgtttacctggcgtgcgaagccagaagtctggcaaacactggcagcaaaagaagtgttcgactgccagacggactttaatattcacctctggcagcgttcttattaa

SEQ ID NO: 483514 - DNA, 210 bp, Shigella sonnei
atggcaaagattaaaggtcaggttaagtggttcaacgagtctaaaggttttggcttcattactccggctgatggcagcaaagacgtgttcgtacacttctccgctatccagggtaatggcttcaaaactctggctgaaggtcagaacgttgagttcgaaattcaggacggccagaaaggtccggcagctgttaacgtaacagctatctga

SEQ ID NO: 483515 - DNA, 288 bp, Shigella sonnei; identical to SEQ ID NO: 459803

SEQ ID NO: 483516 - DNA, 240 bp, Shigella sonnei
atgcgattcatcattcgcacagttatgctgatagcactggtatggataggattattactcagcggatatggcgttttgattggaagcaaagagaatgccgcaggattaggtttgcaatgtacctatctgactgccagaggcaccagcacggtacaatacttgcacactaaaagtggtttcttggggataacagattgcccactgttacgtaaaagcaatatcgtggtcgataatggttaa

SEQ ID NO: 483517 - DNA, 792 bp, Shigella sonnei
atggctaacgcagatctggataaacagcctgattctgtatcttccgtgctaaaagtttttggcattttgcaggcgctgggtgaagagcgcgaaatagggataaccgagctgtcgcagcgcgtcatgatgtcaaaaagcaccgtttatcgctttttacagaccatgaaaaccttaggttatgtggcgcaggaaggggagtcggagaaatattccctgaccctgaaattgtttgaactgggcgctcgcgcgttacaaaacgtcgatttaattcgtagcgcagatatccagatgcgtgagatctcccgcctgaccaaagaaactatccacctcggcgcactggacgaagacagtattgtttacattcacaaaattgactctatgtacaatttgcgcatgtattcacggattgggcgtcgtaatccgctgtacagcaccgcgattggtaaggtactgctggcatggcgcgatctcgatgaagtgaagcaaattcttgagggcgtggagtataaacgcagtaccgagcggaccatcaccagtacagaagcgttattacccgttctggaccaggtgcgcgagcaggggtatggcgaagataacgaagagcaggaagaagggctgcgatgcattgcggtaccggtatttgatcgctttggcgtggtcattgccggtttgagcatctccttcccgacgttgcgtttctctgaagagcgtttacaggaatatgtcgcaatgttgcataccgcagcgcgcaaaatttctgcccaaatgggttatcacgactatccgttctga

SEQ ID NO: 483518 - DNA, 813 bp, Shigella sonnei
atgcgttttctgccacccaatggttctcgcgccagtaaaccccgtttcgacctgcccagcgccgtgatgaacgcgttaaccttcggcctgcttatcactgcgttgagtggtttcgctcaggggcaatcgctgacgttaattgctgcggaactggtggtaatggttgttgttggtattttctttattcgccgccagctttctcttcccgtaccgctgctaccggtggatttactgcgtatcccgctgttttcactttctatttgcacatctgtttgctctttctgcgcacaaatgctggcaatggtttccctgcccttttacctgcaaaccgtgctcgggcgtagtgaagtcgaaacaggtttacttctgacaccgtggccgttagcaacgatggtgatggctccgttggcaggctatttgattgaacgcgtacatgcaggattgctgggtgctctagggttgttcatcatggctgcggggctttttcccctggttctgctgcccgcgtcacctgcggatatcaatattatctggccgatgatcttatgtggcgctggatttggcttgttccagtcacccaataaccacaccattattacctccgctcctcgcgaacgtagcggtggagccagtggcatgttaggaacggctcgtctactgggtcagagtagcggcgcggcactggtggcgctgatgctaaatcagttcggtgataatggtacgcacgtttcgctgatggctgcggctattctggcagtgattgctgcctgtgtcagtggtttacgtatcactcagccacgatccaaggcataa

SEQ ID NO: 483519 - DNA, 882 bp, Shigella sonnei
atgatgcgaatcgcgctcttcctgctaacgaacctggccgtaatggtcgttttcgggctggtactgagcctgacagggatacagtcgagcagcgttcaggggctgatgatcatggccttgctgttcggttttggtggttccttcgtttcgcttctgatgtccaaatggatggcattacgatctgttggcggggaagtgatcgagcaaccgcgtaacgaaagggaacgttggctggtcaatactgtagcaacccaggctcgtcaggcagggatcgctatgccgcaagtggctatctaccatgcgccggacatcaacgcttttgcaaccggtgcgcgccgtgatgcctctctggttgctgtcagcaccggtttgctgcagaacatgagcccggatgaagccgaggcggtaattgctcacgaaatcagccacatcgccaatggtgatatggtcaccatgacgctgattcagggcgtggtgaacaccttcgttatctttatttcccgtattctggcgcagcttgccgcgggttttatgggcggaaatcgtgatgaaggtgaagagagcaacggcaacccgctgatctactttgcggttgcaacggttctggaactggtgtttggtattctggcgagcattatcaccatgtggttctcgcgtcatcgtgaattccatgctgatgccggttcggcaaaactggttggtcgcgagaaaatgattgccgcgctgcagcgcctgaaaaccagctatgaaccgcaagaagcaaccagcatgatggctttctgcattaacggtaagtcgaaatcgctcagtgagttgttcatgactcacccgccgctggataaacgaattgaagctctgcgtacgggtgaatacctgaagtaa

SEQ ID NO: 483520 - DNA, 2049 bp, Shigella sonnei
atgaacatgttttttaggcttaccgcgttagctggcctgcttgcaatagcaggccagaccttcgctgtagaagatatcacgcgtgctgatcaaattccggtattaaaggaagagacgcagcatgcgacggtaagtgagcgcgtaacgtcgcgcttcacccgttctcattatcgccagttcgacctcgatcaggcattttcggccaaaatctttgaccgctacctgaatctgctcgattacagccacaacgtgctgctggcaagcgatgttgaacagttcgcgaaaaagaaaaccgagttaggcgatgaactgcgttcaggcaaactcgacgttttctacgatctctacaatctggcgcaaaagcgccgttttgagcgttaccagtacgctttgtcggtactggaaaagccgatggatttcaccggcaacgacacttataaccttgaccgcagcaaagcgccctggccgaaaaacgaggctgagttgaacgcgctgtgggacagtaaagtcaaattcgacgagttaagcctgaagctggcaggaaaaacggataaagaaattcgtgaaaccctgacacgccgctacaaatttgccattcgtcgtctggcgcaaaccaacagcgaagatgttttctcgctggcaatgacggcgtttgcgcgtgaaatcgacccgcataccaactatctttccccgcgtaataccgaacagttcaacactgaaatgagtttgtcgctggaaggtattggcgcagtgctgcaaatggatgatgactacaccgttatcaattcgatggtggcaggtggtccggcagcgaagagtaaagctatcagcgttggtgacaaaattgtcggtgttggtcaaacaggcaagccgatggttgacgtgattggctggcgtcttgatgatgtggttgccttaattaaagggccgaagggcagtaaagttcgtctggaaattttacctgctggtaaagggaccaagacccgcactgtaacattgacccgtgaacgtattcgtctcgaagaccgcgcggttaaaatgtcggtgaagaccgtcggtaaagagaaagtcggcgtgctggatattccgggcttctatgtgggtttgacagacgatgtcaaagttcaactgcagaaactggaaaaacagaatgtcagcagtgtgatcatcgacctgcgtagcaatggcggtggggcgttgaccgaagcggtatcgctctcaggtctgtttattcctgcgggtcccattgttcaggtccgcgataacaacggcaaggttcgtgaagacagcgataccgacgggcaggtgttctataaaggcccgctggtggtactggttgaccgtttcagtgcttcggcttcagaaatctttgccgcggcaatgcaggattacggtcgtgcgctggttgtgggtgaaccgacgtttggtaaaggcaccgttcagcaataccgttcattgaaccgtatttacgatcagatgttacgtcctgaatggccagcgctgggttctgtgcagtacacgatccagaaattctatcgcgttaacggcggcagtacgcaacgtaaaggcgtaacgccagacatcatcatgccgacgggtaatgaagaaacggaaacgggtgagaaattcgaagataacgcgctgccgtgggatagcattgatgccgcgacttatgtgaaatcaggcgatttaacggcctttgggccggagctgctgaaggaacataatgcgcgtatcgcgaaagatcctgagttccagaacatcatgaaggatatcgcgcgcttcaacgctatgagggacaagcgcaatatcgtttctctgaactacgctgtgcgtgagaaagagaataatgaagatgatgcgacgcgtctggcgcgtttgaacgaacgctttaaacgcgaaggtaaaccggagttgaagaagctggatgatctaccgaaagattaccaggagccggatccttatctggatgagacggtgaatatcgcactcgatctggcgaagcttgaaaaagccagacccgcggaacaacccgctcccgtcaagtaa

SEQ ID NO: 483521 - DNA, 699 bp, Shigella sonnei
atggaaaatcaacctaagttgaatagcagtaaagaagtaatcgcgtttctggccgaacgttttccccactgtttcagtgcggaaggtgaagcgcgtccgctgaaaatcggtatttttcaggatttggtcgatcgtgttgccggggaaatgaacctgagcaaaacgcaattacgatccgctttacgtctctacacttcgagctggcgttatctttacggtgttaaacccggcgcaacgcgtgtcgatcttgacggcaacccatgcggtgagctggacgagcaacatgtagagcatgctcgcaagcagcttgaagaagcgaaagcgcgtgttcaggcacagcgtgctgaacagcaagcgaaaaaacgcgaagctgccgcagctgctggtgagaaagaagacgcactgcgccgcgaacgcaagccacgtccgaccacgccacgccgcaaagaaggcgctgaacgtaaacctcgtgcgcaaaagccggtagagaaagcgccaaaaacagtaaaagcacctcgcgaagaacagcacaccccggtttctgacatttcagctctgactgtcggacaagccctgaaggtgaaagcgggtcaaaacgcgatggatgccaccgtattagaaatcaccaaagatggcgtccgcgtccagctgaattcgggtatgtctttgattgtgcgcgcagaacacctggtgttctga

SEQ ID NO: 483522 - DNA, 552 bp, Shigella sonnei; identical to SEQ ID NO: 459810

SEQ ID NO: 483523 - DNA, 1284 bp, Shigella sonnei
atggctcttaacacaccacaaattacgccgacaaaaaagataacagtgagggcaatcggcgaggaactgccgcgtggtgattaccaacgttgcccgcaatgtgacatgctgtttagcctgcccgagataaattctcatcagagtgcctattgtccgcgctgtcaggcaaaaattcgcgacgggcgcgactggtcgctaacgcgcctggcggcaatggctttcaccatgctgttgctgatgccgtttgcctggggcgaaccgctgttgcatatctggctgttaggtattcgtatcgacgccaacgtcatgcaaggcatctggcaaatgaccaaacagggcgatacgataacgggggcgatggtctttttctgcgttattggtgcccccctcattctggtgtcctccatagcatatttatggtttggtaaccgactgggaatgaatttacgtccggtactgctgatgcttgagcgtcttaaagagtgggtaatgctggatatctacctggtcggcattggcgttgcttctataaaggtacaggattatgcccatatccaggcgggtgtcggcttgttctcttttgtggcgttggtgattttaacgacggtgacgttgtcacatcttaatgttgaggagctgtgggagcgatattatccgcagcgccccgctacgcgtagggacgagaaacttcgtgtctgtcttgggtgccattttaccggctatcctgatcagcgtggtcgctgcccgcgttgccatatcccgctacgcctgcgtcgtcgtcatagtttgcaaaaatgctgggcggcgctgttagcgtcaatcgttttgttgttaccagccaacctattgcctatttctatcatttatctgaatggtggccggcaggaagatacgattctttccgggattatgtcgctggcaagtagcaacattgcggtcgccggaatcgtgtttatcgccagtattctggtaccgtttactaaagtgatcgtcatgttcactttactgttgagcattcattttaaatgccagcaaggtttacgcacacgcattctgttactgcggatggtgacctggattggacgctggtcgatgctcgacctgtttgtcatatctttaaccatgtcgctgattaatcgcgatcagatcctcgcttttactatgggaccggctgcgttttattttggcgcagccgtaattttgactattcttgctgtggaatggctggacagccgcttactttgggatgcacatgagtcaggaaacgcccgcttcgacgactga

SEQ ID NO: 483524 - DNA, 2634 bp, Shigella sonnei
atgagtcaggaaacgcccgcttcgacgactgaagcgcagattaaaaataaacgccgtatctcacctttctggctgctgcctttcatcgcgctaatgattgccggttggctgatttgggacagttatcaggaccggggtaataccgtcaccatcgactttatgtcggcggatggtattgtcccgggccgtacgcctgttcgttatcagggcgttgaagtcggaacagtgcaggatatcagcctcagcgacgatcttcgtaagattgaagtcaaggtcagcatcaagtccgatatgaaagatgcgctgcgcgaagagactcagttctggctggtgacgccaaaagcatcgttggcaggtgtctccgggctggacgccctcgtcggtggtaactatatcggcatgatgccaggtaaaggtaaagagcaggatcactttgtcgcactcgatacccaaccgaaatatcgactggacaatggcgatctgatgatccacctgcaagcccccgatctcggttcgctgaacagcggttcattggtctatttccgcaagatccctgtgggaaaagtctacgactatgccatcaatcccaacaagcaaggcgtggtgattgatgtcctgatcgagcggcgttttaccgacctagtgaaaaaaggtagccgtttctggaacgtttccggcgttgatgccaacgtcagtatcagtggtgcgaaggtgaaactggaaagtctggcggcactggttaacggtgcgattgccttcgattcacctgaagagtcgaaacctgccgaggcggaagatacctttggtctgtatgaagacctcgcccatagccagcgtggcgtaataatcaaactggaactgccgagtggggccggattaaccgccgactcgacgccattaatgtatcagggactggaagtcggacagctaactaaactggatttaaatcctggtggtaaagtcactggggaaatgacagttaatcccagcgtcgttaccctgcttcgtgaaaatacccgcatcgaattacttaatccgaaattatcccttagcgatgccaatctcagcgccctgctgactggcaaaaccttcgagttggtacccggcgatggcgagccacgcaaagagttcgttgttgtgccaggcgaaaaagcactgctgcatgaacctgatgttctgacgctgaccctgaccgcgccggaaagttacggtattgatgctggtcagccgctcattcttcacggcgtgcaggtaggccaggttattgatcgtaaactcaccagcaaaggcgttacctttaccgtcgccatcgagcctcagcatcgcgaactggtaaaaggcgatagcaaatttgtcgtcaacagccgtgtcgacgtgaaggtggggctggatggcgttgagtttcttggtgccagcgcctcagaatggattaacggcgggatacgtattctgccaggcgataaaggtgagatgaaagccagctatccactgtatgccaatctggaaaaagcgctggagaacagccttagcgatttacccaccacaaccgtgagtttgagtgcagagacgctgccggatgtgcaggcaggatcggtagtgctgtaccgtaaatttgaagttggtgaagtgattaccgtgcgtccgcgagctaacgcgtttgatatcgatctgcatattaagccggagtatcgcaaccttctgaccagcaatagcgtgttctgggcagaaggcggggcgaaagttcagctgaatggtagtggcctgaccgtacaggcatccccgctctccagagcattaaagggagccattagcttcgataacctcagcggtgccagcgccagtcagcgtaaaggcgacaaacgaattctgtatgcttccgaaacagcggcccgtgcggttggtgggcagattacgcttcacgctttcgatgccggaaaactggcggtcgggatgccaattcgctatctcggtattgatatcgggcaaatccagacgctggatctgattaccgcgcgcaatgaagtacaggcaaaggcggtgctctatccggagtatgtccagaccttcgcccgcggcggtacgcgcttctcggtggtcacaccgcaaatttcagccgcgggcgttgagcatctagatactatcctccagccgtatatcaatgtcgaaccaggtcggggtaatcctcgccgtgactttgagttgcaagaagctactattactgattcgcgttacctggatggcttaagcattattgtcgaagcaccggaagccggttcgttaggtattggtacgcctgtgctgttccgtggtctggaagtaggtacggttaccggaatgacgctggggacattgtcagatcgcgtgatgattgcgatgcgcatcagtaaacgctatcaacacctggtgcgtaacaattccgtcttctggttggcatcgggttacagtctggactttggtctgacgggcggcgtagtgaaaaccggcacctttaaccagtttatccgtggcggcatcgccttcgccacgcctccgggtacgccactggcaccgaaagcccaggaaggcaagcacttcctgttgcaggaaagtgaaccgaaagagtggcgtgaatggggtactgcgcttcccaaataa

SEQ ID NO: 483525 - DNA, 1521 bp, Shigella sonnei
atgcccactgctccggcgtgcctgcgccggagcgtttatgctaaactgcgcgcctgttttttttgccagtggtatatgctcgtggcccaacacaccgtttatttcccggacgcctttctgacgcaaatgcgcgaagcgatgccttcgacgctctcttttgatgattttcttgccgcctgtcagcgcccgttgcgccgcagcattcgcgttaatacgctgaaaatctccgttgctgatttcctgcaattaaccgctccttatggctggacgcttacgccaattccgtggtgtgaagaaggtttctggattgaacgcgacaatgaagatgcattgccattgggtagtaccgccgagcatttaagtggcctgttttatattcaggaagccagttcaatgttgcccgtcgccgccttgtttgctgacggtaatgcaccacagcgggtgatggatgtcgctgccgcgcctggctccaaaacgacgcaaatttccgcgcggatgaataacgaaggggcaattcttgccaatgagttttccgccagtcgggtaaaagtgttacatgccaatatcagccgctgtggtatcagtaatgttgcgctcacacattttgatggccgcgtgtttggtgcggcagtgccagaaatgtttgatgccattttgctggacgctccctgctccggcgaaggcgtggtgcgtaaagatcccgatgcgctaaaaaactggtcaccagaaagcaatcaggaaatcgcagctacccaacgggaactgatcgacagcgcctttcatgcattacgccctggcggtacgctggtttactcgacctgtaccttaaaccaggaagaaaacgaagccgtttgcctgtggctgaaagagacttaccccgacgcagtagagtttttaccgcttggtgatctcttccctggtgcaaacaaggcgctgaccgaggaaggctttttgcatgttttcccacaaatttacgactgcgaaggcttcttcgttgctcgtctgcgtaaaactcaggcgattcccgccttacccgcccccaaatacaaagtcggtaattttccgttcagcccagtgaaagatcgagaagctggacaaattcgtcaggcggctgcaggtgttggcttaaactgggatgaaaacctgcgcctctggcagcgtgacaaagaactgtggttgttcccggtgggcattgaagccctgatcggtaaagtccgattttctcgcttggggattaaacttgccgaaacgcacaacaaaggttatcgctggcagcatgaagcagttattgcccttgccacccccgacaatgtgaacgcttttgaactgacaccgcaggaagcggaggagtggtatcgcgggcgcgatgtttacccgcaagccgcgccagtggcggatgacgtgttggttactttccagcatcaaccgattggtttagccaaacggattggttcgcgattgaaaaacagctatccgcgtgaactggtgcgcgatgggaaactttttaccggtaacgcctga

SEQ ID NO: 483526 - DNA, 315 bp, Shigella sonnei
atgttgctgattgtgcctaacaacggggcaatccataactttgatgatgaagcgatggtcgagatcccgtgtctggtcgggcacaacggaccagaaccactggtggtcggcgatatcccgcagtttcagaaagggttaatgagtcagcaagtggcggtggaaaaactggtcgtggacgcctgggaacagcgttcatatcagcacctgtggcaggcgattacgttatcgaaaacggtaccgagcgcctcggtcgccaaagctattctggatgagttgctggaggccaacaaagcgtactggccagagttacgttaa

SEQ ID NO: 483527 - DNA, 948 bp, Shigella sonnei
atgaccaaattctcagtggttgtcgcaggcggtggaagcacctttacgccaggcatcgtgttgatgctcctggcgaatcaggagcgtttcccgcttcgtgcactgaaattttatgataacgatggcgcgcggcaggaagtgattgccgaagcctgtaaagtcatccttaaagagaaagcgccggacattgcgtttagttacaccaccgatcctgaagtggcgttcagcgacgttgattttgtcatggcgcacatccgcgtcggcaagtacccgatgcgcgaactggatgaaaaaatcccactgcgccacggtgttgttggtcaggaaacttgcggacccggcggaatagcgtacggcatgcgttccattggcggcgtcctggaactggtggattatatggaaaaatattcaccaaatgcctggatgctcaactactccaacccggcagccattgtcgcagaagccacgcgtcgtctgcgcccgaatgcgaaaatcctcaacatctgtgacatgccaatcggtattgaaagccggatggcgcaaattgttgggctgcaagatcgcaaacagatgcgcgtgcgctactacggcctgaaccactttggctggtggacatcaattgaagatttgcagggcaacgacctgatgccccagctgcggcaatatgtctcgaagcacggttatgttccaccgcagcaagatacacatactgaagcgagctggaacgacacctatgcaaaagcgcgggatgtccaggcactggacccggatacattgccgaacacctatctgaaatattatctcttcccggattatgttgttcagcattccaaccctgaacatacccgcgcgaatgaggtgaatggaacatcgcgagaaacaggttttcgatgcttgccgcgccattacagcggcaggaaattcagcggcggccaagctggagattga

SEQ ID NO: 483528 - DNA, 1617 bp, Shigella sonnei
atgctcagtcaaattcaacgctttggcggcgcgatgtttacgccagtgctgctgtttcccttcgccgggattgtggtgggtcttgccatcttgctgcaaaacccgatgtttgtcggggaatcactgaccgatccgaacagtttattcgcgcaaatcgtacacattattgaagagggcggttggacggtattccgtaatatgccgctgatttttgctgtcggtttacccattggccttgctaagcaagcgcagggacgtgcttgtctggcggtgatggtgagtttcctgacctggaactatttcatcaacgcgatgggaatgacctggggaagctacttcggcgtcgatttcactcaggacgcggtggcaggtagcggtctgacaatgatggccgggattaaaaccctcgataccagcattatcggcgcaattatcatttccggcattgtgacggcgctgcataaccgtctgttcgataaaaaactgccggtttttctcggcattttccaggggacgtcttatgtggtgattatcgccttcctggtgatgatcccctgtgcctggctgacattgctcggctggccaaaagtacaaacggggattgaatctctgcaagcgttcctgcgttcggcgggtgcgcttggggtctgggtttacaccttcctcgaacgtattctgatcccaaccggtttacaccacttcatctacggaccgtttatcttgggtccggcagctgttgaaggcggcattcagatgtactgggcgcagcatctgcaagagttcagtttgagcgccgagccgctgaaatcgttgttcccggaaggcggttttgccctgcacggtaactcaaaaatctttggtgccgtgggcatttctttagcgatgtacttcactgccgcaccggaaaatcgggtaaaagtggcgggcttgctgattcccgcaaccttaaccgccatgctggtgggaattaccgaaccgctggaatttaccttcctgttcatttcaccgttgctgtttgcggtacacgctgtgcttgcggcctcaatgtcgaccgtgatgtatctctttggtgtggtgggcaacatgggcggaggtctgattgaccaggttttaccgcaaaactggatcccgatgttcagcaaccacgcggatatgatgctgacccaaatcgccattgggttgtgctttaccctgctgtacttcgtggttttccgcaccctgattctgcagttcaacatgtgcacgccgggacgtgaagatgcggaagtgaaactctactcaaaagccgaatacaaagcctcgcgaggccaaaccaccgcggcagagccaaaaaaagagctggatcaggctgccggtatcctgcaagccctgggcggggtcggcaatatctccagcattaacaattgtgcgacgcgtctacgcattgcactgcatgacatgtcacaaacgctggatgacgaagtctttaaaaagctgggagcgcacggcgtcttccgtagtggcgatgccattcaggtgatcattggtctgcatgtatcccagctgcgtgaacagctcgatagcttaattaattctcatcaatcagcagaaaatgttgccattacggaggcagtataa

SEQ ID NO: 483529 - DNA, 717 bp, Shigella sonnei
atgatctacaaaagcattgcggagcggttaagaattcgacttaactccgcagatttcacgctaaacagccttcttccgggtgaaaaaaagctggcggaagagtttgcggtatcgcggatgaccatccgtaaagccattgacctgctggtagcgtgggggctggtggtccgccgccacggtagtggcacttacctggtgcgcaaagatgtactgcatcaaaccgccagtctgaccgggctggtggaggtgttaaaacggcagggaaaaactgtcaccagccaggtgctgatttttgaaatcatgcctgcgcctccggccattgccagccagttacggattcaaatcaacgagcagatctacttctcccgtcgcgttcgttttgtggaagggaaaccgctgatgctggaagacagctatatgccggtaaaactgttccgtaatctttcgctgcaacatctggaagggtcgaagtttgaatatattgaacaagagtgcgggattttgattggcggtaattatgaaagcctgacgccggtgctcgccgatagactgctggcgcggcaaatgaaggtagcggaacacacgccactgctgcggatcacctcgttgtcatatagcgagagcggggagtttttgaattattcagtgatgttcagaaatgccagcgaataccaggtggagtaccatttacggcgactccacccggaaaagagttaa

SEQ ID NO: 483530 - DNA, 1662 bp, Shigella sonnei
atgagtgatatagcattaacggtcagtattctggctttggtggcagtcgtcggtttgtttatcggcaacgtcaaatttcgcggcataggattaggtattggcggcgtgctgtttggtgggatcatcgtcggccattttgtttctcaggcggggatgacattaagtagcgatatgctgcatgttattcaggaatttggcctgatcctgttcgtttataccatcgggattcaggtagggccgggcttctttgcctcattgcgcgtctccggattacgcctcaacctgtttgctgttctgatcgtcatcatcggtggtctggttaccgccatcctgcataaactgtttgatattccactgccggtagtgctggggattttctccggtgcggttaccaatacgccagcgctgggggcagggcagcagattttgcgcgacctgggtacaccaatggaaatggtcgatcagatggggatgagttacgcgatggcgtatccattcggcatttgcgggattttgttcaccatgtggatgttgcgggttattttccgcgtcaatgtcgagacagaagctcagcagcacgagtcttcacgcaccaatggcggcgcgctgatcaagactatcaatattcgcgttgagaaccctaacctgcatgatttagccattaaagatgtaccgattctcaacggcgacaaaattatctgctcgcgtctgaaacgcgaagaaaccctaaaagttccttcgccagataccattatccaactgggcgatttgctgcatctggtgggtcagccagcggatttacataatgcgcaactggtgattggtcaggaggtcgatacttcgctgtccacgaaagacactgatttgcgcgtcgagcgtgtggtggtcaccaatgaaaacgtgctcggaaaacgtattcgcgacctgcactttaaagaacgctatgacgttgttatctcgcgcctgaaccgtgccggggtcgaactggtcgccagtggcgatatcagcctgcagttcggcgatatcctcaacctggtggggcgtccgtccgcaattgatgccgttgccaatgtgctggggaatgcgcagcaaaaactgcaacaggttcagatgctgccagtgtttattggcatcgggcttggcgtattgttaggttctattcccgtctttgtgccgggattcccggccgcgttgaaactggggctggcgggcggtctgctgattatggcgttgatcctcgggcgtatcggcagtatcggcaagctgtactggtttatgccgccaagtgccaacctcgcgctgcgggagctggggatcgtgctgttcctctcggtcgttggtctgaaatctggtggggattttgtgaataccctggtcaatggcgaagggctaagctggattggttatggtgccctgatcaccgccgttccgctgattactgttggcattctggcgcggatgttagccaaaatgaattacctgaccatgtgcgggatgctggcaggttccatgaccgatcctccggcgctggcgtttgctaataatcttcatccaactagcggtgcggcggcgctctcttacgccactgtctatccgttagtgatgttcctgcgcattatcaccccccaattactggcggtgctcttctggagtatcggttaa

SEQ ID NO: 483531 - DNA, 429 bp, Shigella sonnei
atgcgtaacttcgatttatccccactgatgcgtcaatggatcggttttgacaaactggccaacgcactgcaaaacgccggtgaaagtcagagcttcccgccgtacaacattgagaaaagcgacgataaccactaccgcattacccttgcgctggcaggtttccgtcaggaagatttagagattcaactggaaggtacgcgcctgagcgtaaaaggcacgccggtgcagccaaaagaagagaaaaaatggctgcatcaagggcttatgaatcagccatttagcctgagctttacgctggctgaaaatatggaagtctctggcgcaactttcgtaaacggtttactgcatattgatttaattcgtaatgagcctgaacccatcgcagcgcagcgtatcgctatcagcgaacgtcccgcgttaaatagctaa

SEQ ID NO: 483532 - DNA, 414 bp, Shigella sonnei
atgcgtaactttgatttatccccgctttaccgttctgctattggatttgaccgtttgtttaaccacttagaaaacaaccagagccagagtaatggcggctaccctccgtataacgttgaactggtagacgaaaaccattaccgcattgctatcgctgtggctggttttgctgagagcgaactggaaattaccgcccaggataatctgctggtggtgaaaggtgctcacgccgacgaacaaaaagagcgcacctatctgtaccagggcatcgctgaacgcaactttgaacgcaaattccagttagctgagaacattcatgttcgtggcgctaacctggtaaatggtttgctgtatatcgatctcgaacgcgtgattccggaagcgaaaaaaccgcgccgtatcgaaatcaactaa

SEQ ID NO: 483533 - DNA, 261 bp, Shigella sonnei
atgtcccataccggagggaaagaaggaacgtatcccggcacccgcgccagcgccaccatgattggcgatgatgaaaccaactggggcactaagtcgctggcgattctcgatatgccgtttaccgctgtgatggacacgcttttattaccgtgggatgtgttccgcaaagacagctcggtgcgctcacgcgttgaaaaaagcgaagccaacgcgcaagccaccaatgcggttattccaccggccagaatgcctgataactga

SEQ ID NO: 483534 - DNA, 1215 bp, Shigella sonnei
atgaaacagataacctttgctccccgtaatcacctgctcaccaataccaatacctggacgcccgacagccagtggctggtatttgacgtgcgtccttctggggcgtcgtttaccggcgagaccattgagcgtgtgaatatccataccggtgaggtcgaggttatctactgtgcgtcacagggcgcacacgtcggcgtggtgaccgttcatccgaagtcagagaaatatgtctttattcacggcccggaaaatcctgatgaaacatggcattacgacttccatcatcggcgcggagtcattgctgaaggcggcaaggtgagcaatctcgatgcaatggatattaccgcgccgtatacgccaggagcgctgcgcggcggcagccatgtgcatgtctttagcccgaacggtgaaagggtgagctttacctataacgaccatgtaatgcatgaactcgatccggcgctggatttgcgaaacgtcggtgttgctgcgccgtttggtccggtcaacgtacaaaagcagcatccgcgtgaatacagcggcagccactggtgtgtgctggtgagtaaaaccacgcccacgccgcagcctggcagtgatgaaatcaatcgtgcttatgaagaaggatgggtaggaaatcacgcgctggcgtttattggcgacacactttcgccaaagggtgagaaagtgccggagctgtttatcgttgagttgccgcaagatgaagctggctggaaagcggcaggtgatgcgccgttaagtggaacggaaaccaccctgcccgcgccaccgcgtggcgtcgtgcagcgacgtttaacctttacccaccatcgggcttatccggggttagtcaacgtcccgcgccactgggtgcgctgtaatccgcagggtacgcaaatcgcgtttttaatgcgtgatgataacggcattgtgcaactgtggcttatctcgccacagggcggcgagccgcgccagttaacccataacaaaacggatattcagtctgcatttaactggcatccgtcaggagaatggttgggctttgtgctggataatcgaattgcttgtgcccatgcgcaaagcggcgaggttgagtatttaaccgaaaaccacgccaatccaccttctgcggacgccgtggtcttctcgccggatggtcaatggctggcgtggatggaaggtggccagctgtggatcaccgaaactgatcgctaa

SEQ ID NO: 483535 - DNA, 1065 bp, Shigella sonnei
atggaacatttcgacgtggcgattattggcctcggcccggcagggtcggcgttggcacgaaagttagccggcaaaatgcaggtgatcgcgctggataaaaagcaccagcatggtactgaaggtttcagcaaaccttgtggcggtctgctggcaccggacgcgcagcgatcttttattcgcgatgggctgacgcttcctgtcgatgtgatcgctaatccgcagattttcagcgtcaaaaccgtcgacgtcgccgcatcgctcacgcgtaactaccagcgaagctatatcaatattaatcgccatgctttcgacttgtggatgaaatcgctgatccccgccagcgttgaggtttatcacgacagcctgtgtcgaaaaatctggcgtgaggatgataaatggcatgtcatttttcgtgcagacggctgggagcagcatattaccgcccgctatctggtcggtgccgatggtgccaactcgatggtgcggcgacatctctacccggatcatcaaatccgtaaatatgtcgcaatccagcagtggttcgcagagaaacatccggtgccgttctactcctgcatctttgataatgcgataactgactgttattcatggagtatcagcaaagacggttattttatctttggcggtgcctatccaatgaaagacggtcagacgcgtttcacgactctgaaagagaaaatgagcgcctttcagttccagtttggcaaagcggtgaaaagcgaaaaatgcacggtgctgtttccctcacgctggcaggattttgtctgcggtaaggacaacgcctttctgattggtgaagcggcgggatttatcagcgccagctcgctggaggggattagctatgcgctggatagcgcagacattctgcgttcggtgttactgaagcagccagagaagctcaataccgcttactggcgcgccacccgcaaactgcgtttaaaactcttcggcaagatagtaaaaagccgatgcctgaccgcaccggctttaagaaagtggattatgcgcagtggtgtggcacatattccacagttgaaggattag

SEQ ID NO: 483536 - DNA, 1293 bp, Shigella sonnei
atggatattcccgttaatgcagcaaagccggggcgtcggcgttatctgacgctggtgatgatctttattacggtggtcatttgttatgttgaccgcgctaacctggccgtggcttccgcccatattcaggaagagttcggcattacgaaagcggaaatgggctatgtattttcggccttcgcctggctttatacgctatgccagatccccggcggttggtttttagatcgcgtaggttctcgcgtgacttattttattgcgatatttggctggtcagtggcgactttattccagggctttgccacgggattaatgtcattaattggtctgcgtgcgataaccggtattttcgaagcgcccgctttcccgaccaataaccggatggtgaccagctggttcccggaacatgaacgcgcctccgccgttggtttttatacgtctggtcagtttgtcggtctggcgtttttgactccgctgctgatctggattcaggagatgttgagctggcactgggtgttcattgtgactggtggtatcggcattatctggtcgctgatttggtttaaggtttatcagccgccgcgcctgaccaaaggcatcagcaaagctgaactggattacattcgtgatggcggcggtctggtggatggtgatgcgccagtgaagaaagaggcacgtcagccgttaacagccaaagactggaaactggtgttccatcgtaaactgatcggcgtctatcttgggcaatttgcggtggcttctacactgtggtttttcttaacctggttcccgaactatttaacccaggaaaaaggaatcacggcgctgaaagcaggctttatgaccacggtgccattcctcgcggcgtttgtcggcgtcctgctctctggctgggtagcggatctgctggtacgtaagggcttttcactgggctttgcgcgtaaaacgccgattatctgcggcttgctgatctccacctgcattatgggcgctaactacactaacgatccgatgatgattatgtgcctgatggcgctggcattcttcggtaacggttttgcttcaattacctggtcgctggtttcttctctggcaccgatgcgcctgattggtttaaccggcggcgtgtttaacttcgccggtggtctgggcggcatcaccgttccgctggtggtggggtacctggcgcagggttacggtttcgcacctgcactggtttatatctccgccgtcgcgttgattggcgcgctctcttatatcctgctggtgggcgatgtgaagcgcgttggctaa

SEQ ID NO: 483537 - DNA, 951 bp, Shigella sonnei
atgtatcgcgccggattttatcgtggcggtccaatcctgatgagcgccattgccgggatcgaccaggcgttatgggatatcaaaggtaaagtgctgaatgcgtcggtctggcaactgatgggcggcctggttcgcgacaaaattaaagcctacagttgggtcggcggcgatcgtccggcggatgtgatcgacggtattaaaaccctgcgcgaaatcggcttcgataccttcaaactgaacggttgtgaagaactggggctaattgataactcccgcgcggtagatgcggcagtcaacaccgtggcacaaattcgtgaagcttttggcaatcagattgagtttggtcttgatttccacggtcgcgtcagcgcgccaatggcgaaagtgctgattaaagaactggagccgtatcgcccgctgtttattgaagagccggtgctggcggaacaagccgaatactacccgaaattggcggcacaaacgcatattccactggcggcgggtgagcgcatgttctcacgtttcgattttaaacgcgtgctggaggcaggcggtatttcgattctacaaccggatctctcccatgcaggcggtattaccgaatgctacaaaattgccggaatggcagaagcctatgacgtgacccttgcgccgcactgtccgctcggaccgattgcactggcggcttgtctgcatatcgactttgtttcctataacgcggtacttcaggaacaaagtatgggaattcattacaacaaaggcgcggagttactcgactttgtgaaaaacaaagaagacttcagcatggttggcggcttctttaaaccgctaacgaaaccgggcttaggcgtggaaatcgacgaagctaaagttattgagttcagtaaaaatgccccggactggcgtaatccactctggcgtcatgaagataacagcgtagcagagtggtaa

SEQ ID NO: 483538 - DNA, 174 bp, Shigella sonnei
atgaaaatcaccaaaattaccacgtatcgtttacctccccgctggatgttcctgaaaattgaaaccgatgaaggcgtcgtcggctggggcgagccagtgattgaaggccgcgcccgcacggtggaagcggcagttcacgagctgggtgactatttgattggtcaggatccatag

SEQ ID NO: 483539 - DNA, 618 bp, Shigella sonnei
atgcagtggcaaactaaacttccgctgatcgccattttgcgcggcattaagcccgacgaggcgctggcgcatgttggcgcggtgattgacgccgggttcgacgcggttgaaatcccgctgaattccccacaatgggagcaaagcattcccgccatcgttgatgcgtatggcgacaaggcgttgattggcgcaggtacggtactgaaacctgaacaggtcgatgcgctcgccaggatgggctgtcagctcatcgttacgcccaatatccatagtgaagtgatccgccgtgcggtgggctacggcatgaccgtctgccccggctgcgcgacggcgaccgaagcctttaccgcgctcgaagcgggcgcgcaggcgctgaaaatatttccgtcatcggcttttggtccgcaatacatcaaagcgttaaaagcggtattgccatcggacatcgcagtctttgccgttggcggcgtgacgccagaaaacctggcgcagtggatagacgcaggttgtgctggggcgggcttaggcagcgatctctatcgcgccgggcagtccgtagaacgcaccgcgcagcaggcagcagcatttgttaaggcgtatcgagaggcagtgcaatga

SEQ ID NO: 483540 - DNA, 879 bp, Shigella sonnei
atgacagctcgctacatcgcaattgactggggatcgaccaatctgcgcgcctggctttatcagggcgaccactgcctggagagcaggcaatcagaagcaggcgtcacgcgcctgaacggaaaatctccggctgcggtgttagcagaagtcacgaccgactggcgtgaagagaatacgccagtggtaatggcaggaatggtcggcagcaatgtcggctggaaagttgctccgtatttatctgttcctgcccatttttcgtctattggcgaacaattaacgtctgttggcgacaatatctggattattcccggattatgcgtctctcatgatgataaccacaatgtgatgcgcggcgaagaaactcaattgatcggcgcgcgagctctggctccttcctctctttatgtcatgcccggtacgcattgcaaatgggtgcaggccgatagccagcaaatcaacgattttcgcaccgtgatgaccggtgaattacatcatttactgttaaatcactcattgattggtgcaggtttgccgccgcaggaaaactctgccgatgccttcacggctggccttgagcgtggtcttaatacgcccgccatattgccgcagctttttgaagttcgtgcctcgcatgtgctgggaacacttccccgtgaacaggtcagtgaatttctctctggtttgttgattggcgcagaggtcgccagtatgcgcgactatgtggcccatcaacacgccatcacccttgtcgccggaacatcgttgaccgcgcgctaccagcaagcctttcaggcgatgggttgcgacgtgacggcggtggcgggcgacacggcatttcaggctggtataaggagcatcgctcatgcagtggcaaactaa

SEQ ID NO: 483541 - DNA, 690 bp, Shigella sonnei
atgactctcaataaaaccgatcgcatcgtcattacgctgggtaaacagatcgttcacggcaaatacgtaccaggctcgccgcttccggctgaggcggaactctgtgaggagtttgcaacctcgcgcaacatcatccgtgaggtgttccgttcgttgatggcgaaacggctgattgaaatgaaacgttatcgcggcgcgtttgtggcaccgcgtaaccagtggaattacctcgacactgacgtactgcaatgggtgctggaaaacgactacgacccacggcttatcagtgccatgagcgaagtgcgaaatctggtggaaccggcgattgcccgttgggcagcagagcgcgcgacctccagcgatctggcgcagattgaatcggcgctgaacgagatgattgccaacaatcaggaccgcgaagcgtttaacgaagcggatattcgctaccacgaggcggtgctgcagtcggtgcataacccggtgttacagcaacttagcattgcgatcagttcgctgcagcgggcggtttttgaacgaacctggatgggcgatgaggccaacatgccgcaaacgctccaggaacataaggcgctgttcgatgcgatacggcatcaggacggcgatgcggcagagcaggcggcgcttaccatgatcgccagctcgacacgaaggttaaaggaaatcacatga

SEQ ID NO: 483542 - DNA, 408 bp, Shigella sonnei
atgctcaaggatccagctcttaaccggcacaatattcaggttgctgatgacgcaagatttgttttaaatgcggggaaaaagaaatttaccggcacaatatcactctattacaactggagcacagaagaagaaaaagcacgagtgacacaatatcgttttgcttgtggtgttcagcactgtacccggacagtagaaaacctggaaggtactatccatgagaaaaataaaaacatggattactcaaacgtaatggctttctaccatccatttaaagtgcgattttatgaataccattcacccagaggcattccggatggtgtttccgcagcattactgccagtgactgttacgctggacatcattactgcaccgctgcaatttctggttgtatatgcagtaaaccaataa

SEQ ID NO: 483543 - DNA, 813 bp, Shigella sonnei
atggctatcaaactcattgctatcgatatggatggcacccttctgctgcccgatcacaccatttcacccgccgttaaaaatgcgattgccgcagctcgcgcccgtggcgtgaatgtcgtgctaacgacgggtcgcccgtatgcaggtgtgcacaactacctgaaagagctgcatatggaacagccgggcgactactgcattacttataacggcgcgctagtacagaaggcagctgatggtagcaccgtggcgcaaactgctctcagctatgacgactatcgtttcctggaaaaactctctcgcgaagtcggttctcatttccacgccctggaccgcaccacgctgtacaccgccaaccgcgatatcagctactacacagtgcatgaatctttcgttgccactattccgctggtgttctgcgaagcggagaaaatggaccccaatacccagttcctgaaagtgatgatgattgatgaacccgccatcctcgaccaggctatcgcgcgtattccgcaggaagtgaaagagaaatataccgtgctgaaaagtgcgccgtacttcctcgaaatcctcgataaacgcgttaacaaaggtacgggtgtgaaatcactggccgacgtgttaggtattaaaccggaagaaatcatggcgattggcgatcaggaaaacgacatcgcaatgattgaatatgcaggcgtcggtgtggcgatggataacgctattccttcggtgaaagaagtggcgaactttgtcaccaaatctaaccttgaagatggcgtggcgtttgctattgagaagtatgtgctgaattaa

SEQ ID NO: 483544 - DNA, 399 bp, Shigella sonnei
atggggctttttgatgaagttgtcggtgcctttctgaaaggcgatgcggggaaatatcaggctattttaagttgggttgaggagcagggcggcattcaggtgctgctggaaaaactgcaaagtggcggcttaggggccattctctcaacctggctgagtaatcaacagggcaatcaatcggttagtggcgagcaactggaatcggcgctcggcacaaatgcggtgtccgatctcgggcaaaaacttggcgtggataccagtacagcttccagtttactggcagagcaattgccgaagattattgatgcgctctcaccgcaaggtgaagtgtcaccacaagccaataacgatctgctttccgcaggtatggaactgctgaaagggaaactcttccgctaa

SEQ ID NO: 483545 - DNA, 2415 bp, Shigella sonnei
atgtcgaattcttatgactcctccagtatcaaagtcctgaaagggctggatgcggtgcgtaagcgcccgggtatgtatatcggcgacacggatgacggcaccggtctgcaccacatggtattcgaggtggtagataacgctatcgacgaagcgctcgcgggtcactgtaaagaaattatcgtcaccattcacgccgataactctgtctctgtacaggatgacgggcgcggcattccgaccggtattcacccggaagagggcgtatcggcggcggaagtgatcatgaccgttctgcacgcaggcggtaaatttgacgataactcctataaagtgtccggcggtctgcacggcgttggtgtttcggtagtaaacgccctgtcgcaaaaactggagctggttatccagcgcgagggtaaaattcaccgtcagatctacgaacacggtgtaccgcaggcaccgttggcggttaccggcgagactgaaaaaaccggcaccatggtgcgtttctggcccagcctcgaaaccttcaccaatgtgaccgagttcgaatatgaaattctggcgaaacgtctgcgtgagttgtcgttcctcaactccggcgtttccattcgtctgcgcgacaagcgcgacggcaaagaagaccacttccactatgaaggcggcatcaaggcgttcgttgaatatctgaacaagaacaaaacgccgatccacccgaatatcttctacttctccactgaaaaagacggtattggcgtcgaagtggcgttgcagtggaacgatggcttccaggaaaacatctactgctttaccaacaacattccgcagcgtgacggcggtactcacctggcaggcttccgtgcggcgatgacccgtaccctgaacgcctacatggacaaagaaggctacagcaaaaaagccaaagttagcgccaccggtgacgatgcgcgtgaaggcctgattgcggtcgtttccgtgaaagtgccggacccgaaattctcctcccagaccaaagacaaactggtttcttctgaggtgaaatcagcggttgaacagcagatgaacgaactgctggcagaatacctgctggaaaacccaaccgacgcgaaaatcgtggttggcaaaattatcgatgctgcccgtgcccgtgaagcggcgcgtcgcgcgcgtgaaatgacccgccgtaaaggtgcgctcgacttagcgggcctgccgggcaaactggcagactgccaggaacgcgatccggcgctttccgaactgtacctggtggaaggggactccgcgggcggctctgcgaagcaggggcgtaaccgcaagaaccaggcgattctgccgctgaagggtaaaatcctcaacgttgagaaagcgcgcttcgataagatgctctcttctcaggaagtggcgacgcttatcaccgcgcttggctgtggtatcggtcgtgacgagtacaacccggacaaactgcgttatcacagcatcatcatcatgaccgatgcggacgtcgacggctcgcacattcgtacgctgctgttgacctttttctatcgtcagatgccggaaatcgttgaacgcggtcacgtctacatcgctcagccgccgctgtacaaagtgaagaaaggcaagcaagaacagtacattaaagacgacgaagcgatggatcagtaccagatctctatcgcgctggatggcgcaacgctgcacaccaacgccagcgcaccggcattggctggcgaagcgttagagaaattggtgtctgagtacaacgcgacgcagaaaatgatcaaccgcatggagcgtcgttatccgaaagcaatgctgaaagagcttatctatcagccgacgctgacggaagccgacctctctgatgagcagaccgttacccgctgggtgaacgcgctggtcagcgaactgaacgacaaagaacagcacggcagccagtggaagtttgatgtccacaccaatgccgaacaaaacctgtttgaaccgattgttcgcgtgcgtacccacggtgtggatactgactatccgctggatcacgagtttatcaccggtggcgaatatcgtcgtatctgcacgctgggtgagaaactgcgtggcttgctggaagaagatgcgtttatcgaacgtggcgagcgtcgtcagccggtagccagcttcgagcaggcgctggactggctggtgaaagagtcccgtcgcggcctctccatccagcgttataaaggtctgggcgagatgaacccggaacagctgtgggaaaccaccatggacccggaaagccgtcgtatgctgcgcgttaccgttaaagatgcgattgctgccgaccagttgttcaccacgctgatgggcgacgccgttgaaccgcgccgtgcgtttattgaagagaacgccctgaaagcggcgaatatcgatatttaa

SEQ ID NO: 483546 - DNA, 1074 bp, Shigella sonnei
atgtccctcacccgcttgttgatccgcgatttccgcaacattgaaaccgcggatctcgctttatctcccggctttaactttctggtaggtgccaacggcagtggcaaaaccagcgtgctggaagccatctatacgctcggccatggtcgggcgtttcgcagtttgcagattggtcgcgtcattcgccatgagcaggaggcgtttgttctccacgggcgattacagggcgaagagcgcgagacagcgattggcttaaccaaagacaaacagggcgacagcaaagtccgcatcgacggtacagacgggcataaggtcgcggaactggcgcacctgatgccaatgcagttgataacgccagaagggtttactttactcaacggcggccccaaatacagaagagcattcctcgactggggatgctttcacaacgaacccggatttttcaccgcctggagcaatctcaagcgattgctcaagcagcgcaatgcggcgctgcgccaggtgacacgttacgaacagctacgcccgtgggataaagagctgatcccgctggcggagcaaatcagcacctggcgcgcggagtatagcgccggtatcgcggctgatatggccgatacttgtaagcaatttctccctgagttttctctgactttctctttccagcgcggctgggagaaagagacagaatatgctgaggtgctggaacgtaattttgaacgcgatcgccagctaacctacaccgcgcatggcccgcataaagcggacttacgcattcgcgccgacggtgcgccggtggaagataccttatcgcgtgggcagcttaagctgttgatgtgcgccttacgtctggcgcaaggagagttcctcacccgtgaaagcgggcggcggtgtctctacctgatagatgattttgcctctgagcttgatgatgagcgtcgcgggctgcttgccagccgcttaaaagcgacgcaatcacaggtctttgtcagcgcgatcagtgctgaacacgttatagacatgtcggacgaaaattcgaagatgtttaccgtggaaaagggtaaaataacggattaa

SEQ ID NO: 483547 - DNA, 1101 bp, Shigella sonnei
atgaaatttaccgtagaacgtgagcatttattaaaaccgctacaacaggtgagcgggccgttaggtggtcgtcctacgctaccgattctcggtaatctgctgttacaggttgctgacggtacgttgtcgctgaccggtactgatctcgagatggaaatggtggcacgcgttgcgctggttcagccacacgagccaggagcgacgaccgttccggcgcgcaaattctttgatatctgccgtggtctgcctgaaggcgcggaaattgccgtacagctggaaggtgaacggatgctggtgcgctccgggcgtagccgtttttcgctgtctaccctgccagcggcggatttcccgaacctcgatgactggcagagcgaagtcgaatttaccctgccgcaggcgacgatgaagcgtctgattgaagcgacccagttttctatggcgcatcaggacgttcgctattacttaaacggtatgctgtttgaaaccgaaggcgaagaactgcgcaccgtggcgaccgacggccaccgtctggcagtctgttcaatgccaattggtcaatctttgccaagccattcggtgatcgtgccgcgtaaaggcgtgattgaactgatgcgtatgctcgacggcggcgacaatccgctgcgcgtacagattggcagcaacaacattcgcgcccacgttggcgactttatcttcacctccaaactggtggatggtcgcttcccggattatcgccgcgttctgccgaagaacccggacaaacatctggaagctggctgcgatctgctcaagcaggcgtttgctcgcgcggcgattctctctaacgagaaattccgcggcgtacgtctttatgtcagcgaaaaccagctgaaaatcaccgccaacaacccggaacaggaagaagcggaagagatcctcgacgttacctatagcggtgcggagatggaaatcggcttcaacgtcagctacgtgctggatgttctgaacgcgctgaaatgtgaaaacgtccgcatgatgctgaccgattcggtttccagcgtgcagattgaagatgccgcatcacagtcggctgcctatgttgtcatgccaatgagactgtaa

SEQ ID NO: 483548 - DNA, 1404 bp, Shigella sonnei
gtgtcactttcgctttggcagcagtgtcttgcccgattgcaggatgagttaccagccacagaattcagtatgtggatacgcccattgcaggcggaactgagcgataacacgctggccctgtacgcgccaaaccgttttgtcctcgattgggtacgggacaagtaccttaataatatcaatggactgctaaccagtttctgcggagcggatgccccacagctgcgttttgaagtcggcaccaaaccggtgacgcaaacgccacaagcggcagtgacgagcaacgtcgcggcccctgcacaggtggcgcaaacgcagccgcaacgtgctgcgccttctacgcgctcaggttgggataacgtcccggccccggcagaaccgacctatcgttctaacgtaaacgtcaaacacacgtttgataacttcgttgaaggtaaatctaaccaactggcgcgcgcggcggctcgccaggtggcggataaccctggcggtgcctataacccattgttcctttatggcggcacgggtctgggtaaaactcacctgctgcatgcggtgggtaacggcattatggcgcgcaagccgaatgccaaagtggtttatatgcactccgagcgctttgttcaggacatggttaaagccctgcaaaacaacgcgatcgaagagtttaaacgctactaccgttccgtagatgcactgctgatcgacgatattcagttttttgctaataaagaacgatctcaggaagagtttttccacaccttcaacgccctgctggaaggtaatcaacagatcattctcacctcggatcgctatccgaaagagatcaacggcgttgaggatcgtttgaaatcccgcttcggttggggactgactgtggcgatcgaaccgccagagctggaaacccgcgtggcgatcctgatgaaaaaggccgacgaaaatgacattcgtttgccaggcgaagtggcgttctttatcgccaagcgtctacgatctaacgtacgtgagctggaaggggcgctgaaccgcgttattgctaacgccaactttaccggacgggcgatcaccatcgacttcgtgcgtgaggcactgcgcgacttgctggcattgcaggaaaaactggtcaccatcgacaatattcagaagacggtggcggagtactacaagatcaaagtcgcggatctcctttccaagcgtcgatcccgctcggtggcgcgtccgcgccagatggcgatggcgctggcgaaagagctgactaaccacagtctgccggagattggcgatgcgtttggtggtcgtgaccacacgacggtgcttcatgcctgccgtaagatcgagcagttgcgtgaagagagccacgatatcaaagaagatttttcaaatttaatcagaacattgtcatcgtaa

SEQ ID NO: 483549 - DNA, 141 bp, Shigella sonnei; identical to SEQ ID NO: 1817

SEQ ID NO: 483550 - DNA, 327 bp, Shigella sonnei; identical to SEQ ID NO: 1818

SEQ ID NO: 483551 - DNA, 1647 bp, Shigella sonnei
atggattcgcaacgcaatcttttagtcatcgctttgctgttcgtgtctttcatgatctggcaagcctgggagcaggataaaaacccgcaacctcaggcccaacagaccacgcagacaacgaccaccgcagcgggtagcgccgccgaccagggcgtaccggccagtggccaggggaaactgatctcggttaagaccgacgtgcttgatctgaccatcaacacccgtggtggtgatgttgagcaagctctgctgcctgcttacccgaaagagctgaactctacccagccgttccagctgctggaaacttcaccgcagtttatttatcaggcacagagcggtctgaccggtcgtgatggcccggataacccggctaacggcccgcgtccgctgtataacgttgaaaaagacgcttatgtgctggctgaaggtcaaaacgaactgcaggtgccgatgacgtataccgacgcggcaggcaacacgtttaccaaaacgtttgtcctgaaacgtggtgattacgctgtcaacgtcaactacaacgtgcagaacgctggcgagaaaccgctggaaatctccacctttggtcagttgaagcaatccatcactctgccaccgcatctcgataccggaagcagcaacttcgcactgcacaccttccgcggcgcggcgtactccacgcctgacgagaagtacgagaaatacaagttcgataccattgccgataacgaaaacctgaacatctcttcgaaaggtggttgggtggcaatgctgcaacagtatttcgcgacggcgtggatcccgcataacgacggtaccaacaacttctataccgctaatctgggtaacggcatcgccgctatcggctataaatctcagccggtactggttcagcctggtcagactggcgcgatgaacagcaccctgtgggttggcccggaaatccaggacaaaatggcagctgttgctccgcacctggatctgaccgttgattacggttggttgtggttcatctctcagccgctgttcaaactgctgaaatggatccatagctttgtgggtaactggggcttctccattatcatcatcacctttatcgttcgtggcatcatgtacccgctgaccaaagcgcagtacacctccatggcgaagatgcgtatgctgcagccgaagattcaggcaatgcgtgagcgtctgggcgatgacaaacagcgtatcagccaggaaatgatggcgctgtacaaagctgagaaggttaacccgctgggcggctgcttcccgctgctgatccagatgccaatcttcctggcgttgtactacatgctgatgggttccgttgaactgcgtcaggcaccgtttgcactgtggatccacgacctgtcggcacaggacccgtactacatcctgccgatcctgatgggcgtaacgatgttcttcattcagaagatgtcgccgaccacagtgaccgacccgatgcagcagaagatcatgacctttatgccggtcatcttcaccgtgttcttcctgtggttcccgtcaggtctggtgctgtactatatcgtcagcaacctggtaaccattattcagcagcagctgatttaccgtggtctggaaaaacgtggcctgcatagccgcgagaagaaaaaatcctga

SEQ ID NO: 483552 - DNA, 1365 bp, Shigella sonnei
atgagcgataatgacactatcgtagcccaggccacgcctccgggacgtggcggcgttggcatcctgcgcatctccggcctaaaagcccgtgaagttgccgaaaccgtgctgggtaaactgcctaagccgcgctacgccgattatcttccgtttaaagacgccgacggcagcgtgctcgatcaggggattgcgctatggttccctggcccgaactcgttcaccggcgaagatgtgctggaactgcagggtcatggcggtccggtgatcctcgacctgctgttaaaacgcattctgaccattcccggcctgcggattgctcgccctggtgagttttccgaacgcgcgtttcttaacgataaactcgacttagcccaggccgaggcgattgccgatcttatcgacgccagttcggaacaggcggcccgttcggcacttaactcgctgcaaggcgcattctccgcacgggtcaaccatctggtggaagccctcacccacttgcgcatttacgtcgaagcggcaattgatttccctgatgaagagatcgatttcctctccgacggcaaaattgaagcccagcttaatgacgtgattgccgatctcgatgcagtgcgtgctgaagcacgtcagggtagtttgttgcgcgaagggatgaaggtggtgattgccggacgtcctaacgccggtaaatcgagcctgttaaacgcgctggcgggccgtgaagcagcaatcgtaactgatatcgccggaaccacacgtgacgtgctgcgtgagcatatccacattgacggaatgccgctgcatatcatcgataccgctgggctacgtgaagccagtgacgaagtggaacgtattggtatcgagcgcgcgtggcaggaaattgaacaggccgaccgcgtgctgtttatggtcgatggcaccacaacagacgccgtggatccggcagagatctggccggaatttatcgcccgtctgccagcgaaactaccgatcaccgtggtgcgcaataaagccgatatcaccggcgaaacgctgggaatgagtgaagtgaacggtcacgcgttaattcgtctctcggcaaggacaggtgaaggcgtggaggtgctgcgtaaccatctcaaacagagcatgggctttgacaccaacatggaaggcggcttcctggcgcgtcgtcgccacctacaggcgctggaacaggcagcggagcatttgcagcaaggtaaagcgcaactgttaggtgcctgggcgggtgaactgctggcggaagagttgcgcctggcacagcagaacttaagcgaaatcaccggggaatttacctctgatgatttgctggggcggattttctccagcttctgtattggtaagtaa

SEQ ID NO: 483553 - DNA, 954 bp, Shigella sonnei
atgtctggaaatataggggcaaatccatttacctctgcaacgctaagtagcactaactggcaatacgcctgttcctgctctgcgggtaaggcagttaaacttgtctatatggtcagccccgtacttaccaccactggacatcagacaggatattacaaactcaatgacagcctggatattaaaaccacattacaggcaaacgacattccaggactcacaaccgaccaggttgtctctgttaacacccgattcacacagataaaaagcagcaccgtatattctgctgcaacccaaacgggtgtttgccagggtgacacgtctcgttatggacccgttaatattggtgcaaataccacctttaccctgtatgtcaccaagccatttctcggctcgatgaccattccgaaaacggatattgccgtcattaaaggcgcgtgggtcgatggaatgggaagcccgtctacaggtgacttccatgatttagtcaagttatcgattcagggaaatctcaccgccccacagtcgtgcaaaattaatcagggcgatgttattaaggttaattttggattcatcaatggtcagaagtttaccacccgcaatgccatgccagacggttttactccagtagactttgatatcacttatgactgtggtgatacttcaaagattaaaaactcgttgcaaatgcgcatcgacggtacaactggggtagtagaccagtacaacctggtcgccaggcgaagaagttcagacaatgtgcccgatgtcggtattcgtattgaaaatctcggcggcggagttgcaaatattccttttcagaacggtatccttcccgttgatccttccgggcatggcaccgtcaatatgcgcgcctggccagttaatctggtcggtggtgagctggaaacaggaaaatttcagggcaccgccaccattaccgtcatggtgcggtaa

SEQ ID NO: 483554 - DNA, 861 bp, Shigella sonnei
atgaaacaacaccaatcggcggataattctcagggccagctttacattgtaccgacgccaatcggcaatctggcggatatcacccagcgtgcgttagaggtattacaggccgttgatctgattgccgccgaggatactcgtcacaccggtttattgctgcaacattttgggattaatgcccggttgtttgcgctgcacgaccataacgaacaacaaaaagccgaaacgctgctggcgaagctgcaagaggggcaaaacattgcgctggtttccgatgccggaacgccgctaattaacgatcctggctaccatctggtgcgtacctgccgtgaagcggggattcgtgtggtgccgctacccggaccgtgtgctgctatcactgcgttaagcgccgcgggtttaccctctgaccgtttctgttacgaaggctttttacctgccaaatcaaaaggccgccgtgatgcgctaaaagccattgaagcggagccgcgcacgctgattttttatgaatctacccaccgtctgttagatagcctggaagatatcgttgcggtattaggcgaatcccgctacgtggttctggcgcgtgagctgaccaaaacctgggaaaccattcacggcgcgcccgttggcgagctgctggcgtgggtaaaggaagatgaaaaccgtcgcaaaggcgaaatggtgctgattgtcgaaggtcataaagcacaggaagaagacttacccgccgatgccctgcgcacgctggcgctgctacaggcagaactgccgctgaaaaaagcggcggcgctggccgcagaaattcatggcgtgaagaaaaatgcgctgtataagtatgcgctggagcagcaggggtaa

SEQ ID NO: 483555 - DNA, 2037 bp, Shigella sonnei
atggtaccctcaacattttctcgtttgaaagccgcgcgttgtctgcctgttgttctggcagccctgattttcgccggttgtggcacccatactcccgatcagtccactgcttatatgcagggcacggcgcaggctgattctgccttttatcttcagcagatgcagcaaagctctgatgataccaggatcaactggcaattactcgccattcgtgcactggtgaaagaaggtaaaaccgggcaggcggttgagttgtttaaccaactaccgcaagaactgaacgattctcagcgtcgcgagaaaacactgctggcggtagagattaaactggcgcagaaagattttgctggcgcgcaaaacttgctggcgaaaatcacacctgccgatttagaacaaaaccagcaagcgcgttactggcaggcaaaaatcgatgccagccaggggcgtccttccattgatttactgcgcgcgttaattgctcaggaaccgctgctcggcgcgaaagaaaaaaagcagaatattgatgccacctggcaggcgctctcctccatgactcaggaacaggcgaatacgctggtgatcaacgccgacgaaaatattctgcaaggctggctggatctgcagcgcgtctggtttgataaccgtaacgatcccgacatgatgaaagccgggatcgccgactggcaaaaacgttatccgaacaatccgggcgcgaaaatgctgccaacgcagttggttaacgtaaaagcgtttaaaccagcctcgaccaacaaaatcgccctgctgttgccgctgaatggccaggcagcggtatttggtcgcaccattcagcaaggctttgaagcggcgaaaaatatcggcactcagccagtggcggctcaggtagctgccgcacctgccgcagacgtagctgaacaacctcagccgcaaaccgtggatggcgttgccagcccggcacaagcctcggttagcgatctgaccggtgatcagcctgcggcccagccggtgcctgtaagcgccccggcgacaagcaccgcagcggtaagcgcacccgcaaatccatccgcagagctgaaaatctacgatacctcatcacaaccacttagccagatcttaagccaggttcagcaggatggcgcgagtattgtggttggtccgttgctgaaaaataacgttgaagagttgctgaagagcaacaccccgctgaacgtgctggcactgaaccagccagagaatatcgaaaaccgcgtcaatatttgttacttcgcgctttcacctgaagacgaagcgcgcgatgcagcgcgtcatattcgtgaccagggtaaacaagcgccgctggtgctgatcccacgcagttcattgggcgatcgcgtagccaatgcgtttgcgcaagagtggcagaaactgggcggcggcaccgttctgcaacaaaaatttggttccaccagcgaattacgcgcgggtgttaacggcggttctggtatcgctttaacgggtaccccgattactcccagagcgacaaccgactccggcatgacgaccaacaatccaacgctgcaaaccacgccaaccgatgaccagttcaccaataatggcggtcgtgtcgatgcggtgtacattgtggcaacgccgggtgaaatcgcttttatcaaaccgatgatcgccatgcgtaacggtagccagagcggtgcaatgctgtacgccagctcccgcagcgcacaaggcaccgcaggcccggatttccgtctggagatggaaggtttgcagtacagcgaaatcccgatgctggcgggcggtaatctgccgttaatgcagcaggcactcagcgcggtgaataacgattattcactggctcgcatgtatgcgatgggcgtcgatgcctggtcgctggcaaatcatttctcacaaatgcgccaggttcagggttttgaaatcaacggtaataccggaagcctgacggcaaacccggattgcgtgattaacaggaagttatcatggctacagtaccaacaaggtcaggtagtccccgtcagttaa

SEQ ID NO: 483556 - DNA, 396 bp, Shigella sonnei
atggctacagtaccaacaaggtcaggtagtccccgtcagttaaccaccaaacagaccggcgatgcgtgggaagcacaagcgcgtcgctggctggaaggcaaaggactgcggtttatcgccgctaacgtgaacgagcgtggcggcgagatcgatctgataatgcgtgaaggccggaccaccgtttttgtcgaggtacgctatcgccgctctgcgctttatggcggcgcggcagccagtgtgacccgcagcaaacaacacaaattattacagactgcccgcttgtggctcgcgcgtcataatgggagttttgatactgtggattgccggttcgatgtggtagccttcaccgggaatgaggttgagtggattaaggatgcctttaatgaccactcataa

SEQ ID NO: 483557 - DNA, 591 bp, Shigella sonnei
gtgcaagaaagaattaaagcttgcttcactgaaagcattcaaactcaaattgcggcggcagaggcgcttccggatgccatctcccgtgcagccatgacgctggttcagtctctgctcaatggcaacaaaatcctctgttgtggtaatggaacttccgctgccaatgcacagcattttgctgccagcatgatcaaccgtttcgaaacggagcggcccagcttacctgccattgcactaaatactgataatgttgtcttaacggcgattgccaacgatcgcttacatgatgaagtgtatgcaaaacaggtgcgggcgctgggtcatgcgggagatgtattgttagccatttccacccgtggcaacagccgcgatattgttaaagcagttgaagccgccgttacgcgtgatatgaccattgtggcattgaccggctatgacggcggcgagcttgcaggtttgttagggccacaggatgtggagatccgcattccttcgcatcgtagtgctcgcattcaggaaatgcatatgctgacggtaaattgcctgtgcgatctgatcgataacacgcttttccctcaccaggatgattaa

SEQ ID NO: 483558 - DNA, 576 bp, Shigella sonnei
atgaaggcattatcgccaatcgcagtccttatttccgcgctgctgttgcaaggttgtgttgccgctgccgtagtgggtaccgctgctgtgggtaccaaagccgcaactgacccacgcagtgtcggcacccaggtggacgatggtaccctggaagtgcgcgtgaacagcgcattgtcgaaagacgaacagattaagaaagaaacccgtattaatgtcacggcgtatcagggcaaagtgctgctggttgggcagtcaccaaacgctgaactttcggctcgcgccaaacagattgctatgggcgtagacggtgccaacgaagtgtataacgagattcgtcagggccagccgattggtctgggcgaagcatctaacgatacgtggatcaccaccaaagtgcgttcgcagctcttaaccagcgacctggtgaaatcgtccaacgtgaaagtgaccaccgaaaacggtgaagtgttcctgatggggctggtgactgaacgtgaagcgaaagcggcggcagatattgccagccgggtgagcggcgtaaagcgggtaaccacagcgtttacgtttattaaatag

SEQ ID NO: 483559 - DNA, 1041 bp, Shigella sonnei
atgactggtcagtcttcatctcaggcggcaacgcccattcagtggtggaaacccgcgcttttctttctcgttgtcattgccggtctctggtatgtgaaatggcaaccttactacggcaaagcgtttactgctgccgaaacccacagtatcggtaaatctatccttgcgcaggcggatgctaatccgtggcaggcggcgttggattacgcgatgatctatttcctcgcggtatggaaagcggcggtgctgggggtgatcctcggttcgttgattcaggtgctgatcccgcgtgactggttgttgcgtacgcttggacaatcgcgctttcgcggcacgctgctgggaacgctgttttcgctgccgggcatgatgtgtacctgctgtgcggctccggtcgcggcgggaatgcgtcgccaacaggtatcgatgggcggtgcgctggcattctggatgggcaatccggtgttaaacccggcgacgctggtgtttatggggtttgtcctcggctggggttttgcggcgattcgtctggtggccgggctggtgatggtgttgctgattgcgacgctggtgcaaaaatgggtgcgtgaaacaccgcaaacgcaggcaccggtcgaaattgacataccggaagcacagagcggtttttttagccgctggggcagggcgctatggacacttttctggagtacgatcccggtttacatccttgcagtactggtgttgggtgccgcacgcgtctggttattcccccatgccgatggtgctgtcgataacagcctgatgtgggtggtggcgatggcggtagcaggatgcttgtttgtcattcccacggcagcagaaattccgattgtacaaacgatgatgctggcaggtatgggaaccgctccggcgctggcattgttgatgacgctcccggcagtgagtttgccgtcactgattatgctgcgcaaagcgttcccggcgaaagccttatggctgacgggggcgatggtggcagtgtcaggcgtgattgtcggcgggctggcgctgttattctga

SEQ ID NO: 483560 - DNA, 636 bp, Shigella sonnei
atgagtcaggtactgattacaggcgcaacggggctggtgggcggtcacctgctgcggatgttgattaacgaaccgaaagttaacgccatagccgcgccgacgcgacgtccgttgggcgatatgcccggggtgtttaatccccatgatccgcaactgagtgacgcgttggcgcaggtcaccgaacccatcgacattgtgttttgttgtctcggcaccacgcggcgagaagcggggagcaaagaggcgtttattcatgccgattacacgctggtagtggataccgcattaaccgggcggcgactgggcgcgcagcatatgctggtggtcagtgctatgggtgccaatgcccactcgccgtttttctataaccgcgtcaaaggggagatggaagaagcattaattgcccagaactggccgaaattgaccattgctcgcccgtcgatgttgctgggcgatcgtagcaaacagcggatgaacgaaacgctttttgcgccgctgtttcgtttactgcccggtaactggaaatccattgatgcgagagacgtggcgcgggtcatgctggcagaggcgatgcggcctgagcatgaaggcgtgactattttaagctcttcagaattacgcaaaagagctgaataa

SEQ ID NO: 483561 - DNA, 519 bp, Shigella sonnei
atgagtaagaaaattgccgttttaatcagtgatgaatttgaggattcagaatttacttcacccgcagacgagttccgtaaagccggacacgaagtgattaccattgaaaaacaagcgggtaaaacggtgaaaggcaaaaaaggagaagccagcgtgaccatcgataaatccatcgatgaagtgacgccagcggagtttgatgccctgctgctaccgggtggtcattcaccggattatctgcgtggcgacaaccgttttgtcacctttacccgtgattttgtgaatagcggcaaacctgttttcgccatctgtcacggtccgcagctgctgatcagcgccgatgtgattcgggggcgcaaactgaccgcagttaaaccgatcattattgatgttaaaaatgcgggcgcggaattttacgatcaggaagtcgtggttgataaagatcagctggttaccagccggacaccggacgatctgccagcgtttaaccgcgaggcgttacgcctgctcggtgcctga

SEQ ID NO: 483562 - DNA, 444 bp, Shigella sonnei
atggaaacactcatcaccatcagccgttggttggcaaaacaacatgttgtcacctggtgtgtgcagcaggaaggggaactgtggtgcgctaatgctttttatctgtttgatgcgcagaaagtcgccttctacattttgacggaagaaaaaacgcgccacgcgcagatgagtgggccgcaggctgcggttgccggaacggtaaacggtcagccgaaaacggtagcgttaattcgcggcgtgcagtttaaaggtgagatccgcaggctggaaggtgaggaaagcgacctcgcgcgccaggcgtacaatcgtcgctttccggttgccagaatgctgtcggccccggtgtgggaaatccggctcgatgaaatcaaattcaccgacaacacgctgggctttggtaaaaaaatgatttggctacgcgactcaggcaccgagcaggcgtaa

SEQ ID NO: 483563 - DNA, 303 bp, Shigella sonnei
atgacaccctggtttctttacttgatccgtaccgccgacaataagctttataccgggatcaccacggatgtcgaacgccgctatcagcagcaccaaagcggcaaaggggcgaaagcactgcgcgggaaaggagaactgacgctggcgttttctgcgccagtgggcgatcgttcgctggcgttacgggcggaatatcgcgttaagcaactgaccaaacggcaaaaagagcgtctggtagcggaaggcgcagggtttgcagagctgttaagcagtctgcaaaccccggagattaaaagcgattga

SEQ ID NO: 483564 - DNA, 504 bp, Shigella sonnei
atgctaattcgagtagaaattcccattgatgcgccgggtattgatgccctgctgcgtcgctcattcgaaagtgatgcggaagcgaagctggttcacgatctgcgtgaagatggctttctgacgctggggctggtggcgacagatgacgaaggtcaggtcattggctatgtggcatttagtccggttgatgtgcagggcgaagacctgcaatgggtcggcatggcaccgttggcggttgatgaaaaataccgtggacaggggctggcacgccaactggtctatgaaggactcgattcgcttaatgagttcggctatgccgcagtggtgacgctgggcgatccggcgctgtacagtcgtttcggctttgaactggcggcgcatcacgatctgcgttgccgctggccgggcactgaaagcgccttccaggtacatcgtttagcggatgacgcgctgaatggcgtaaccggtctggttgagtatcacgagcatttcaatcgcttttaa

SEQ ID NO: 483565 - DNA, 525 bp, Shigella sonnei
gtgttggataaactgcgttcccgtattgtgcatttggggccatctctgttgagtgtaccggtaaaactgacgccatttgcgctaaaacgccaggttcttgagcaggtcttaagctggcaattccgtcaggcgctggatgatggtgagctggagtttcttgaaggccgctggttaagtattcatgtgcgtgatattgacctgcaatggtttacctcggtggtgaatggcaaactggtggtcagccagaacgcgcaagctgatgtgagttttagtgccgacgccagcgatctgctgatgattgcggcgcgtaaacaagatccggatacgctcttcttccagcgtcggctggtgattgaaggcgatacggagctggggctgtatgtgaaaaacctgatggacgccattgaactggagcaaatgccgaaagccttacgcatgatgctgctgcaactggcggattttgttgaggcgggaatgaaaaccgcgcctgaaaccaaacagacatcggtaggtgaaccatgctaa

SEQ ID NO: 483566 - DNA, 996 bp, Shigella sonnei
atggagctgctctgccctgccggaaatctcccggcgcttaaggcggccatcgaaaacggcgcagatgctgtttatatcgggctaaaagatgatactaatgcccgtcacttcgccggccttaactttaccgagaaaaaattgcaggaagcggtgagttttgtccatcaacatcgccgcaaacttcacatcgcgattaacacttttgcgcatccggacggttacgcccgttggcagcgcgccgtggatatggcggcgcagctgggtgccgacgcgctgatcctcgccgacctcgccatgctggagtacgccgccgagcgttacccgcatattgagcgtcatgtgtcagtgcaggcttcggcgaccaatgaagaggcgattaacttttatcatcgccattttgatgttgcccgcgtggtgctgccgcgcgtgttgtcgattcatcaggtgaaacagctggcacgggtcacacctgtcccgctggaagtctttgcttttggcagcctgtgcattatgtcggaaggtcgttgctatctgtcgtcgtatctgacgggtgagtcgcccaacaccgtgggcgcgtgttctccggcccgtttcgtgcgctggcaacaaacgccgcaggggctggaatcccgcctgaacgaagtgctgatcgaccgttatcaggatggcgaaaacgcaggttatccgacgctgtgtaaagggcgttatctggtggacggcgagcgctatcacgcgctggaagaaccaaccagtctcaataccctggaactgctgccggagttaatggcggcgaatattgcttcggtgaaaattgaaggccgccagcgtagcccggcgtatgtcagccaggtggcgaaagtctggcgtcaggctatcgaccgttgtaaggccgatccgcaaaacttcgtaccgcaaagcgcgtggatggagacgctcgggtcgatgtccgaaggcacgcagaccacccttggcgcgtatcaccgtaaatggcagtga

SEQ ID NO: 483567 - DNA, 879 bp, Shigella sonnei
atgaaatattccttagggccagtgctgtggtactggccaaaagaggcgctggaagaattttatcagcaggccgccaccagcagcgccgacgtgatttatcttggtgaagcggtatgcagcaagcgccgggcaaccaaagttggcgactggctggagatggcaaaatcgctcgccggaagcgggaagcagatagtgctctccacgctggcgctggtgcaggcatcctctgaactgggcgaactgaaacgctatgttgagaacggtgagtttctgattgaagccagcgatctcggcgtggtgaatatgtgcgctgaacgcaaactgccgttcgtcgccgggcacgcgctgaactgctacaacgcggtgacgctgaaaatattgctcaaacagggcatgatgcgctggtgtatgccggtggagctttcccgcgactggctggtgaatctgcttaatcagtgcgatgagttggggattcgcaaccagtttgaagtggaagtcctgagctacggtcatctaccgctggcctactccgcccgctgctttaccgcgcgttcggaagaccgcccgaaagatgagtgtgaaacctgctgcattaagtatccgaacgggcgcaacgtgctgtcgcaggaaaaccaacaagtgtttgtactcaatggcattcagaccatgagcggctacgtttacaacctcggtaacgagctgacatccatgcagggattggttgatgtggtccgcctgtcaccgcagggtactgacactttcgcgatgctcgacgccttccgcgctaatgaaaatggcgctgcgccactgccgttgacggcaaacagcgactgtaacggctactggcggcggctggctgggctggagctgcaagcctaa

SEQ ID NO: 483568 - DNA, 1008 bp, Shigella sonnei
atgactgataaaaccattgcgttttcgctactcgatctggcccccattcccgaaggttcttcagcgcgagaagcattctcccactctctcgatctcgcccgtctggctgaaaagcgcggctatcatcgctactggctggcagaacaccacaatatgactggcattgccagtgctgccacgtcggtattgattggctatctggcggcgaataccaccacgctgcatctggggtctggcggcgtgatgttgcctaaccactcaccgttggtcattgccgaacagttcggcacgctcaatacactctatccggggcgaatcgatttggggctgggtcgtgcgccaggtagtgaccaacggacaatgatggcgctgcgtcgccatatgagcggcgatattgataatttcccccgcgatgtcgcggagctggtggactggtttgacgcccgcgatcccaatccgcatgtgcgcccggtaccaggctatggcgagaaaatccccgtgtggttgttaggctccagcctttacagcgcgcaactggcggcgcagcttggtctgccgttcgcgtttgcctcacacttcgcgccggatatgttgttccaggcgctgcatctttatcgcagcaacttcaaaccgtcggcacgactggaaaaaccatacgcgatggtgtgcatcaatattatcgccgccgacagcaaccgcgacgctgaatttctatttacctcaatgcagcaagcctttgtgaagctgcgccgtggcgaaaccggacaactgccgccgccgattcaaaatatggatcagttctggtcaccgtctgagcagtatggcgtgcagcaggcgctgagtatgtcgttggtgggtgataaagcgaaagtgcgtcacggcttgcagtcgatcctgcgcgaaaccgacgccgatgaaattatggttaacgggcagattttcgaccaccaggcgcgcctgcattcgtttgaactggcgatggatgtgaaggaagagttgttgggatag

SEQ ID NO: 483569 - DNA, 1245 bp, Shigella sonnei
atggcaacactaaccaccacccaaacgtcaccgtcgctgcttggcggcgtggtgattatcggcggcaccattattggcgcagggatgttttctctgccagtggtcatgtccggggcgtggtttttctggtcaatggcggcgctgatctttacctggttctgtatgctgcattccggcttgatgattctggaagctaacctgaattaccgaatcggttcgagttttgacaccatcaccaaagatttgctgggcaaaggctggaacgtggtcaacggtatttccattgcctttgtgctctatatcctgacctatgcctatatttctgccagtggttcaattctgcatcacaccttcgcagagatgtcgctaaacgtcccggcacgggcggcgggttttggttttgcactgctggtagcgtttgtggtgtggttgagtactaaggccgtcagccgcatgacggcgattgtactgggggcgaaagtcattaccttcttcctcaccttcggtagcctactggggcatgtgcagcctgcgacattgttcaacgtcgccgaaagcaatgcatcttatgcgccgtatttgctgatgaccctgccgttctgtctggcatcgtttggttatcacggtaacgtgccgagcctgatgaagtattacggcaaagatccgaaaaccatcgtgaaatgcctggtgtacggtacgctgatggcactggcgctgtataccatctggttgctggcgacgatgggtaacatcccgcgtccggagtttatcggtattgcagagaagggcggtaatattgatgtgctggtacaggcattaagcggcgtgctgaacagccgtagcctggaccttctgctggtcgtgttctcaaactttgcggtagcgagttcgttccttggcgtaacgctgggtttgtttgactatctggcagatctgtttggtttcgatgactcagccctggggcgcttgaaaacggcattgctgacctttgccccgcctgttgtgggtggtctactgttcccgaacggattcctgtacgccattggttatgctggtttagcagctaccatctgggcggcaattgttccggcgctgttagcccgcgcatcgcgtaaacgctttggcagcccgaaattccgtgtctggggcggcaagccgatgattacgctgattctggtgtttggcgttggcaacgcactggtccatatcttatcgagctttaatttgctgccggtgtatcagtaa

SEQ ID NO: 483570 - DNA, 1890 bp, Shigella sonnei
atggctgaattcgaaaccacttttgcagatctgggcctgaaggctcctatccttgaagcccttaacgatctgggttacgaaaaaccatctccaattcaggcagagtgtattccacatctgctgaatggccgcgacgttctgggtatggcccagacggggagcggaaaaactgcagcattctctttacctctgttgcagaatcttgatcctgagctgaaagcaccacagattctggtgctggcaccgacccgcgaactggcggtacaggttgctgaagcaatgacggatttctctaaacacatgcgcggcgtaaatgtggttgctctgtacggcggccagcgttatgacgtgcaattacgcgccctgcgtcaggggccgcagatcgttgtcggtactccgggccgtctgctggaccacctgaaacgtggcactctggacctctctaaactgagcggtctggttctggatgaagctgacgaaatgctgcgcatgggcttcatcgaagacgttgaaaccattatggcgcagatcccggaaggtcatcagaccgctctgttctctgcaaccatgccggaagcgattcgtcgcattacccgccgctttatgaaagagccgcaggaagtgcgcattcagtccagcgtgactacccgtcctgacatcagccagagctactggactgtctggggtatgcgcaaaaacgaagcactggtacgtttcctggaagcggaagattttgatgcggcgattatcttcgttcgtaccaaaaacgcgactctggaagtggctgaagctcttgagcgtaacggctacaacagcgccgcgctgaacggtgacatgaaccaggcgctgcgtgaacagacactggaacgcctgaaagatggtcgtctggacatcctgattgcgaccgacgttgcagcccgtggcctggacgttgagcgtatcagcctggtagttaactacgatatcccgatggattctgagtcttacgttcaccgtatcggtcgtaccggtcgtgcgggtcgtgctggccgcgcgctgctgttcgttgagaaccgcgagcgtcgtctgctgcgcaacattgaacgtactatgaagctgactattccggaagtagaactgccgaacgcagaactgctgggcaaacgccgtctggaaaaattcgccgctaaagtacagcagcagctggaaagcagcgatctggatcaataccgcgcactgctgagcaaaattcagccgactgcagaaggtgaagagctggatctcgaaactctggctgcggcactgctgaaaatggcacagggtgaacgtactctgatcgtaccgccagatgcgccgatgcgtccgaaacgtgaattccgtgaccgtgatgaccgtggtccgcgcgatcgtaacgaccgtggcccgcgtggtgaccgtgaagatcgtccgcgtcgtgaacgtcgtgatgttggcgatatgcagctgtaccgcattgaagtgggccgcgatgatggtgttgaagttcgtcatatcgttggtgcgattgctaacgaaggcgacatcagtagccgttacattggtaacatcaagctgtttgcttctcactccaccatcgaactgccgaaaggtatgccgggtgaagtgctgcaacactttacgcgcactcgcattctcaacaagccgatgaacatgcagttactgggcgatgcacagccgcatactggcggtgagcgtcgtggcggtggtcgtggtttcggtggcgaacgtcgtgaaggcggtcgtaacttcagcggtgaacgccgtgaaggtggccgtggtgatggtcgtcgttttagcggcgaacgtcgtgaaggccgcgctccgcgtcgtgatgactctaccggtcgtcgtcgtttcggtggtgatgcgtaa

SEQ ID NO: 483571 - DNA, 885 bp, Shigella sonnei
atgaagccttttttgcgctggtgtttcgttgcgacagcacttacgcttgcaggatgcagtaatacttcctggcgtaaaagtgaagtcctcgcggtaccattgcaaccgactttacagcaggaagtgattctggcacgtatggaacaaatccttgccagtcgggctttaaccgatgacgaacgcgcacagcttttatatgagcgcggagtgttgtatgatagtctcggtctgagggcattagcgcgtaacgatttttcgcaagcgctggcaatccgaccggatatgcctgaagtattcaattacttaggcatatatttaacgcaggcaggcaattttgatgctgcctatgaagcgtttgattctgtacttgagcttgatccaacttacaactacgcgcacttgaatcgcgggatcgcattatattacggcggtcgtgacaagttagcgcaagatgatctgctggcgttttatcaagacgatcccaatgatcctttccgtagtctgtggctttatctcgccgagcagaagctcgatgagaagcaggctaaagaagtgttgaaacagcacttcgaaaaatcggataaggaacagtggggatggaacattgtcgagttctacctgggcaacattagcgaacaaacgttaatggaaaggctcaaggcggacgcaacggataacacctcgctcgctgagcatctcagtgaaaccaacttctatttaggtaagtactacctaagtctgggggatttggacagcgccacggcactgttcaaactggcggttgccaacaacgttcataactttgttgagcaccgatacgcattgttggaattatcgctcctgggccaggaccaagatgacctggcagaatcggaccagcaatag

SEQ ID NO: 483572 - DNA, 2136 bp, Shigella sonnei
ttgcttaatccgatcgttcgtaaattccagtacggccaacacaccgtgactctggaaaccggcatgatggctcgtcaggctactgccgctgttatggttagcatggatgacaccgcggtattcgttaccgttgttggacagaaaaaagccaaaccaggtcaggacttcttcccactgaccgttaactatcaggagcgtacctacgctgctggtcgtatcccgggtagcttcttccgtcgtgaaggtcgtccaagcgaaggcgaaaccctgatcgcgcgtctgattgaccgcccgattcgcccgctgttcccggaaggcttcgtcaacgaagttcaggttatcgccaccgtggtttctgttaacccgcaggttaacccggatatcgtcgcgatgattggtgcttccgcagcactgtctctgtctggtattccgttcaatggcccgattggtgctgcccgcgtaggttacatcaatgaccagtacgtactgaacccgactcaggacgagctgaaagagagcaaactggatctggttgttgccggtactgaagccgctgtactgatggttgaatctgaagctgaactgctgagcgaagatcagatgctgggcgcagtagtgttcggtcatgaacaacagcaggttgttattcagaacatcaatgaactagtgaaagaagccggtaaaccgcgttgggactggcagccggagccggtaaacgaagcgctgaacgcgcgcgttgctgcactggctgaagctcgtctgagtgatgcttaccgcatcaccgacaaacaagagcgttatgcgcaggttgatgtcatcaaatctgaaaccatcgcgacgctgcttgctgaagacgaaaccctggacgaaaacgaactgggtgaaattctgcacgctatcgagaaaaacgttgttcgtagccgcgtactggcaggcgaaccgcgtatcgacggtcgtgaaaaagatatgatccgtggtctggatgtgcgtactggcgtgctgccgcgtactcacggttctgcgctgttcacccgcggtgaaacgcaggcactggttactgcaacgctgggtaccgctcgtgacgcgcaggttcttgatgaactgatgggcgaacgtaccgataccttcctgttccactacaacttccctccgtactccgtaggcgaaaccggcatggtcggttctccgaagcgtcgtgaaattggtcacggtcgtctggcgaagcgcggcgtgctggcagtcatgccggatatggacaaattcccgtacaccgtacgtgtagtgtctgaaatcaccgaatccaacggttcttcttctatggcttccgtgtgcggcgcgtctctggcgctgatggacgcaggtgtgccaatcaaagctgccgttgcgggtatcgcaatgggtctggtgaaagaaggcgacaactacgttgtactgtctgacattttgggcgacgaagatcacctgggcgatatggacttcaaagttgcaggttcccgcgacggtatctctgcactgcagatggatatcaaaattgaaggtatcaccaaagagatcatgcaggttgcgctgaaccaggctaaaggtgcgcgtctgcatatcctgggcgtaatggaacaggcgatcaacgcgccgcgtggcgatatctctgagttcgcaccgcgtatccataccatcaagatcaacccggataagatcaaagacgttatcggtaaaggcggctctgttatccgtgccctgaccgaagaaactggcactaccatcgaaatcgaagatgacggtactgtgaagatcgcagcgaccgacggcgagaaagcgaaacatgctattcgtcgtatcgaagagatcactgcagaaatcgaagtgggccgcgtctacactggtaaagtgacccgtatcgttgactttggcgcatttgttgccatcggcggcggtaaagaaggtctggtccacatctctcaaatcgctgacaaacgcgttgagaaagtgaccgattacctgcagatgggtcaggaagtaccggtgaaagttctagaagttgatcgccagggccgtatccgtctgagcattaaagaagcgactgagcagtctcaacctgctgcagcaccggaagctccggctgctgaacagggcgagtaa

SEQ ID NO: 483573 - DNA, 270 bp, Shigella sonnei; identical to SEQ ID NO: 1115

SEQ ID NO: 483574 - DNA, 945 bp, Shigella sonnei
atgagtcgtcctcgtcgtcgcggtcgcgacattaacggcgttttgttgctggataaaccgcagggtatgtccagcaatgatgcgctgcaaaaagtgaaacggatttataacgccaaccgtgccgggcataccggtgcgctggacccgctggcaacaggcatgttgccaatttgcctcggggaagcgacgaagttttcccagtatctgctggactccgacaaacgctatcgggtcattgcgcgtcttggacagcgtaccgatacttctgatgccgacggacaaatcgttgaagaacgtccggtaacctttagcgcagagcaactggcggcggcgctggatactttccgtggcgatatcgaacagatcccttcgatgtattcagcactgaaatatcagggtaaaaaactgtacgaatatgcgcgtcagggcattgaagtaccgcgtgaagcgcgcccgattaccgtttatgaattgctgtttattcgccacgaaggcaatgagctggagctggaaattcactgctcaaaaggcacttatatccgcaccatcattgatgacctgggtgaaaaactcggttgtggcgcgcatgttatttacctgcgtcgtctggcggtaagtaaatatccggttgaacggatggtgaccctggaacatctgcgtgaactggtcgaacaagccgaacagcaggatattccggctgcggagttacttgatccattactgatgccaatggacagtccagcttcggactacccggtggtgaatcttccgttaacgtcttctgtttacttcaaaaatggtaacccagttcgtacatccggtgcgccgctggaaggactggttcgcgttacagaaggtgagaacggcaagtttatcggtatgggcgaaattgacgatgaaggccgcgtcgcgcctcgtcgcctggtggttgaatacccggcgtaa

SEQ ID NO: 483575 - DNA, 402 bp, Shigella sonnei; identical to SEQ ID NO: 458686

SEQ ID NO: 483576 - DNA, 2673 bp, Shigella sonnei
atgacagatgtaacgattaaaacgctggccgcagagcgacagacctccgtggaacgcctggtacagcaatttgctgatgcaggtatccggaagtctgctgacgactctgtgtctgcacaagagaaacagactttgattgaccacctgaatcagaaaaattcaggcccggacaaattgacgctgcaacgtaaaacacgcagcacccttaacattcctggtaccggtggaaaaagcaaatcggtacaaatcgaagtccgcaagaaacgcacctttgtgaaacgcgatccgcaagaggctgaacgccttgcagcggaagagcaagcgcagcgtgaagcggaagagcaagcccgtcgtgaggcagaagaatcggctaaacgcgaggcgcaacaaaaagctgaacgtgaggctgcagaacaagctaagcgtgaagctgctgaacaagcgaaacgtgaagctgcggaaaaagacaaagtgagcaatcaacaagacgatatgactaaaaacgcccaggctgaaaaagcccgccgtgagcaggaagctgcagagctcaagcgtaaagccgaagaagaagcgcatcgtaaactcgaagaagaagcacgtcgcgttgctgaagaagcacgtcgtatggcggaagaaaacaaatggactgataacgcggaaccgactgaagattccagcgattatcacgtcactacttctcaacatgctcgccaggcagaagacgaaagcgatcgtgaagtcgaaggcggtcgtggccgtggtcgtaacgcgaaagcagcgcgtccgaagaaaggcaacaaacacgctgaatcaaaagctgatcgtgaagaagcacgcgcagcagtacgtggcggtaaaggcggaaaacgtaaaggttcttccctgcagcaaggcttccagaagccagctcaggccgttaaccgtgacgttgtgatcggcgaaaccatcaccgttggcgaactggcgaacaagatggcggttaaaggctctcaggtcatcaaagcgatgatgaaactgggcgcaatggcaaccatcaaccaggttatcgatcaggaaaccgcacagctggttgctgaagagatgggccacaaagttatcctgcgtcgtgaaaacgagctggaagaggcggtaatgagcgaccgtgacacgggtgctgcggctgaaccgcgcgcgccggttgtgaccatcatgggtcacgttgaccacggtaaaacctctctgctggactacattcgttcaacgaaagttgcctctggcgaagcgggcggcattacccagcacattggtgcataccacgttgaaactgaaaacggcatgatcaccttcctggacaccccggggcacgccgcgtttacttcaatgcgtgcacgtggtgcgcaggcaacggacatcgtagtcctggttgttgctgccgacgacggcgtgatgccgcagaccatcgaagcaatccagcacgcgaaagcggcgcaggtaccggtggtggttgcagtgaacaagattgataaaccagaagccgatccggatcgtgttaagaacgaactctcccagtatggcatcctgccggaagagtggggcggtgaaagccagttcgtacacgtatctgcgaaagcgggtaccggcatcgatgaactgctggacgctatcctgctgcaggcggaagttctggagctgaaagcggtacgtaaaggtatggcgagcggtgcggttatcgaatccttcctcgataaaggtcgtggtccggttgctaccgttctggtacgtgaaggtactctgcacaagggcgatatcgttctgtgtggcttcgaatacggtcgtgttcgtgcgatgcgtaacgaactgggtcaggaagtgctggaagcgggtccgtccattccggtggaaatcctcggcctgtccggcgtaccggctgcgggtgatgaagttaccgttgtacgtgacgagaagaaagcgcgtgaagttgcactgtatcgtcagggtaaattccgcgaagttaaactggcgcgtcagcagaaatctaaactcgagaacatgttcgccaacatgaccgaaggcgaagttcacgaagtgaacatcgtcctgaaggcagacgtacagggttctgtggaagcgatctccgactccttgctgaaactgtctactgacgaagttaaagtgaagatcatcggttctggcgtaggtggtatcaccgaaaccgacgccaccctggctgcggcgtccaacgccatcctggttggcttcaacgtacgtgctgatgcctctgcacgtaaagtgattgaagcggaaagcctggatctgcgttactactccgtcatctataacctgattgacgaagtgaaagcggcgatgagcggtatgctgtctccggaactgaaacagcagattatcggtctggcggaagttcgtgacgtgttcaaatcgccgaaatttggtgctatcgcaggctgtatggttaccgaaggtgtggttaaacgtcacaacccgatccgcgttctgcgtgacaacgtggttatctacgaaggcgagctggagtccctgcgccgcttcaaagatgacgttaacgaagtccgtaacggtatggaatgtggtatcggcgttaagaactacaacgacgtccgcactggcgatgtgatcgaagtattcgaaatcatcgagatccaacgtaccatcgcttaa

SEQ ID NO: 483577 - DNA, 1488 bp, Shigella sonnei
atgaacaaagaaattttggctgtagttgaagccgtatccaatgaaaaggcgctacctcgcgagaagattttcgaagcattggaaagcgcgctggcgacagcaacaaagaaaaaatatgaacaagagatcgacgtccgcgtacagatcgatcgcaaaagcggtgattttgacaccttccgtcgctggttagttgttgatgaagtcacccagccgaccaaggaaatcacccttgaagccgcacgttatgaagatgaaagcctgaacctgggcgattacgttgaagatcagattgagtctgttacctttgaccgtatcactacccagacggcaaaacaggttatcgtgcagaaagtgcgtgaagccgaacgtgcgatggtggttgatcagttccgtgaacacgaaggtgaaatcatcaccggcgtggtgaaaaaagtaaaccgcgacaacatctctctggatctgggcaacaacgctgaagccgtgatcctgcgtgaagatatgctgccgcgtgaaaacttccgccctggcgaccgcgttcgtggcgtgctttattccgttcgcccggaagcgcgtggcgcgcaactgttcgtcactcgttccaagccggaaatgctgatcgaactgttccgtattgaagtgccagaaatcggcgaagaagtgattgaaattaaagcagcggctcgcgatccgggttctcgtgcgaaaatcgcggtgaaaaccaacgataaacgtatcgatccggtaggtgcttgcgtaggtatgcgtggcgcgcgtgttcaggcggtgtctactgaactgggtggcgagcgtatcgatatcgtcctgtgggatgataacccggcgcagttcgtgattaacgcaatggcaccggcagacgttgcttctatcgtggtggatgaagataaacacaccatggatatcgccgttgaagccggtaacctggcgcaggcgattggccgtaacggtcagaacgtgcgtctggcttcgcagctgagcggttgggaactcaacgtgatgaccgttgacgacctgcaggctaagcatcaggcggaagcgcacgcagcgatcgacaccttcaccaaatatctcgacatcgacgaagacttcgcgactgttctggtagaagaaggcttctcgacgctggaagaactggcctatgtgccgatgaaagagctgttggaaatcgaaggccttgatgagccgaccgttgaagcactgcgcgagcgtgctaaaaatgcactggccaccattgcacaggcccaggaagaaagcctcggtgataacaaaccggctgacgatctgctgaaccttgaaggggtagatcgtgatttggcattcaaactggccgcccgtggcgtttgtacgctggaagatctcgccgaacagggcattgatgatctggctgatatcgaagggttgaccgacgaaaaggccggagcactgattatggctgcccgtaatatttgctggttcggtgacgaagcgtaa

SEQ ID NO: 483578 - DNA, 453 bp, Shigella sonnei; identical to SEQ ID NO: 458689

SEQ ID NO: 483579 - DNA, 768 bp, Shigella sonnei
atgcgccatgcgccatgcgccatgcgccatgcgccatgcgccatcatcacaggtgcgggtgcaggtattggtaaagaaatcgccattacattcgcgacagctggcgcatctgtggtggtcagtgatattaacgccgacgcagctaaccatgttgtagacgaaattcaacaactgggtggtcaggcatttgcctgccgttgtgatattacttccgaacaggaactctctgcactggcagactttgctatcagtaagctgggtaaagttgatattctggttaacaacgccggtggcggtggacctaaaccgtttgatatgccaatggcggattttcgccgtgcttatgaactgaatgtgttttcttttttccatctgtcacaacttgttgcgccagaaatggaaaaaaatggcggtggcgttattctgaccatcacttctatggcggcagaaaataaaaatataaacatgacttcctatgcatcatctaaagctgcagccagtcatctggtcagaaatatggcgtttgacctgggtgaaaaaaatattcgggtaaatggcattgcgccgggggcaatattaaccgatgccctgaaatccgttattacaccagaaattgaacaaaaaatgttacagcacacgccgatcagacgtctgggccaaccgcaagatattgctaacgcagcgctgttcctttgctcgcctgctgcgagctgggtaagcggacaaattctcaccgtctccggtggtggggtacaggagctcaattaa

SEQ ID NO: 483580 - DNA, 579 bp, Shigella sonnei
atgcagactgaagcacaaccgacacggacccggatcctcaatgctgccagagagattttttcagaaaatggatttcacagtgcctcgatgaaagccatctgtaaatcttgcgccattagtcccgggacgctctatcaccatttcatctccaaagaagccttgattcaggcgattatcttacaggaccaggagagggcgctggctcgtttccgggaaccgattaaagggattcattttgttgactatatggtcgagtctattgtctctctcacccatgaagcctttgggcaacgggcgctggtggtcgaaattatggcggaagggatgcgtaacccacaggtcgccgccatgcttaaaaataagcatatgacgatcacggaatttgttgcccagcggatgcgtgatgcccagcaaaaaggcgagataagcccagacatcaacacgtcaatgacttcacgtttactgctggatctgacctacggtgtactggccgatatcgaagcggaagatctggcgcgtgaagcgtcgtttgctcagggattacgcgcgatgattggcggtatcttaaccgcatcctga

SEQ ID NO: 483581 - DNA, 1812 bp, Shigella sonnei
atgttacgtcctgtagaaaccccaacccgtgaaatcaaaaaactcgacggcctgtgggcattcagtctggatcgcgaaaactgtggaattgatcagcgttggtgggaaagcgcgttacaagaaagccgggcaattgctgtgccaggcagttttaacgatcagttcgccgatgcagatattcgtaattatgcgggcaacgtctggtatcagcgcgaagtctttataccgaaaggttgggcaggccagcgtatcgtgctgcgtttcgatgcggtcactcattacggcaaagtgtgggtcaataatcaggaagtgatggagcatcagggcggctatacgccatttgaagccgatgtcacgccgtatgttattgccgggaaaagtgtacgtatcaccgtttgtgtgaacaacgaactgaactggcagactatcccgccgggaatggtgattaccgacgaaaacggcaagaaaaagcagtcttacttccatgatttctttaactatgccgggatccatcgcagcgtaatgctctacaccacgccgaacacctgggtggacgatatcaccgtggtgacgcatgtcgcgcaagactgtaaccacgcgtctgttgactggcaggtggtggccaatggtgatgtcagcgttgaactgcgtgatgcggatcaacaggtggttgcaactggacaaggcactagcgggactttgcaagtggtgaatccgcacctctggcaaccgggtgaaggttatctctatgaactgtgcgtcacagccaaaagccagacagagtgtgatatctacccgcttcgcgtcggcatccggtcagtggcagtgaagggcgaacagttcctgattaaccacaaaccgttctactttactggctttggtcgtcatgaagatgcggacttgcgtggcaaaggattcgataacgtgctgatggtgcacgaccacgcattaatggactggattggggccaactcctaccgtacctcgcattacccttacgctgaagagatgctcgactgggcagatgaacatggcatcgtggtgattgatgaaactgctgctgtcggctttaacctctctttaggcattggtttcgaagcgggcaacaagccgaaagaactgtacagcgaagaggcagtcaacggggaaactcagcaagcgcacttacaggcgattaaagagctgatagcgcgtgacaaaaaccacccaagcgtggtgatgtggagtattgccaacgaaccggatacccgtccgcaaggtgcacgggaatatttcgcgccactggcggaagcaacgcgtaaactcgacccgacgcgtccgatcacctgcgtcaatgtaatgttctgcgacgctcacaccgataccatcagcgatctctttgatgtgctgtgcctgaaccgttattacggatggtatgtccaaagcggcgatttggaaacggcagagaaggtactggaaaaagaacttctggcctggcaggagaaactgcatcagccgattatcatcaccgaatacggcgtggatacgttagccgggctgcactcaatgtacaccgacatgtggagtgaagagtatcagtgtgcatggctggatatgtatcaccgcgtctttgatcgcgtcagcgccgtcgtcggtgaacaggtatggaatttcgccgattttgcgacctcgcaaggcatattgcgcgttggcggtaacaagaaggggatcttcacccgcgaccgcaaaccgaagtcggcggcttttctgctgcaaaaacgctggactggcatgaacttcggtgaaaaaccgcagcagggaggcaaacaatga

SEQ ID NO: 483582 - DNA, 1374 bp, Shigella sonnei
atgaatcaacaactctcctggcgcaccatcgtcggctacagcctcggtgacgtcgccaataacttcgccttcgcaatgggggtgctcttcctgttgagttactacaccgacgtcgctggcgtcggtgccgctgcggcgggcaccatgctgttactggtgcgggtattcgatgccttcgccgacgtctttgccggacgagtggtggacagtgtgaatacccgctggggaaaattccgcccgtttttactcttcggtactgcgccgttaatgatcttcagcgtgctggtattctgggtaccgaccgactggagccatagccgcaaagtagtgtatgcatatttgacctacatgggcctcgggctttgctacagcctggtgaatattccttatggttcacttgctaccgcgatgacccaacaaccacaatcccgcgcccgtctgggcgcggctcgtgggattgccgcttcattgacctttgtctgcctggcatttctgatagggccgagcattaagaactccagcccggaagagatggtgtcggtataccatttctggacgattgtgctggcgattgccggaatggtgctttacttcatctgcttcaaatcgacgcgtgagaatgtggtacgtatcgttgcgcagccgtcattgaagatcagtttgcaaaccctgaaacggaatcgcccgctgtttatgttgtgcatcggtgcgctgtgtgtgctgatttcgacctttgcggtcagcgcctcgtcgttgttctacgtgcgctatgtgttaaatgataccgggctgttcactgtgctggtactggtgcaaaacctggttggtactgtggcatcggcaccgcttgtgccggggatggtcgcgaggatcggtaaaaagaataccttcctgattggcgctttgctgggaacctgcggttatctgctattcttctgggtttccgtctggtcactgccggtggcgttggttgcgttggccatcgcttcaattggtcagggcgttactatgacagtgatgtgggcactggaagctgataccgtagaatacggtgaatacctgaccggcgtgcgaattgaagggctcacctattcactattctcatttacccgtaaatgcggtcaggcaatcggaggttcaattcctgcctttattttggggttaagcggatatattgccaatcaggtgcaaacgccggaagttattatgggcatccgcacatcaattgccttagtaccttgcggatttatgctactggcattcgttattatctggttttatccgcttacggataaaaaattcaaagaaatcgtggttgaaattgataatcgtaaaaaagtgcagcagcaattaatcagcgatatcactaattaa

SEQ ID NO: 483583 - DNA, 1311 bp, Shigella sonnei
atgagaaaaatagtggccatggccgttatttgcctgacggctgcctctggccttatctctgcttatgcggcgcaactggctgacgatgaggcgggactacgcatcagactgaaaaacgaattgcgcagggcggataagcccagtgctggcgcgggaagagatatttacgcatgggtacagggaggattgctcgatttcaatagtggttattattccaatattattggcgttgaaggcggggcatattatgtttataaattaggtgctcgtgctgatatgagtacccggtggtatcttgatggtgataaaagttttggctttgccctgggggcagtaaaaataaaacccagtgaaaatagcctgcttaaatcaggtcgcttcgggacggattatagttatggtagcttaccttatcgtattccgttaatggctggcagttcgcaacgtacattaccgacagtttctgaaggagcattaggttattgggctttaacaccaaatattgatctgtggggaatgtggcgttcacgagtatttttatggactgattcaacaaccggtattcgtgatgaaggggtgtataacagccagacgggaaaatacgataaacatcgcgcacgttcttttttagccgccagttggcatgatgataccagtcgctattctctgggggcatcggtacagaaagatgtttccaatcagatacaaagtattctcgagaaaagcataccgctcgacccgaattatacgttgaaaggggagttgctcggcttttacgcgcagctcgaaggtttaagtcgtaataccagccagcccaatgaaacggcgttggttagtggacaattgacctggaatgcgccgtggggaagcgtatttggcagtggtggttatttgcgccatgcaatgaatggtgccgtggtggataccgacattggctatcccttttcattaagtcttgatcgtaaccgtgaaggaatgcagtcctggcaattgggcgtcaactatcgtttaacgccgcaatttacactgacatttgcacagattgtgactcgcggctatgaatccagtaaacgagatgtgcggattgaaggcgcgggtatcttaggtggtatgaactatcgggtcagcgaagggccgttacaagggatgaatttctttcttgctgccgataaagggcgggaaaagcgcgatggcagtacgctgggcgatcgcctgaattactgggatgtgaaaatgagtattcagtatgactttatgctgaagtcagaaataacgccggagagaaaaacctccggcgtttcagattgttga

SEQ ID NO: 483584 - DNA, 1509 bp, Shigella sonnei
atgaataaatcgctggtagcggtaggcgtcattgttgcgctaggcgtagtctggacaggcggcgcatggtatacaggcaagaagattgaaacccatctcgaagacatggtcgcgcaggcgaacgcgcaactcaaactgacagctcctgaatccaacctggaagtgagttatcaaaactatcatcgcggcgtattcagcagccagttgcaactgttggtgaaacccattgccgggaaagaaaatccgtggattaaaagcggtcagagcgtcatcttcaacgaatcggttgatcatggtcccttcccgcttgcccagcttaaaaaactgaacctgatcccgtcgatggcatcaattcaaaccacgctggttaataacgaagtaagcaaaccactgtttgatatggcaaaaggtgaaacgccttttgagattaactcgcgcattggttacagcggtgattccagttccgatatttcgctcaagccactgaattacgagcaaaaggatgaaaaagtcgcctttagcggcggcgagttccagttaaatgctgacagagacggcaaagccatctccctttccggggaggcgcaaagtggtcggatagacgcagttaacgaatacaaccagaaagtgcagttgacctttaataatctgaaaaccgacggttccagcacgctggcaagttttggtgagcgcgtaggaaaccaaaaactgtcactggaaaaaatgaccatttcagtggaaggcaaagaactggcactgctggaaggcatggagatcagcggtaaatcggatctggtcaatgacggtaaaacgatcaatagccaactggattactcgctaaacagcctgaaggtacagaatcaggatctgggcagcggcaagctgactttaaaagtcggccagattgatggtgaagcctggcatcagtttagccagcaatataacgcgcaaactcaggcgctgctggcacagccagaaattgccaacaatcccgaactttatcaggagaaagtgacggaagccttctttagcgccctgccgctgatgttgaaaggcgatccggtgattactatcgcgccgctaagctggaaaaacagtcagggtgaaagtgcgctgaatctgtcgctgttcctgaaagatccggcaacgactaaagaagcgccgcaaacgctggcgcaggaagtagatcgttcggttaaatctctggatgcgaaactgaccattccggtggatatggcaactgagtttatgactcaggtagcgaagctggaaggttatcaggaagatcaagcgaaaaaactggcgaaacagcaagttgaaggtgcatcagcaatggggcagatgttccgtctgaccaccttgcaggacaataccatcaccaccagcctgcaatatactaacggtcagataacgttaaacgggcagaaaatgccactggaagatttcgttggtatgtttgcgatgccagctcttaacgttccggctgtaccggcaattccgcagcagtaa

SEQ ID NO: 483585 - DNA, 1176 bp, Shigella sonnei
atgcaaaaactcattaactcagtgcaaaactatgcctggggcagcaaaacggcgttgactgaactttatggtatggaaaatccgtccagccagccgatggccgagctgtggatgggcgcacatccgaaaagcagttcacgagtgcagaatgccgccggagatatcgtttcactgcgtgatgtgattgagagtgataaatcgactctgctcggagaggccgttgccaaacgctttggcgaactgcctttcctgttcaaagtattatgcgcagcacagccgctctccattcaggttcatccaaacaaacgcaattctgaaatcggttttgccaaagaaaatgccgcaggtatcccgatggatgccgccgagcgtaactataaagatcctaaccacaagccggagctggtttttgcgctgacgcctttccttgcgatgaacgcgtttcgtgagttttccgagattgtctccctactccagccagtcgcaggtgcacatccggcaattgctcactttttacaacagcctaatgccgaacgtttaagcgaactgttcgccagcctgttgaatatgcagggtgaagaaaaatcccgcgcgctggcgattttaaaatcggcgctcgacagtcagcagggtgaaccgtggcaaacgattcgtttaatttctgaattttacccggaagacagtggcctgttctccccgctgttactgaatgtggtgaaattgaatcctggcgaagcgatgttcctgttcgctgaaacaccgcacgcttacctgcaaggcgtggcgctggaagtgatggcgaactccgataacgtgctgcgtgcgggtctgacgcctaagtacattgatattccggaactggttgccaatgtgaaattcgaagccaaaccggctaaccagttgttgacccagccggtgaaacaaggtgcagaactggacttcccgattccagtggatgattttgccttctcgctgcatgaccttagtgataaagaaaccaccattagccagcagagtgccgccattttgttctgcgtcgaaggcgatgcaacgttgtggaaaggttctcagcagttacagcttaaaccgggtgaatcagcgtttattgccgccaacgaatcaccggtgactgtcaaaggccacggccgtttagcgcgtgtttacaacaagctgtaa

SEQ ID NO: 483586 - DNA, 1647 bp, Shigella sonnei; identical to SEQ ID NO: 458400

SEQ ID NO: 483587 - DNA, 1404 bp, Shigella sonnei
atgaatacagtacgcagcgaaaaagattcgatgggggcgattgatgtcccggcagataagctgtggggcgcacaaactcaacgctcgctggagcatttccgcatttcgacggagaaaatgcccacctcactgattcatgcgctggcgctaaccaagcgcgcagcggcaaaagttaatgaagatttaggcttgttgtctgaagagaaagcgagcgccattcggcaggcggcggatgaagtactggcaggacagcatgacgacgaattcccgctggctatctggcagaccggctccggcacgcaaagtaacatgaacatgaacgaagtgctggctaaccgggccagtgaattactcggcggcgtgcgcgggatggaacgtaaagttcaccctaacgacgacgtgaacaaaagccaaagttccaacgatgtctttccgacggcgatgcacgttgcggcgctgctggcgctgcgcaagcaactcattccgcaggttaaaaccctgacacagacactgagtgaaaaatcgcgtgcatttgccgatatcgtcaaaatcggtcgaacccacttgcaggacgccacgccgctaacactggggcaggagatttccggctgggtagcgatgctcgagcataatctcaaacatatcgaatacagcctgcctcacgtagcggaactggctctcggcggtacagcggtgggtactggactaaatacccatccggagtatgcgcgtcgcgtagcagatgaactggcagtcattacctgtgcaccgtttgttaccgcgccgaacaaatttgaagcgcttgcgacctgtgatgccctggttcaggcgcacggcgcgttgaaagggttggctgcgtcactgatgaaaatcgccaatgatgtccgctggctggcctctggcccgcgctgcggaattggtgaaatctcaatcccggaaaatgagccgggcagctcaatcatgccggggaaagtgaacccaacccagtgtgaagcattaaccatgctctgctgtcaggtaatggggaacgacgtggcgatcaacatgggtggcgcttccggtaactttgaactgaacgtcttccgtccaatggtgatccacaatttcctgcaatcggtgcgcttgctggcagatggcatggaaagttttaacaaacactgcgcagtgggtattgaaccgaatcgtgagcgaatcaatcaattactcaatgaatcgctgatgctggtgactgcgcttaacacccacattggttatgacaaagccgcggagatcgccaaaaaagcgcataaagaagggctgaccttaaaagctgcggcccttgcgctggggtatcttagcgaagccgagtttgacagctgggtacggccagaacagatggtcggcagtatgaaagccgggcgttaa

SEQ ID NO: 483588 - DNA, 930 bp, Shigella sonnei
atggcgcgttacgatctcgtagaccgactcaacactacctttcgccagatggaacaagagctggctgcatttgccgctcatcttgagcaacacaagctattggttgcccgcgtgttctctttgccggaggtaaaaaaagaggatgagcataatccgcttaatcgtattgaggtaaaacaacatctcggcaacgacgcgcagtcgctggcgttgcgtcatttccgccatttatttattcaacaacagtccgaaaatcgcagcagcaaggccgctgtccgtctgcctggcgtgttgtgttaccaggtcgataacctttcgcaagcagcgttggtcagtcatattcagcacatcaataaactcaagaccacgttcgagcatatcgtcacggttgaatcagaactccccaccgcggcacgttttgaatgggtgcatcgtcatttgccggggctgatcacccttaatgcttaccgcacgctcaccgttctgcacgaccccgccactttacgctttggttgggctaataaacatatcattaagaatttgcatcgtgatgaagtcctggcacagctggaaaaaagcctgaaatcaccacgcagtgtcgcaccgtggacgcgcgaggaatggcaaagaaaactggagcgagagtatcaggatatcgctgccctgccacagaacgcgaagttaaaaatcaaacgtccggtgaaggtgcagccgattgcccgcgtctggtacaaaggagatcaaaaacaagtccaacacgcctgccctacaccgctgattgcactgattaatcgggataatggcgcgggcgtgccggacgttggtgagttgttaaattacgatgccgacaatgtgcagcaccgttataaaccacaggcgcagccgcttcgtttgatcattccacggctgcacctgtatgttgcggattaa

SEQ ID NO: 483589 - DNA, 1302 bp, Shigella sonnei
atgaaaaaactgtttatccagttttacctgttattgtttgtctgcttccttgtgatgtctctgctggttgggctggtgtacaaatttaccgccgaacgcgcgggcaaacagtcgctggatgatttgatgaacagttcactgtatctgatgcgcagcgaattgcgtgagatccccccacacgactggggtaagacgctgaaagagatggatttaaatctctctttcgatctgcgtgtcgagccactgagtaaataccatcttgatgatatttccatgcaccgactgcgtggcggcgaaattgtcgccctggacgatcagtacacgtttttgcagcgtatcccgcgcagccactacgtgctggcagttggtcctgttccttatctttattatctccatcagatgcgattgctggatatcgccctgatcacttttattgctatttccctcgcctttccggtgtttatctggatgcgtccgcactggcaggatatgttaaaactggaagcagcggcgcaacgatttggcgatgggcatctcaatgaacgtatccactttgatgagggttcgagctttgaacgacttggtatcgcatttaaccagatggcggacaatatcaacgccttgattgccagcaaaaaacagcttattgacggtatcgctcacgaactgcgaacaccgttagtgcgcctgcgttatcgactggagatgagcgataacctgagcgccgccgaatcccaggcgttgaatcgtgatatcagtcaacttgaagctttaattgaagagctgctgacttatgcccgactcgatcgcccacaaaacgagcttcatcttagcgaaccagacctgccgttgtggctgtcaacgcatctggcagacattcaggcagtaacgcccgataaaacggtacggattaaaacgctcgcgcaaggccattatgcggcgttggatatgcgcttaatggagcgcgtgctggataatttgctcaataacgccctgcggtactgccattcaacggttgaaaccagcctgctactgtcggggaatagagcgacattaattgttgaggatgatggcccagggattgccccagaaaaccgcgaacatatctttgaaccttttgttcgcctcgatcccagccgggatcgctcaaccggcggctgcgggctggggctggcaattgtccactctatagcactggcaatgggcggtacggttaattgtgacaccagcgaactgggtggtgctcgcttctcgtttagctggccgttatggcataacatcccgcaatttacctctgcctga

SEQ ID NO: 483590 - DNA, 720 bp, Shigella sonnei
atgaacactatcgtatttgtggaagatgatgcggaagtcggttcactgattgccgcgtacctggcaaaacatgatatgcaggttaccgtagagccgcgcggcgaccaggccgaagaaaccattttgcgagaaaatccggatttggtgttactcgacatcatgctaccaggcaaggacggcatgaccatttgtcgtgatttacgcgcaaagtggtctggaccgattgttcttctaacctctctcgatagcgatatgaaccacatcctggcactggaaatgggtgcctgcgactatattctcaaaacgacgccccctgctgttttgctagcgcgtttacgtttgcatttgcgtcagaatgagcaagccacactgaccaaaggtcttcaggaaacgtctctgactccctacaaagccctgcatttcggcacgttgaccatcgatcccatcaaccgcgtagtcaccctggctaacactgaaatctcgctctcgacagctgatttcgaattattgtgggaattagctacccatgccgggcaaatcatggaccgcgatgcattgctgaaaaatttacgcggcgtcagttatgacggactggatcgtagcgtggacgtggctatttcgcggttaagaaaaaaactgctcgataacgccgcagaaccttatcgcattaaaactgtgcgtaacaaaggctatctttttgcgcctcatgcatgggaataa

SEQ ID NO: 483591 - DNA, 336 bp, Shigella sonnei
atggggctggtaatcaaagccgcgctcggtgcgctggtagtgctgttgattggtgttttagcaaaaacgaaaaattattatatcgccgggctgattccacttttcccgacctttgcgcttatcgcgcattatattgttgccagcgaacgcggcattgaagccttacgcgcaaccatcatttttagtatgtggtcgattattccctattttgtttacctggtgtcgctgtggtatttcaccggaatgatgcgcttgcccgccgcttttgttggttctgtttcgtgttgggggataagcgcatgggtgttgattatatgctggataaagctgcattaa

SEQ ID NO: 483592 - DNA, 723 bp, Shigella sonnei
atgggtaaagcccagcccttgccaatattaattactggcggaggtcgtcgcatcggcctcgccctcgcctggcatttcattaatcaaaagcaaccggtgattgtcagctatcggacgcactatccagccattgatggactgattaaggcaggtgcgcagtgtattcaggctgatttttcgaccaacgacggtgtgatggcgtttgccgatgaagtactaaaaagcccccatggtctgcgtgctattttgcataacgccagtgcgtggatggcggaaaaaccgggtgcgccactggccgacgtactggcttgcatgatgcagatccacgttaataccccatacctgctcaaccatgcgctggaaagattactgcgtgggcacggacacgccgccagcgatatcattcactttaccgattatgtggtggagcgcggtagcgacaagcatattgcgtatgctgcaagcaaagcggcactggataatatgacccgctcgtttgcccgcaagctggcaccggaagtgaaagtgaactctattgctccatcgctgatcctgtttaatgaacatgatgatgccgaatatcgacaacaggcgctgaataaatcactgatgaaaaccgcgcctggcgagaaagaagtgatcgacctggtcgattacttacttaccagttgctttgtcaccggacgcagtttcccacttgatggcggtcgtcatctgcgttaa

SEQ ID NO: 483593 - DNA, 1383 bp, Shigella sonnei
atgaaaaagaaactgggactgagcgcactcaccgcgctggtattaagctcaatgctgggcgcgggtgttttcagtctgccgcaaaatatggcggcagttgccagcccggcagcactgctcatcggctggggtattactggcgctggcattttattgctggcctttgccatgctgatcctcacgcgcattcgtcccgaacttgacggcggtatctttacctatgcccgcgaagggtttggcgagctaatcggcttttgttccgcatggggatactggctgtgcgcagtcatcgccaacgtctcctatctggtgatcgttttttccgcgttaagcttttttacggacacgccggaattgcgcctgttcggcgatggtaatacctggcaatcgatcgtcggtgcatcggctttattgtggattgttcactttttgatcctgcgcggggtgcaaaccgctgccagcattaacctggtggcgacactggcaaaattgttgccgctgggtctgtttgttgtgctggcgatgatgatgttcaaactggataccttcaagctcgacttcaccggacttgcacttggcgtacccgtttgggaacaggtgaaaaacaccatgctgatcaccctgtgggttttcattggtgtggaaggtgccgtggttgtttctgcgcgtgcgcgtaataaacgtgatgttggcaaagcgacactgctggcggttctctccgctctgggcgtttacttgctggtaacgctgctttcgctgggtgtggtggcacgtcctgaactggctgaaattcgtaacccgtcaatggccggtctgatggtggaaatgatgggaccatggggcgaaatcatcatcgctgccggtttgatcgtttccgtttgcggcgcgtacttaagctggaccatcatggcggcagaagttccgttcctggctgccactcataaagcattcccacgcatttttgcgcgccagaacgcacaagctgcgccatccgcctcactgtggttgaccaacatctgcgtgcaaatttgtctggtactcatctggctgaccggttccgattacaacacgttgctgaccatcgcctcagaaatgattctggtgccctatttcctggtcggcgcgttcttgctgaaaatcgcaacccgtccactgcataaagcggtaggtgtcggtgcctgcatttatggcttatggttattgtacgcctctggtccaatgcacttgctgttatccgttgttctgtatgcgccggggctgctggttttcctgtatgcgcgcaaaacgcatacacatgataatgtactgaaccgtcaggaaatggtgctgattggcatgctgttaattgcctcagttccggcgacctggatgctggtgggataa

SEQ ID NO: 483594 - DNA, 945 bp, Shigella sonnei
atgaagcttaagaacaccctcctggcgtcggcactgctttctgctacggcattctccgttaacgcagcaacagaactgacaccggagcaagcggcagcggttaaaccttttgaccgtgtagtggttaccggtcgttttaatgctattggcgaagcggtgaaagccgtttctcgtcgcgcagataaagaaggtgccgcctctttttatgttgtcgacacttctgattttggtaacagcggtaactggcgtgtggtcgctgacctctataaagccgatgctgaaaaagcagaagaaacaagtaatcgcgtaattaacggtgttgtcgaactgccgaaagatcaggctgttctgattgaaccgtttgacacggtcaccgtccagggcttctatcgtagccagccagaagtcaatgatgccatcaccaaagcggcaaaagcgaaaggtgcctactctttctacatcgttcgtcaaatcgatgccaaccaaggcggcaaccagcgtattactgcattcatctataaaaaagatgctaagaaacgtatcgtccagagcccggatgtgatcccggcagattccgaagcaggacgtgcagctctggctgccggtggcgaagccgcgaagaaagttgagatcctaggtgttgcgactaccgcatcaccaagttctgaagtcggtcgtttctttgaaacccagtcatcaaaaggcgggcgttacaccgtcatgctcccggatggcactaaagtcgaagaactgaacaaagcgaccgcagcgatgatggtcccgttcgacagcatcaaattctctggcaactacggcaacatgaccgaagtctcctatcaggttgcgaaacgtgccgcgaagaaaggtgctaagtattaccacatcacccgccagtggcaggaacgtggtaataacctgaccgtcagcgcagatctgtataaataa

SEQ ID NO: 483595 - DNA, 1533 bp, Shigella sonnei
atgcgaattggcataccaagagaacggttaaccaatgaaacccgtgttgcagcaacgccaaaaacagtggaacagctgctgaaactgggttttaccgtcgcggtagagagcggcgcgggtcaactggcaagttttgacgataaagcgtttgtgcaagcgggcgctgaaattgtagaagggaatagcgtctggcagtcagagatcattctgaaggtcaatgcgccgttagatgatgaaattgcgttactgaatcctgggacaacgctggtgagttttatctggcctgcgcagaatccggaattaatgcaaaaacttgcggaacgtaacgtgaccgtgatggcgatggattctgtgccgcgtatctcacgcgcacaatcgctggacgcactaagctcgatggcgaacatcgccggttatcgcgccattgttgaagcggcacatgaatttgggcgcttctttaccgggcaaattactgcggccgggaaagtgccaccggcaaaagtgatggtgattggtgcgggtgttgcaggtctggccgccattggcgcagcaaacagtctcggcgcgattgtgcgtgcattcgacacccgtccggaagtgaaagaacaagttcaaagtatgggcgcggaattcctcgagctggattttaaagaggaagcgggcagcggcgatggctatgccaaagtgatgtcggacgcgttcattaaagcggaaatggaactctttgccgcccaggcaaaagaggtcgatatcattgtcaccaccgcgcttattccaggcaaaccagcgccgaagctaattacccgtgaaatggttgactccatgaaggcgggcagtgtgattgtcgacctggcagcccaaaacggtggcaactgtgaatacaccgtgccgggtgaaatcttcactacggaaaatggtgtcaaagtgattggttataccgatcttccgggccgtctgccgacgcaatcctcgcagctttacggtactaacctcgttaatctgctgaaactgttgtgcaaagagaaagacggcaatatcactgttgattttgatgatgtggtgattcgcggcgtgaccgtgatccgtgcgggcgaaattacctggccggcaccgccgattcaggtatcagctcagccgcaggcggcacaaaaagcggcaccggaagtgaaaactgaggaaaaatgtgcctgctcaccgtggcgtaaatacgcgttgatggcgctggcaatcatccttttcggttggctggcaagcgttgcgccgaaagagtttcttgggcacttcaccgttttcgcgctggcctgcgttgtcggttattacgtggtgtggaatgtatcgcacgcgctgcatacaccgttgatgtcggtcaccaacgcgatttcagggattattgttgtcggagcactgttgcagattggccagggcggctgggttagcttccttagttttatcgcggtgcttatagccagcattaatattttcggtggcttcaccgtgactcagcgcatgctgaaaatgttccgcaaaaattaa

SEQ ID NO: 483596 - DNA, 1389 bp, Shigella sonnei
atgtctggaggattagttacagctgcatacattgttgccgcgatcctgtttatcttcagtctggccggtctttcgaaacatgaaacgtctcgccagggtaacaacttcggtatcgccgggatggcgattgcgttaatcgcaaccatttttggaccggatacgggtaatgttggctggatcttgctggcgatggtcattggtggggcaattggtatccgtctggcgaagaaagttgaaatgaccgaaatgccagaactggtggcgatcctgcacagcttcgtgggtctggcggcagtgctggttggctttaacagctatctgcatcatgacgcgggaatggcaccgattctggtcaatattcacctgacggaagtgttcctcggtatcttcatcggggcggtaacgttcacgggttcggtggtggcgttcggcaaactgtgtggcaagatttcgtctaaaccgttgatgctgccaaaccgtcacaaaatgaacctggcggctctggtcgtttccttcctgctgctgattgtatttgttcgcacggacagcgtcggcctgcaagtgctggcattgctaataatgaccgccattgcgctggtattcggctggcatttagtcgcctccatcggtggtgcagatatgccagtggtggtgtcgatgctgaactcgtactccggctgggcggctgcggctgcgggctttatgctcagcaacgacctgctgattgtgaccggtgcgctggtcggttcttcgggggctatcctttcttacattatgtgtaaggcgatgaaccgttcctttatcagcgttattgcgggtggtttcggcaccgacggctcttctactggcgatgatcaggaagtgggcgagcaccgcgaaatcaccgcagaagagacagcggaactgctgaaaaactcccattcagtgatcattactccggggtacggcatggcagtcgcgcaggcgcaatatcctgtcgctgaaattaccgagaaactgcgcgctcgtggtatcaacgtgcgtttcggtatccacccggttgcggggcgtttgcctggacatatgaacgtattgctggctgaagcaaaagtaccgtatgacatcgtgctggaaatggacgagatcaacgatgactttgctgataccgataccgtactggtgattggtgctaacgatacggttaacccggcggcgcaggatgatccgaagagtcctattgctggtatgcctgtgctggaagtgtggaaagcgcagaacgtgattgtctttaaacgttcgatgaacactggctatgctggtgtgcaaaacccgctgttcttcaaggaaaacacccacatgctgtttggtgacgccaaagctagcgtggatgcaatcctgaaagctctgtaa

SEQ ID NO: 483597 - DNA, 1035 bp, Shigella sonnei
atggcaaagccgatcatcacgctcaatggcctaaaaatcgtcattatgttgggaatgctggtcattattctctgcggtatccgttttgccgccgagatcatcgtgccgtttattctcgcattatttattgctgttattcttaacccgctggtgcaacacatggtccgctggcgagtgccgcgtgtactggcggtgtcgattttgatgaccatcatcgtgatggcgatggtgttgctattagcttatctgggttccgcgctcaacgagttgacgcggacgttaccgcaatatcgcaactctattatgacgccgctgcaagctcttgagccgttgttgcaacgcgtagggattgacgtctcagttgaccagctggcgcattacattgatccgaacgcggcgatgacgttgctcaccaacttattgacgcagttatctaatgccatgtcatcaatatttttattgctgctgacggtgctgtttatgctgctcgaagtgccacaattgcccggaaaatttcagcaaatgatggcgcgtccggttgaagggatggcggcgattcaacgtgcaattgacagtgtttctcattatctggtgctgaaaacagccatcagcatcatcaccggcctggtcgcctgggcgatgctcgccgcactcgatgttcgcttcgcttttgtctggggattgctggcctttgcgcttaattacatccctaatattggttcagttctcgcggcaatcccccctatcgctcaggtactggtgtttaatggcttctacgaagcgttgctggtgctggcgggatatctgctgattaatctggtcttcggcaatattctggagccgcgcatcatgggacgtgggctggggctttccacattggtggtatttttgtcgttgattttttggggatggttgttaggaccggtgggtatgctgatttccgtgccgttaacaattattgtcaaaattgcgcttgaacaaacagcgggaggtcaaagcatcgccgttctgttaagcgatctcaataaagagtga

SEQ ID NO: 483598 - DNA, 366 bp, Shigella sonnei; identical to SEQ ID NO: 458388

SEQ ID NO: 483599 - DNA, 330 bp, Shigella sonnei; identical to SEQ ID NO: 261370

SEQ ID NO: 483600 - DNA, 822 bp, Shigella sonnei
atgcgtacaaccattgctgtagtgttgggtgcaattagtttgacgtctgcttttgtgtttgcagataaaccagacgttgccaaatcggcaaacgatgaggtcagcaccctgttttttggtcatgatgatcgtgtgccagtgaatgacacgacccaatcaccgtgggatgcggttgggcaactggaaacggccagcggcaatttatgtacggcgacgctgattgcacccaatctggcattaacggcaggacactgtttattgacacctccaaagggtaaagccgataaagcagtggcgctgcgttttgtgtcaaataaaggtctttggcgctatgagatccacgacatagaaggccgcgttgatccgacactgggaaagcggttaaaagcagatggggatggttggattgtacctcccgcagccgcgccgtgggacttcggattgattgtgctacgtaatcccccttctggcattacaccgttgccgttatttgagggagataaagccgcgcttactgccgcattaaaatcggctggccgtaaagtaactcaggcgggataccctgaagatcatctcgatacgttgtacagtcatcaaaactgtgaagtgactggctgggcgcaaacgtcggtgatgtcacatcagtgcgataccttgccgggtgacagcggttcgcctctgatgttgcataccaatgacggctggcaattaattggggtgcaaagttcggctcctgccgcgaaagatcgctggcgcgccgataaccgggccatttctgttaccggttttcgcgacaagctggatcaactgtcgcaaaaataa

SEQ ID NO: 483601 - DNA, 273 bp, Shigella sonnei
atgggtctgtcttctgccgcctttgctgcagagactgcgaccacacctgctccgactgcgacgaccaccaaagcagcgccggcgaaaacgacacatcataaaaaacagcataaagcagcacctgcccagaaagcgcaggcggctaaaaagcatcataaaaatacgaaagctgaacagaaagcccctgaacaaaaagcgcaggcagcgaagaaacacgccgggaaacacagccatcagcaaccggcaaaacctgctgcacaacccgcagcgtaa

SEQ ID NO: 483602 - DNA, 861 bp, Shigella sonnei
atggcacagattgatttccgaaaaaaaataaactggcatcgtcgttaccgttcaccgcagggcgttaaaaccgaacatgagatcctgcggatcttcgagagcgatcgcgggcgtatcatcaactctccggcaattcgtcgtctgcaacaaaagacccaggtttttccactggagcgcaatgccgccgtgcgcacgcgtcttacccactcgatggaagtccagcaggtgggacgctacatcgccaaagaaattttaagccgtctgaaagagcttaaattgctggaagcatacggcctggatgaactgaccggcccctttgaaagcattgttgagatgtcatgcctgatgcacgatatcggcaatccgccgtttggtcattttggcgaagcagcgataaatgactggtttcgccaacgtttgcacccggaagatgccgaaagccagcctctgactgacgatcgctgcagcgtggcggcactacgtttacgggacggggaagaacagcttaacgagctgcggcgcaagattcgtcaggacttatgtcattttgaggggaatgcacaaggcattcgtctggtgcatacattgatgcggatgaatctcacttgggcacaggttggcggtattttaaaatatacccgtccggcgtggtggcgtggcgaaacgcctgagacacatcactatttaatgaaaaagccgggttattatctttctgaagaagcctatattgcccggttgcgtaaagaacttaatttggcgctttacagtcgttttccattaacgtggattatggaagctgccgacgacatctcctattgtgtggcagaccttgaaggtgatgctgccaacttactgatttag

SEQ ID NO: 483603 - DNA, 699 bp, Shigella sonnei; identical to SEQ ID NO: 470598

SEQ ID NO: 483604 - DNA, 801 bp, Shigella sonnei
atggctaagtcactgttcagggcgctggtcgccctgtcttttcttgcgccactgtggctcaacgccgcgccgcgcgtcatcacgctttctcccgccaacactgaacttgcctttgccgccgggatcacgccggttggggtcagcagctattccgactatcctccacaagcgcaaaagattgagcaggtttccacctggcaggggatgaatctggaacgcattgtcgcgctgaaacccgatctggtgattgcctggcgtggaggtaatgccgagcggcaggttgaccagctggcttcgctgggaataaaagtgatgtgggtcgatgcgacaagcattgaacaaattgccaatgcgttacgtcaattggccccctggagtccgcaaccggataaggccgaacaagccgcgcaatccctgctggatcagtacgcgcaattgaaagcgcaatatgctgataaacctaaaaaacgtgtttttctgcaattcggcattaatccgccatttaccagtggaaaagagtcgattcaaaaccaggtactcgaagtttgtggcggagaaaacatctttaaagacagccgggttccctggccgcaagttagccgcgaacaggtgttagcacgctcgccacaggcgattgtcattacaggcggaccggaccaaattcctaaaatcaaacaatactggggtgaacagctcaaaattcccgttattcctctcacgagtgactggtttgaacgtgcaagcccacgtattatcctcgctgcacaacagctctgtaatgcgctttcacaggtagattag

SEQ ID NO: 483605 - DNA, 624 bp, Shigella sonnei
atgctcgtctattggctggatatagtcggcacagcggtatttgccatctccggcgttttgttagccggaaaattgcgtatggacccttttggtgttctggtactgggcgtggttaccgctgtaggcggcgggacaattcgcgacatggcgctggatcacggcccggtattttgggtgaaagatcccaccgatctggtcgttgcaatggtaaccagcatgctgaccatcgtgctggtgcgccagccaagacgcttaccaaaatggatgttgccggtgctggacgccgttggtctggcggtgtttgtcggcattggcgtgaataaagcctttaatgcggaagtcggtccgttaatcgcggtttgtatggtcgtcattactggcgttggcggcgggatcattcgtgatgtactggcccgcgagatccccatgattttacgtacagaaatctacgcaactgcctgtattatcggcggtattgtccacgctacggcttattacacattttccgtaccactggaaacagccagtatgatgggcatggtcgtgacgctattgattcggctggcggctattcgttggcatcttaagctaccgacgtttgcgctggatgagaatgggcgttga

SEQ ID NO: 483606 - DNA, 345 bp, Shigella sonnei
atgagtgatgacgtagcactgccgctggagtttaccgacgcagcagccaacaaagttaaaagcctgatcgctgacgaagataacccgaatctgaaattacgcgtgtatatcaccggtggcggttgcagcggcttccagtatggtttcacctttgatgatcaggtgaacgaaggcgatatgaccatcgaaaaacagggcgttggcttggtggttgatccgatgagcctgcaatatctggtcggcggttccgttgactataccgaaggactggaaggttctcgtttcatcgtgaccaacccgaacgcgaaaagcacctgcggttgcggttcttcctttagcatctaa

SEQ ID NO: 483607 - DNA, 1422 bp, Shigella sonnei
atgaaaactgatactccctctttagaaacaccgcaggccgcgcgcctgcgacgcagacaactgattcgccaacttcttgagcgcgataaaaccccgttagccattttgtttatggcggcagtcgtcggcacgcttgttgggctggcagcggttgcttttgacaaaggtgtcgcctggttgcagaaccaacgtatgggggcgctggtacatactgctgataattatccgcttctgttaaccgtcgcttttctctgttcggcggtgctggcgatgtttggctactttttggtgcgcaaatacgcgccggaagcaggtggttcggggatcccggaaattgaaggggcgctggaagatcaacgtcccgttcgctggtggcgtgtattgccggtgaagttctttggcgggctggggacactcggcggaggcatggtgttggggcgcgaagggccaaccgtgcagatcggcggtaacattggccgtatggtgcttgatattttccgcctgaaaggtgacgaagctcgccatacgctgctggcaaccggtgctgctgcggggctggctgcggcctttaacgcgccgctggcgggtattttgtttattatcgaagagatgcgtccgcagtttcgctatacgttaatttcgataaaagcggtatttattggcgtcattatgtcgaccattatgtaccggatttttaatcatgaagttgcgttgattgacgtcggtaaactttctgatgcgccgcttaatacgctgtggctttatctgatcctcggtattatttttggcattttcggccctatttttaataaatgggtgctggggatgcaggatttgctgcaccgtgtgcacggcggcaatattaccaaatgggtactgatgggcggtgcgattggcggtctgtgtggattgctggggtttgtggcaccagcaacgtcgggcggcggttttaacctgattcctatcgctaccgcggggaatttcagcatgggaatgctggtgtttatcttcgtcgctcgggtcattaccaccttactctgcttctcttccggcgcgccgggcggtatttttgccccgatgctggcgctgggtactgtgctgggaaccgctttcggaatggttgccgttgagctgtttccgcaatatcaccttgaggcggggacgtttgctattgccggaatgggggcattactggcggcatctattcgcgcgccgttaacggggatcattctggttctggagatgaccgataactaccagctcattttgccaatgattattaccggtcttggcgcaacactattagcgcaatttaccggcgggaaaccgctatactcggcgattcttgcgcgcacgctggcaaaacaggaagctgagcaactggcgcgaagcaaggccgcatcagccagcgagaatacttga

SEQ ID NO: 483608 - DNA, 1281 bp, Shigella sonnei
atgagtaagtctgaaaatctttacagcgcagcgcgcgagctgatccctggcggtgtgaactcccctgttcgcgcctttactggcgtgggcggcactccactgtttatcgaaaaagcggacggcgcttatctgtacgatgttgatggcaaagcctatatcgattatgtcggttcctgggggccgatggtgctgggccataaccatccggcaatccgcaatgccgtgattgaagccgccgagcgtggtttaagctttggtgcaccaaccgaaatggaagtgaaaatggcgcaactggtgaccgaattggtcccgaccatggatatggtgcgcatggtgaactccggcaccgaggcgacgatgagcgccatccgtctggcccgtggttttaccggtcgcgacaaaatcattaaatttgaagggtgttaccacggtcacgctgactgcctgctggtgaaagccggttctggcgcactcacgttaggccagccaaactcgccgggcgttccggcagatttcgccaaacataccttaacctgtacttataacgatctggcttctgtacgcgccgcgtttgagcaatacccgcaagagattgcctgtattatcatcgagccggtggcaggcaatatgaactgtgttccaccgctgccagacttcctgccaggtctgcgtgcgctgtgcgacgaatttggcgcattgctgatcatcgatgaagtaatgaccggcttccgcgtggcactggctggcgcacaggattattacggtgtggaaccggatctcacctgcctgggcaaaatcatcggcggtggaatgccggtaggcgcattcggtggtcgtcgtgatgtaatggatgcgctggccccgacgggtccggtctatcaggcgggtacgctttccggtaacccaattgcgatggcagccggtttcgcctgtctgaatgaagtcgcgcaaccgggcgttcacgaaacgttggatgagctgacaacacgtctggcagaaggtctgctggaagcggcagaagaagccggaattccgctggtcgttaaccacgttggcggcatgttcggtattttctttaccgacgccgagtccgtgacgtgctatcaggatgtgatggcctgtgacgtggaacgctttaagcgtttcttccatatgatgctggacgaaggtgtttacctggcaccgtcagcgtttgaagcgggctttatgtccgtggcgcacagcatggaagatatcaataacaccatcgatgctgcacgtcgggtgtttgcgaagttgtga

SEQ ID NO: 483609 - DNA, 1983 bp, Shigella sonnei
gtgagtaaacgaattgcgctttttccggcgttattgctggcgctgttagtgattgtcgctacggcgctcacctggatgaacttctcgcaggcgctgccgcgtagccagtgggcgcaggctgcctggtcgccagacatcgatgtcatcgagcagatgatttttcactacagcttgttgccgcgtctggcgatttcgctgctggtgggcgcgggcctggggctggtgggcgtgctgtttcagcaagtgctgcgtaacccgctggcggagccgacgacgcttggcgttgctacaggcgcgcaactgggaattaccgtcaccacactttgggcgatcccaggtgctatggcgagccagtttgccgcactggtgggcgcttgtgtcgttggcttaatcgtctttggcgtcgcgtgggggaaacggctttcgccggttacgcttattctcgcggggctggtggtgagcctttattgcggggcaattaatcagctactggttatcttccatcacgaccagctgcaaagcatgttcctgtggagcaccggaacgctgacgcaaaccgactggggcggcgttgagcgtttatggccgcagttgctgggcggcgtgatgttgacgttattgctacttcgcccgttaaccctgatggggcttgatgatggcgtggcgcgcaatctcgggctggccttgtcgctcgcgcgtctggcggcgctgtcgctggcgatagtcatcagtgcgctgctggtgaatgcggtggggattatcggctttatcggtttgttcgcgccgctgctggcgaaaatgctgggggcgcggcgtttgttgccacggttgatgctggcgtcgctgattggggcgctgatcctctggctttccgatcaaatcatcctctggctgactcgcgtgtggatggaagtgtccaccggttcggtcactgcgttgatcggtgcgccgctgctactgtggctgttgccgcgtttacgcagcattagcgcgccggatatgaaggtcaacgatcgtgtcgcggctgaacgccaacatgtgctggcgtttgccctcgcgggcggcgtgctgctgttgatggctgtggtggtggcgctgtcgtttggtcgtgatgcgcacggctggacgtgggcgagcggggcgttgctcgaggatttgatgccctggcgctggccgcgaattatggcggcgctgtttgcgggcgtcatgctggcggtggcgggctgtattattcagcggctgaccggaaacccgatggcaagcccggaagtgctggggattagctctggcgcggcgtttggcgtggtgttaatgctgtttctggtgccgggtaatgcctttggctggctgttacccgcgggcagtatcggggcggcggtgacgctgttgatcattatgatcgccgccggccgcggtggattttccccacaccgtatgttactggcggggatggcgttaagtaccgcattcaccatgcttttgatgatgttgcaggcgagcggtgacccgcgaatggcgcaagtgctgacctggatttccggttcgacctacaacgcgaccgatgcgcaggtctggcgtaccggaattgtgatggtgattttgctggcgattaccccgctgtaccgccgctggctgaccattttaccgctgggtggtgataccgcacgagccgtaggaatggcgctgacgccgacgcgaattgcgctgctgctgttagcggcttgcctgacggcgaccgcgacgatgactattggaccgttgagttttgttggtttaatggcaccgcatattgcgcggatgatgggctttcgacggacgatgccacacatcgtaatttcggcgctggtgggtggtttactgctggtattcgctgactggtgtgggcggatggtgctgtttccattccagatcccggcggggctgctgtcgacctttatcggcgcgccatattttatctatttgctgagaaagcagagccgttaa

SEQ ID NO: 483610 - DNA, 891 bp, Shigella sonnei
atgagcggcttacctcttatttcgcgccgtcgactgttaacggcgatggcgctttctccgttgttatggcagatgaataccgcccacgcggcggctattgaccccaatcgtattgtggcgctggagtggttgccggtggaattactgctggcgctcggcatcgtgccttacggcgtggcggataccatcaactatcgcctgtgggtcagcgaaccaccattgccggactcagtgattgacgtcggtttgcgtacagaacctaaccttgaactgctgaccgaaatgaaaccgtcgtttatggtctggtcggcaggatatggcccttcatcagaaatgctggcacgtattgcgccgggtcgcggatttaacttcagtgacggcaaacagccgttggcgatggcgcgtaaatcgctgacggaaatggcagatttacttaacctgcaaagcgcagcggaaacgcatttagcgcaatacgaagactttatccgcagcatgaaaccccgctttgtgaagcgtggtgcacgcccgttactgctgacgacgcttatcgatccgcgccatatgctggtcttcggtccaaacagcttgttccaggaaattctcgatgagtacggcatcccaaatgcctggcaaggggaaaccaacttctggggcagtaccgccgtcagtatcgatcgtctggcagcgtataaagacgttgatgtgctctgttttgatcacgacaacagcaaagacatggatgcgctaatggcaaccccgctgtggcaggccatgccgtttgtccgcgccggacgctttcagcgcgtacctgcagtctggttttatggtgcgacactctcggcaatgcactttgtgcgcgttctggataacgccatcggaggtaaagcgtga

SEQ ID NO: 483611 - DNA, 798 bp, Shigella sonnei
atgcaggaatacacgaatcattccgataccacttttgcactgcgtaatatctcctttcgtgtgcccgggcgcacgcttttgcatccgctgtcgttaacctttcctgccgggaaagtgaccggtctgattggtcacaacggttctggtaaatccactctgctcaaaatgcttggtcgtcatcagcctccgtcagaaggggagattcttcttgatgcccagccgctggaaagctggagcagcaaagcgtttgcccgcaaagtggcttatttgccgcagcagcttcctccggcagaagggatgaccgtgcgtgaactggtggcgattggtcgttacccgtggcatggcgcgctggggcgctttggtgcggcagatcgcgaaaaggtcgaggaagctatctcgctggttggcttaaaaccgctggcgcatcggctggtcgatagtctctctggcggcgaacgtcagcgggcgtggatcgccatgctggtggcgcaggatagccgttgtctgttgctcgacgaaccgacttcggcgctggatatcgcccaccaggttgatgtgctggcgctggtgcaccgtttaagtcaggaacgtggcctgacggtcattgccgtgttgcacgatatcaatatggcggcacgctactgtgattatctggtcgccctgcgcagtggtgaaatgattgctcagggaacgcctgcggaaattatgcgcggcgaaaccctcgaaatgatttatggcatcccgatgggtattttgccgcatccggcgggtgctgcacctgtgagttttgtttattga

SEQ ID NO: 483612 - DNA, 2190 bp, Shigella sonnei
atggcgcgttccaaaactgctcagccaaaacactcactgcgtaaaatcgcagttgtagtagccacagcggttagcggcatgtctgtttatgcacaggcagcggttgaaccgaaagaagacactatcaccgttaccgctgcacctgcgccgcaagaaagcgcatgggggcctgctgcaactattgcggcgaagcactctgctactgcgactaaaacggatacaccaattgaaaaaacgccgcagtctatttcggttgtgacaaatgaagagatgcagatgcgtcaatttcagtctgtaaaagaagcattaggttatacacctggcgttacggttagtagtcgtggtgcttctaatacatatgattttgttatcattcgtggtttctcatctgttggtctgaatcaaaataattaccttgatggactaaaacttcagggcaacttttataacgatgctgtgattgatccttacatgctcgagagggttgaactgatgcgtgggccgacgtctgttctctatggaaaaagtaatcctggtgggattatttctatggtgagtaagcgtccgaccactgaacccctgaaagaaattcagtttaaaatggggacggataatctgtttcagaccggattcgatttcagtgatgcactggatgataacggtgagttctcttaccgtttgacgggcctcgctcgctcaacaaacgaacagcagaaaaactctgaatctcagcgttataccattgctccatcattctcatggcgtccagacgacaaaaccaattttactttcctgtcctatttccagaatgaaccagaaacgggttattacggttggttgccgaaagaggggaccgttgagccattgcctaatggtaagcgtctaccgactgacttcaatgaaggtgcatcgaataatacatactcccgtaaccagaaaatggtgggatatagttttgaacatggttttaatgacaccttcaccgtgcgtcagaatctgcgtttcagtgaaatgaaaacctcacagaaaagtgtttatggcacagggattgctggtgatggtcataccctaaaccgcgggacagtggtggataatgagcgtctacaaaactttagcgttgatacccaacttgaaagtaagtttgctacaggtgacgtcgagcatactttgctgacaggggtagacttcatgcggatgcgtaatgatatcaatgccagctttggatccgcaccatccatcgatctttataacaaatatcaccctgaatactttgcatttggtagcgcagagccataccagatgaatgaaagcaaacaaacaggtatttatgttcaggatcaggcggaatggaataaatgggtattcactctggggggacgctacgattggtctaagcaagcgaccactgttcgtgaaaactcttatacgccgactgaaggttatattgagcgcaatgatcatcagttcacctggcgcggtggtgtaaattacttattcgataatggtatttcaccttactttagctatagccagtcctttgaaccgagtgctttcgatctgtggagcaacccgcgcatttcctataagccatcgaaaggtgaacagtatgaagctggcgtaaaatatgttccgaatgatatgccggtcgttgttacgggcgcagtctatcaattgacgaaaacaaataacctgacagcagacccaacaaacccattagcgcaagtcccagcaggtgagattcgcgctcgtggtgtggaacttgaagcaaaagcggcgttaaatgccaatattaacttgacggcttcttatacctacaccgatgcggaatacaccaaagacaccaatctcaaaggtaaaactccagaacaagtaccggagcatatggcatctctctggggggattataccttcaatgaagggccgctttctggtttaacattgggaacaggtggtcgttttattggttccagctatggtgatccggcaaacacttttaaagtgggtagcacagctgtaatggatgctgttgtaaaatatgatctggcacgctttggtatggcgggatccagccttgctgtgaacgtcaacaatttgctcgatcgtgagtatgttgccagttgcttccagacttatggctgcttctggggcgcagaacgtcaggtcgttgcaaccgcaaccttccgtttctaa

SEQ ID NO: 483613 - DNA, 2535 bp, Shigella sonnei
atggccgggaatgaccgcgagccaattggacgcaaagggaaaccgacgcgtccggtcaaacaaaaggtaagccgtcgtcgttacgaagatgacgatgattacgacgattatgatgactatgaggatgaagaaccgatgccgcgcaaaggtaagggcaaaggcaaagggcgtaagcctcgtggcaaacgcggctggctatggctgctgttaaaactggctatcgtttttgccgtgctgatcgccatttacggcgtttatctcgatcaaaaaattcgtagccgtattgatggcaaggtctggcaactgcccgcggcagtttatggccgaatggtcaaccttgaaccagatatgaccatcagcaagaacgaaatggtgaagctgctggaggcaacacagtatcgtcaggtgtcgaaaatgacccgtcctggcgaatttaccgtgcaggccaacagcattgagatgatccgccgtccgtttgatttcccggacagcaaagaagggcaggtgcgtgcgcgtctgacctttgatggcgatcatctggcgacgatcgtcaatatggagaacaaccgtcagttcggtttcttccgtcttgatccgcgcctgatcaccatgatctcttcgccaaacggtgagcagcgtctgtttgtgccgcgcagtggtttcccggacttgctggtggatactttgctggcgacagaagaccgtcatttctacgagcatgatgggatcagtctctactccatcggacgtgcggtgctggcaaacctgaccgccggacgcacggtgcagggagcgagtacgctgacgcaacagctggtgaaaaacctgttcctctccagcgagcgttcttactggcgtaaagcgaacgaagcttacatggcgctgatcatggacgcgcgttacagcaaagaccgtattcttgagctgtatatgaacgaggtgtatctcggtcagagcggcgacaacgaaatccgcggcttcccgcttgcgagcttgtattactttggtcgcccggtagaagagctcagcctcgaccagcaggcgctgttagtcggtatggtgaaaggggcgtccatctacaacccgtggcgtaacccgaaactggcgctggagcgacgtaatctggtgctgcgtttgctacaacaacagcagattatcgatggtgaactgtatgaaatgctcagcgcgcgtcctctgggcgtacagccgcgcggtggggtaatctctccacagccagcctttatgcaactggtgcgtcaggagctgcaggcgaaattaggcgataaggtaaaagatctctccggcgtgaagatcttcactacctttgactcggtggcccaggacgcggcagaaaaagccgccgtggaaggcattccggcactgaagaaacagcgtaagttgagcgatcttgaaactgcaattgtggtcgtcgaccgctttagtggtgaagttcgtgcgatggtgggaggttctgagccgcagtttgcgggctacaaccgtgcgatgcaggcgcgtcgttcgattggttcccttgcaaaaccagcgacttatctgacggctttaagccagccgaaaatctatcgcctgaacacgtggattgccgatgcgccaatcgcgctgcgtcagccgaatggccaggtctggtcaccgcagaacgatgaccgtcgttatagcgaaagcggcagagtgatgctggtggatgcgttgacccgttcgatgaacgtgccgacggtaaatctggggatggcgctggggctgcctgcagttacggagacctggatcaaactgggcgtgccgaaagatcagctgcatccggttccggcgatgctgctgggggcgttgaacttaacgccaatcgaagtggcgcaggcattccagaccatcgccagcggcggtaaccgtgcaccgctttctgcactgcgttcggtaatcgcggaagatggcaaggtgctgtatcagagcttcccgcaggcagaacgcgctgttccggcgcaggcggcgtatctgacactatggaccatgcagcaggtggtacaacgtggtacgggtcgtcaacttggggcgaaatacccgaacctgcatctggcagggaaaacagggactaccaacaataacgtagatacctggtttgcgggcattgacggcagcacggtgaccatcacctgggtaggccgtgataacaaccagccgaccaaactgtatggtgccagcggggcaatgtctatttatcagcgttatctggctaaccagacgccaacgccgctgaatcttgttccgccagaagatattgcagatatgggcgtggactacgacggcaactttgtttgcagcggtggcatgcgtgtcttgccggtctggaccagcgatccgcaatcgctgtgccagcagagcgagatgcagcagcagccgtcaggcaatccgtttgatcagtcttctcagccgcagcaacagccgcaacagcaacctgctcagcaagagcagaaagacagcgacggtgtagccggttggatcaaggatatgtttggtagtaattaa

SEQ ID NO: 483614 - DNA, 2430 bp, Shigella sonnei
gtgtcgtcgttgcccgttgctgccgtcttacctgaattacttaccgctctcgattgtgcgccgcaggtattattaagtgcgccgaccggggccgggaaatcaacctggctgccgctgcaactgctggcgcatcccggcattaacgggaaaattatcctgctggagccgcgtcgtctggcggcacgtaacgtcgcgcaacggctggcggagctgcttaacgaaaagccaggcgataccgttggctaccggatgcgtgcgcaaaactgcgtcgggccaaatacccgtctggaagtagttaccgaaggcgtgctgacgcggatgatccagcgtgacccggagttgagcggtgttggattggtgatccttgatgaatttcatgagcgcagcttgcaggcggatttggcgttggcgctgttactcgatgtgcaacaaggtctgcgtgatgaccttaaactgctgattatgtcggctacgctggataacgaccgcttgcagcaaatgctgccagaagcgcccgtcgtcatctcagaagggcgctcgtttccggttgaacgccattatttaccgctgcccgcgcatcagcgttttgacgaagccgttgcggtagccaccgccgaaatgctgcgtcaggaaagcggatcattactgttatttttacctggcgtcggagaaattcagcgtgtgcaggaacaactggcttcgcgcatcggcagtgatgtgttgctctgcccgctgtatggcgcgttgtcgctgaacgatcagcgaaaagcgatcctcccggcaccgcaagggatgcgcaaagtggtgctggcgaccaatattgctgaaaccagtttaaccattgaaggtattcgtctggtggtggattgtgcccaggagcgtgtggcgcgttttgagccgcgcacggggcttacgcgactgattactcaacgcgttagccaggcatccatgacgcagcgtgccgggcgcgccgggcgtctggagccgggtatctgcctgcatttaatcgccaaagaacaagcagaacgcgctgccgcgcaaagtgaaccggagatcttacaaagcgatctttccggtttgctgatggaattactgcaatggggatgcagcgatccggcgcagatgagctggctggatcaaccgccagtagtgaatctaatggccgcgaaacgtctgttacaaatgctgggggcgctggacggtgaacggcttagtgcgcaagggcaaaaaatggcagcgctgggtaacgatccgcgtttagcggcaatgctggttagcgcgaagaacgacgacgaagctgctaccgcggcaaaaattgccgccattctcgaagagccgccactgatgggcaatagtgacctgggcgtggcgttttcgcgcaatcaaccagcctggcagcaacgtagtcagcaactgttaaaacgcttaaacgtacgcggcggtgaggcagacagttcgcttatcgcgccgctacttgccggggcgtttgccgatcgcattgctcatcgccgtgggcaagatggacgctatcaactggcaaacggcatgggagcgatgctcgatgccgacgacgcgctaagccgccacgaatggttgatcgcaccgttattattgcagggcagcgcctcgccggatgcgcggattttactggcgctaccggtcgatattgatgaattagtacaacgctgtccgcagctggtgcagcaatctgacaccgtggaatgggatgacgcgcaaggtacgctgaaagcctggcgtcggctacaaatcggtcagttgacggtgaaagtgcagccgctggcgaaaccgtcagaagacgagttgcatcaggcgatgcttaatggcatccgtgataaaggtttaagcgtgctcaactggacggcggaagcggaacagctacgcttgcgtttgttatgcgccgcaaagtggttgccggaatatgactggccagcggttgatgatgaaagtttattggcagcgctggaaacgtggctgctgccacatatgacaggcgtacattcactacgcggcctgaaatcactggacatttatcaggcactacgcggattacttgattggggaatgcagcaacgtctggatagtgaattgcctgcgcattacactgtgccgacgggaagccggatcgccattcgttatcatgaagataacccgcccgcactggcggtgagaatgcaggagatgtttggtgaggccactaatccgactatcgcccaggggggcgtgccgctggtgctggagttgctttcacccgcccaaaggccactacaaatcacacgagatttgagcgccttctggaaaggagcgtaccgtgaggtgcaaaaagagatgaaagggcgttatcccaaacacgtctggccggacgacccggcaaacacggcaccgacgcgacggacgaaaaagtattcgtaa

SEQ ID NO: 483615 - DNA, 531 bp, Shigella sonnei
atgtctgaaccgcaacgtctgttctttgctatcgacttacctgcagaaatccgcgaacagattatccactggcgcgccacacacttcccacctgaggcgggacgtccggtcgccgccgataatttgcatctgactctggcatttttaggcgaagtgagcgccgagaaagagaaggcgctttctcttttagccggacggattcgtcaacctggtttcacactcacgcttgatgacgccggacaatggctgcgttcgcgtgtggtgtggttagggatgcgtcagccgccacgcggcttaatccagctggcgaatatgctccgttcacaggctgcccgcagcggttgttttcaaagcaatcgtccgtttcatccacatattaccttattgcgcgacgccagcgaggcggtgacaatcccgccgccaggttttaactggtcttatgcggtgacggagttcaccctttacgcctcctcgtttgcccgtggacgcacacgctacacgccgctaaaacgctgggcgctaacgcaataa

SEQ ID NO: 483616 - DNA, 705 bp, Shigella sonnei
atggaattctctccccctctacagcgcgcgacgctaattcagcgttacaaacgttttttagccgatgtgatcacacccgatggtcgcgaattaacgctacactgcccgaatacgggtgcgatgaccggttgtgcaacgcgtggcgataccgtctggtattcgacttcagacaacaccaaacggaaatacccacacacctgggaactaactcaaagccagagcggcgcatttatttgcgtcaatacgctttgggctaacaggttgacgaaagaggctatccttaatgaatcaatttcagaactgtcaggctatagctcgctgaaaagcgaagtaaaatacggcgcagaacgcagccgtattgactttatgttgcaggcggattcgcgtccagactgctatattgaagtgaaatcggttacgttagcggagaacgaacagggatattttcccgatgcggtcactgaacgaggtcagaaacaccttcgggagttgatgaacgtagcggctgaaggccagcgtgcggttatctttttcgccgtgctgcattcagccattacacggttttcacccgcgcgccacatcgatgagaaatacgcgcaactattgtcagaagctcaacagaggggggtagaaattctggcttacaaagcggaaatttctgctgaaggcatggctcttaaaaaatcactgtcggttacattgtag

SEQ ID NO: 483617 - DNA, 456 bp, Shigella sonnei; identical to SEQ ID NO: 457759

SEQ ID NO: 483618 - DNA, 927 bp, Shigella sonnei
atgctcccgccttattttttgttcaaagagatgacagacacacagtatattggccgcttcgccccctctccttccggcgagcttcattttggctctctgatcgccgcgctcggcagctatttgcaggctcgcgcccggcaaggtcgctggctggtacgcatagaagatatcgacccgcctcgtgaagttcccggtgccgcagaaactatcctgcgccagctggaacattacggtctgcactgggacggcgatgttctctggcaatcgcaacgtcacgacgcctatcgtgaagcactcgcctggttacatgaacaaggactaagttattactgcacctgtacgcgtgcgcgtattcaaagcattggcggtatttacgacggtcattgccgggtgttgcatcatggaccagacaatgccgcagtgcgtatccgccagcagcatccggtcacgcaatttactgaccagctgcgcggcattattcacgccgacgaaaaactggcacgggaagattttatcattcatcgccgtgatgggttgttcgcctacaacctggctgttgtggttgatgatcatttccagggcgttacagaaatagtgcgtggggctgatctgattgaaccaacagtaaggcaaatctcgctgtaccagctttttggctggaaagtgccagattacattcatctgccgctggcgcttaatccacaaggcgctaaactttccaagcagaatcatgcgcctgcgttgccgaaaggcgatccacgtccggtactaatcgcggcacttcaatttctgggtcagcaggcagaagcacactggcaggatttcagcgtcgaacaaatccttcagtcagcagtcaaaaactggacgctgaccgccgtgcccgagtcggcaattgtaaattcaacattctcaaatgcgtcatgctga

SEQ ID NO: 483619 - DNA, 1365 bp, Shigella sonnei
gtgctaagccgcgaggaaagcgaggctgaacaggcagtcgcccgtccacaggtgacggtgatcccgcgtgagcagcatgctatttcccgcaaagatatcagtgaaaatgccctgaaggtaatgtacaggctcaacaaagcgggatacgaagcctggctggttggcggcggcgtgcgcgacctgttacttggcaaaaagccgaaagattttgacgtaaccactaacgccacgcctgagcaggtgcgcaaactgttccgtaactgccgcctggtgggtcgccgtttccgtctggctcatgtaatgtttggcccggagattatcgaagttgcgaccttccgtggacaccacgaaggtaacgtcagcgaccgcacgacctcccaacgcgggcaaaacggcatgttgctgcgcgacaacattttcggctccatcgaagaagacgcccagcgccgcgatttcactatcaacagcctctattacagcgtagcggattttaccgtccgtgattacgttggcggtatgaaggatctgaaggacggcgttatccgtctgattggtaacccggaaacgcgctaccgtgaagatccggtacggatgctgcgcgcggtacgttttgccgccaaattgggtatgcgcatcagcccggaaaccgcagaaccgatccctcgcctcgctaccctgctgaacgatatcccaccggcacgcctgtttgaagaatcgcttaaactgctacaagcgggctacggttacgaaacctataagctgttgtgtgaatatcatctgttccagccgctgttcccgaccattacccgctacttcacggaaaatggcgacagcccgatggagcggatcattgaacaggtgctgaagaataccgatacgcgtatccataacgatatgcgcgtgaacccggcgttcttgtttgccgccatgttctggtacccactgctggagacggcacagaagatcgcccaggaaagcggcctgacctatcacgacgctttcgcgctggcgatgaacgacgtgctggacgaagcctgccgttcactggcaatcccgaaacgcctgacgacgttaacccgcgatatctggcagttgcagttgcgtatgtcccgacgtcagggtaaacgcgcatggaaactgctggagcatcctaagttccgtgcggcttatgacctgttggccttgcgagctgaagttgaacgtaacgctgaactgcagcgtctggtgaaatggtggggtgagttccaggtttccgcgccaccagatcaaaaagggatgcttaacgagttggatgaagagccgtcaccgcgtcgccgtactcgtcgtccacgcaaacgcgcaccgcgtcgtgagggtaccgcatga

SEQ ID NO: 483620 - DNA, 480 bp, Shigella sonnei
atgacagtggcgtatattgccataggcagcaatctggcctctccgctggagcaggtcaatgctgccctgaaagcattaggcgatatccctgaaagccacattcttgccgtttcttcgttttaccgcactccaccgctggggccgcaagatcaacccgattacctcaacgccgccgtggcgcttgaaacttcgctcgccccggaagagttactcaaccatacacagcgcatagaactgcaacagggtcgtgttcgtaaagctgaacgctggggaccacgcacgctggatctcgatatcatgctgtttggtaatgaagtgataaataccgaacgcctgaccgttccgcactacgatatgaagaatcgtggatttatgctgtggccgctgtttgagattgcaccggagctggcgtttcctgatggggagacgttgcgtgaagtcttacatacaagagcatttgacgaattaagcaaatggtaa

SEQ ID NO: 483621 - DNA, 585 bp, Shigella sonnei
atgtctaaaaaattaggttttgccctgtctggtcttatgctggcaatggttgcaggtactgcttctgctgatatggatggtggtcagttaaatatcagtggtctggttgttgataacacctgtgaaacccgcgttgacggcggtaataaagatggtctgatcctgctgcaaactgcaactgttggtgaaatcgatgctggcgtgctgaatgacaccgttggcgctaaagccaaacctttcagcatcaccgttgactgcagcaaagcaaatccgaatccaggtagtacagctaaaatgaccttcggttctgttttctttggtaatagcaaaggaacgctgaacaacgacatgtctattaacaacccgtctgacggcgtgaatatcgctctgcacaatattgatggttccactatcaaacaggttcaaattaacaaccctggcgatgtgtatactaaagccctggatgcaacgacaaaatctgctgtttatgattttaaagcgtcttacgttcgtgccgtcgcagaccaaacagcaactgctggttatgtaaaaactaacactgcatacaccattacttatcagtaa

SEQ ID NO: 483622 - DNA, 741 bp, Shigella sonnei
atgttttttaacaccaaacatacaacagctttatgcttcgtaacctgtatggcttttagttcatcgtctattgcggacattgtcatttcgggtactcgcgtaatatataaaagcgatcaaaaaagtgtcaacgtacgtctggaaaataaagggaataacccgttgcttgtccagagttggttagatactggcgataacaacgctgagcctggcagtattacagtcccttttactgccacgccgccagtatcgcgtattgatgccaaacgtgggcaaacaatcaaattaatgtacacagccagcacctcactgcctaaagacagagagagcgtgttctggtttaacgtactggaagttccaccaaaaccagatgcagaaaaggtcgcgaatcaaagtctgctgcaactggcatttcgcacacgtataaaacttttctatcgcccggatggattgaagggaaatccctctgaagccccgttagccctgaagtggttctggtcaggttcagaaggtaaggcgtcattgcgagtgaccaatccaaccccttactacgtctcttttagcagtggtgatttagaagctagcggtaaacgctatccgattgatgtgaaaatgattgcaccatttagtgatgaggtcatgaaagtcactggccttaatggcaaagcaagttctgcaaaagtacatttttacgccattaatgattttggtggcgccattgaaggtaatgccagtctgtaa

SEQ ID NO: 483623 - DNA, 318 bp, Shigella sonnei; identical to SEQ ID NO: 461617

SEQ ID NO: 483624 - DNA, 912 bp, Shigella sonnei
ttgcagtttcatataaattctcccgatataaataacgaaaaagccgttctgcttgccagggatgaaacactcggcaattgccttaatttgacggaaattatccctcaggcttctgttcgttatgacgttaacgagcaacgtctggatatagacgttcctcaggcatgggtaatgaaaaattaccaaaactatgttgatccatcgttatgggaaaatggcattaatgcggccatgttgtcatacaacctcaacggatatcatagtgaaactcctggtcgaagaaatgacagcatttatgctgcttttaacggtgggatgaatttaggtgcatggcgactgcgtgcctcaggcaactacaactggatgaccgattctggcagtaattatgattttaagaatcggtatatacagcgtgatatcgcctcgctgcgttctcaactcattcttggtgagtcttatacaacgggcgaaacctttgattctgtcagtatccgcggcattcgtttatacagcgacagccgcatgttgcctccgacattagcgagttttgcgcctatcattcatggcgttgctaataccaacgccaaagtcactattacgcaaggtggctataagatttatgaaacgactgtgccgccaggcgctttcgtcattgatgatctgagtccgtcaggttacggcagcgatcttattgttactgtcgaagaatccgatggctcaaagcggacattctcgcaacctttttcatcggtcgttcaaatgttacgccctggcgttggacgttgggatattagcggcggccaggtcttaaaagatgatattcaggatgagcctaatttatttcaggccagctactactacggtctgaataactatctaacgggtggtgatgctgccaacttactgatttag

SEQ ID NO: 483625 - DNA, 498 bp, Shigella sonnei
atgtcacaccccgcgttaacgcaactgcgtgcgctgcgctattttaaagagatccctgccctggattcgcaactgctcgactggctgttgctggaagattccatgacaaaacgttttgaacagcagggaaaaacggtgagcgtgacgatgatccgcgaagggtttgtcgagcagaatgaaatccccgaagaactgccgctgctgccgaaagagtctcgttactggttacgtgaaattttgttatgtgccgatggtgaaccgtggcttgccggtcgtaccgtcgttcctgtgtcaacgttaagcgggccggagctggcgttacaaaaattgggtaaaacgccgctaggacgctatctgttcacatcatcgacattaacccgggactttattgagataggccgtgatgccggactgtgggggcgacgttcccgcctgcgattaagcggtaaaccgctgttgctaacagaactgtttttaccggcgtcaccgttgtactaa

SEQ ID NO: 483626 - DNA, 873 bp, Shigella sonnei
atggagtggagtctgacgcagaataagctgctggcgtttcatcgcttaatgcgtacggataagccaattggcgcgttactgctgctctggccaacattatgggcgttgtgggtggcgacaccgggcgttccccagctctggatcctggcggtgtttgtcgcgggtgtctggctgatgcgcgctgccggatgtgtggtgaatgattatgctgaccgcaagtttgatggtcatgttaagcgcacggcgaaccgaccgcttcccagcggcgcggtaacggagaaagaggcgcgcgcgctgtttgtagtgctggtattgatttcatttttactggtgctgacgctgaatacgatgaccattctgttgtcgattgccgctctggcgttggcgtgggtgtacccgtttatgaagcggtatacccatctcccgcaagtggtgctgggcgcggcgtttggctggtcgattccaatggcttttgccgctgtgagtgagtcggtgccattgagttgctggttaatgttcctcgccaatattctctgggcggtggcttacgacacgcagtatgcaatggttgaccgtgacgatgatgtgaagattggtattaaatccaccgcaatcctgttcggccaatacgataaattgattattggtattttgcagattggcgtactggcactgatggcgatcatcggtgagttaaatggcttaggctggggatattactggtcaattctggtggctggcgcgctgtttgtttatcaacaaaaactgattgccaaccgcgagcgtgaagcctgctttaaagcatttatgaataataactatgttggtctggtactgtttttaggactggcaatgagttactggcatttctga

SEQ ID NO: 483627 - DNA, 2424 bp, Shigella sonnei
atgtccggctggccacgaatttactacaaattactgaatttaccattaagcatcctggtaaaaagcaagtctattccggcagatcctgccccggaactggggctggatacctctcgtccaattatgtacgttttaccgtacaactcgaaagcagatttgctgacgttacgcgcccagtgtctggctcatgacttgcctgacccgttagagccgctagaaatcgacggcacgctactgccgcgctatgtgttcattcacggcgggccgcgtgtattcacctattacacgccgaaagaagagtctattaagctgttccacgactatctcgatttgcaccgtagcaacccaaatctggatgtgcagatggtgccagtatcggtgatgtttggtcgcgcgccggggcgtgaaaaaggcgaagtaaacccgccgctgcgtatgcttaacggcgtacagaaatttttcgccgtactgtggctcggtcgcgacagttttgtgcgtttctcgccgtcagtttcgctgcgccgtatggcggatgaacacggcacggataaaactatcgcacagaaactggcgcgcgtggcgcgtatgcactttgcccgtcaacgtctggctgccgtaggcccacgtctgcctgctcgtcaggatctgtttaataagctgctcgcctcccgcgccattgccaaagcggtagaagatgaagcgcgcagcaaaaaaatctcccatgaaaaagcgcagcagaacgcgattgcgctgatggaagagattgcggcgaatttctcttacgagatgatccgcctgactgaccgcattctgggcttcacctggaaccgactttatcagggcatcaacgtccataacgccgagcgcgttcgccagctggcccacgacggtcatgagctggtgtatgtgccttgccaccgcagtcacatggactacctgctactttcttacgtgctgtaccaccaggggctggtgccgccgcatatcgccgccgggatcaacctgaacttctggccggccgggccgattttccgccgtctgggggcgttctttattcgccgtacttttaaaggcaataaactttattccaccgttttccgtgagtatctcggcgaactgttcagccgtggttattccgtcgagtacttcgtggaaggcggtcgttcccgcacggggcgtttgctggatccgaaaaccggtacgctgtcgatgaccattcaggcgatgctgcgtggcggcacgcgtccgattacgctgattccgatctatatcggttatgagcacgtcatggaagtgggtacttacgccaaagaactgcgcggcgcgacgaaagagaaagagagcctgccgcagatgctgcgcggtttaagcaagctgcgtaatctcggtcagggttacgtcaacttcggtgaaccaatgccgttgatgacctaccttaaccagcacgtaccagactggcgtgaatctatcgatcccatcgaagcggtgcgtccggcctggttaacgccgacggtcaataatattgctgccgatctgatggtacgcattaacaacgcaggcgcggcaaacgccatgaacctgtgttgtactgcgcttctggcatcacgtcagcgctcactcacccgcgagcagttaaccgagcaactcaactgctacctggatctgatgcgcaacgtaccttactccacggactctaccgttccttcagccagcgccagcgagcttatcgatcacgcgctgcaaatgaacaagtttgaagtcgagaaagacactatcggcgacatcatcattctgccgcgcgagcaagcggtgctgatgacctactatcgcaacaacattgcgcatatgttggtgctgccttcgctgatggcggcaattgtcacccagcatcgccacatctcccgcgacgtattgatggagcacgtcaatgtgctttacccaatgctgaaagcggagctgttcctgcgctgggatcgcgacgagttgccggacgttattgatgcgctggcaaatgagatgcaacgtcaggggctgattaccctgcaagatgatgagttgcatatcaacccggcgcattctcgccccctacagctgctggccgcaggcgcgcgcgaaacgctgcaacgttatgccatcaccttctggttgttgagtgccaacccgtcgatcaaccgcggtacgctggagaaagagagccgcaccgttgcgcaacgtctctccgtgctgcacggcatcaacgcgccggagttcttcgacaaggcggtgttcagttctctggtgctgacgctgcgtgatgaagggtatatcagcgatagcggcgacgccgaaccggcagaaacgatgaaggtttatcagttgctggcggagttgattacatcagacgtgcgtttgacgattgagagtgcgacgcagggcgaagggtaa

SEQ ID NO: 483628 - DNA, 369 bp, Shigella sonnei
atggccaataataccactggattcacccgaattatcaaagctgctggctattcctggaaaggtttacgcgctgcatggatcaacgaagcggcattccgtcaggaaggcgtagcggtattgttggcggtggtcatcgcctgctggctggatgtggacgcaattacccgcgtgctgcttatcagctccgtgatgctggtgatgattgtggaaattctcaatagcgccatcgaagcagtggttgaccgaattggctctgaataccatgagctttccggacgcgctaaagatatgggatccgccgcggtgctgattgcgattatcgtcgccgtgataacctggtgcatcctgttatggtcgcattttggataa

SEQ ID NO: 483629 - DNA, 609 bp, Shigella sonnei
atgaaagcgttaacggccaggcaacaagaggtgtttgatctcatccgtgatcacatcagccagacaggtatgccgccgacgcgtgcggaaatcgcgcagcgtttggggttccgttccccaaacgcggctgaagaacatctgaaggcgctggcacgcaaaggcgttattgaaattgtttccggcgcatcacgcgggattcgtctgttgcaggaagaggaagaagggttgccgctggtaggtcgtgtggctgccggtgaaccgcttctggcgcagcagcatattgaaggtcattatcaggtcgatccttccttgttcaagccgaatgctgatttcctgctgcgcgtcagcgggatgtcgatgaaagatatcggcattatggatggtgacttgctggcagtgcataaaactcaggatgtacgtaacggtcaggtcgttgtcgcacgtattgatgacgaagttaccgttaagcgcctgaaaaaacagggtaataaagtcgaactgttgccagaaaatagcgagtttaaaccaattgtcgttgaccttcgtcagcagagcttcaccattgaagggctggcggttggggttattcgcaacggcgactggctgtaa

SEQ ID NO: 483630 - DNA, 1326 bp, Shigella sonnei
atggcattcctcacttcatctgataaagcactctggcatctcgccttacccatgattttctccaatatcaccgttccgttgctgggactggtcgatacggcggtaattggtcatcttgatagcccggtttatttgggcggcgtggcggttggtgcaacggcgaccagctttctctttatgctgttgctgtttttacgcatgagcaccaccgggctgactgcgcaggcttatggtgccaaaaatcctcaggcattagcccgtgcgctggtgcaaccgttgctgttggcgttgggggctggggcgttaattgcgctgctgcgtacaccgattatcgatctggctctgcatattgttggcggtagtgaagcagtcctggaacaggcgcggcgctttcttgaaatccgctggttaagcgcaccggcgtcgctggcgaatctggtattactcggttggttactcggcgtgcaatatgcccgtgcgccagtaattttgttagtggtcggcaatatcctcaacattgtgctggatgtctggctagtgatggggctgcatatgaacgtgcagggcgcggctctggcgacggttattgcggaatatgcaacattgctgattggtctgctaatggtgcgtaaaatcctcaaactacgcggaatttccggcgaaatgtcgaaaactgcctggcgaggaaacttccgtcgcttgctggcgcttaaccgcgatatcatgctgcgttcgctgttgttgcaactctgtttcggcgcgatcaccgtacttggcgcgcgactggggagtgacattatcgctgtaaacgcggttctgatgacgctactcacctttaccgcctatgcgctggatggttttgcctacgcggttgaagcacattccggtcaggcatacggtgcgcgcgacggtagccagttgctggatgtctggcgggcagcgtgccgccagtcggggatcgtagcgttactattttcggtggtttatttgctggcaggggaacacatcattgcgttgctgacgtcgttaacccagattcagcagctggctgaccgctatcttatctggcaggtgattttgccgttggttggcgtctggtgttatctgctggacggcatgtttataggcgcaacgcgtgccgccgaaatgcgtaacagtatggcggtggccgccgcaggttttgcgctgacgctccttacgctgccgtggctgggtaatcatggtttgtggctggcattaaccgtctttctggcgttgcgcgggctttctctggcggctatctggcggcgtcactggcgtaacggtacctggtttgccgcaacgtga

SEQ ID NO: 483631 - DNA, 210 bp, Shigella sonnei; identical to SEQ ID NO: 460705

SEQ ID NO: 483632 - DNA, 516 bp, Shigella sonnei
atggaaaagaccacaacgcaggagttattagcgcaggctgaaaaaatctgcgcgcagcgtaatgtgcgcctgaccccacagcgcctggaagtgttgcgcctgatgagtctgcaggatggcgctatcagcgcttatgatctgcttgatttactgcgcgaagctgaaccgcaagccaagccgccaacggtttatcgcgcgctggattttctgcttgagcaaggttttgtgcataaggtggaatccaccaacagttatgtgctctgtcatctgttcgaccagcccacgcatacgtcagccatgtttatatgcgatcgctgcggcgcggtgaaagaagagtgtgcagaaggcgtggaagacattatgcatacgctggcggcaaaaatggggtttgccctgcggcataatgtgattgaagcacatgggctctgtgcggcatgcgtggaagtggaagcgtgtcgtcatcctgaacagtgccagcatgatcactctgtgcaggtgaaaaagaaaccgcgttaa

SEQ ID NO: 483633 - DNA, 255 bp, Shigella sonnei; identical to SEQ ID NO: 461537

SEQ ID NO: 483634 - DNA, 708 bp, Shigella sonnei
atgtgggtcaataagtatattgacgattgcactgatgaggatttaaacgatcgtgactttattgcatcagttgttgaccgggctatttttcatttcgcgattaatagtatatgtaatcctggggataataaagatgcgactcccattgaacaatgtacttttgatgtagaaactaagaatggccttccctccacggttcagctattttatgaggaatctaaggataatgaacctttagcgaatatacattttcaagcaataggttctggttttttaacgtttgttaatgcctgccaggaacatgatgacaacagcttaaaattatttgcttcactgttaatttcactttcatattctagtgcctacgcagatttatcagaaacagtgtatattaatgaaaataatgagagctacctgaaagctcagtttgaaaaattatctcaacgtgatatgaagaagtacctgggagagatgaagcgtctggctgatgggggagaaatgaattttgatggctatctggataagatgtcacatctggtgaatgaaggaacgctcgatcctgatattttaagcaaaatgcgagatgctgcaccacaattaattagcttcgcgaagtcgtttgacccaacctcaaaggaagagattaaaatacttacagacacttctaaattaatttatgatttgttcggggttaaatcggagaaataa

SEQ ID NO: 483635 - DNA, 1038 bp, Shigella sonnei
atgcacggtaattctgaaatgcaaaaaatcaaccaaaccagcgcaatgcctgaaaaaactgacgttcactggagtggtcggtttagcgttgcaccaatgctcgactggacggacagacattgccgctatttcttgcgtctgctttcccgcaatacgttgctgtataccgaaatggtgaccacaggggcgattattcacggtaaaggtgattacctggcgtacagtgaagaagaacatccggtagcgttgcaactcggcggtagcgatccggcggcgctggcacagtgtgcgaagctggcagaagcgcgtggatatgatgagatcaacctgaatgtcggctgcccgtctgaccgggtgcagaacggcatgtttggtgcgtgtctgatgggtaatgcgcagctggttgccgactgcgtgaaagcgatgcgcgatgtggtgtcgattccagtgacggtgaaaacgcgtattggcatcgatgaccaggacagctatgaatttctctgcgatttcatcaacaccgtttccggcaaaggcgagtgtgagatgtttatcatccacgcacgtaaagcctggctttcggggttaagcccgaaagaaaaccgtgaaatcccgccgctcgattatccgcgtgtgtatcaactgaagcgtgactttccgcatctgacaatgtcgattaacggtggtatcaagtcgctggaagaggccaaagcacacctgcaacatatggatggcgtgatggtcgggcgcgaggcgtatcagaatccgggtattctggcggcggtagaccgggagatctttggttcctcggataccgatgccgatccggtggcggtagtgcgcgccatgtatccgtacattgagcgtgaactcagccaggggacgtatctcggccatattacccggcatatgttgggcttgttccagggtattcctggcgcgcggcagtggcggcgttatttaagtgaaaatgcccataaagcgggtgcagacattaatgtgctggaacacgcgctcaaactggtggcggataagcgttaa

SEQ ID NO: 483636 - DNA, 243 bp, Shigella sonnei
atgctggaactactttttgtgattggcttttttgtcatgctgatggtcaccggcgtttcgttgctgggcattatcgccgcgctggttgtggcgacggccattatgttcctcggcggtatgctggcattgatgattaagttgctgccgtggttactactggcgattgcggtggtgtgggttattaaggcgattaaagcaccaaaagtgccgaaatatcagcgttatgaccgctggcgttactaa

SEQ ID NO: 483637 - DNA, 984 bp, Shigella sonnei
atggcaacacgaattgaatttcacaagcacggtggcccggaagtacttcaagccgtagagttcactcctgccgatccggcagagaatgaaatccaggtcgaaaataaagccatcggcatcaattttatcgacacgtatatccgcagcggcctttacccgccgccatcactacccagcggattaggtaccgaagcggcaggcatcgtgagtaaagtcggcagtggtgtaaagcatattaaggcaggcgatcgtgtagtctatgcgcagtcggcgttaggcgcttacagctctgtgcataacattaatgcggataaagcggcgattctgcctgcggcaatttcttttgagcaagctgcggcatccttcctgaaaggcttaacggtttattatctgctgcgcaaaacctatgaaattaaacccgatgaacagttcctgttccacgcagcggctggcggcgttggcttaattgcctgccagtgggcaaaagccctgggcgcgaaacttatcggcaccgtaggaaccgcgcaaaaagcgcagagcgcgctaaaagcgggcgcgtggcaggttattaactatcgtgaagaggatctggtcgagcggttaaaagagatcaccggcggtaagaaagtgcgcgtggtgtacgattccgtgggcagagacacctgggaacggtcgctggattgcctgcaacgccgcggcttaatggtcagttttggcaactcatcaggtgcggttaccggtgtgaacttaggcattctcaatcaaaaaggctcgttgtatgtgacacgcccttccctgcaaggctatatcaccacgcgggaggaattaaccgaggccagtaatgaactgttctctttgattgccagcggtgtgattaaggtcgatgtcgccgagcagcagaaatatccgctgaaggatgcgcagcgtgcgcatgagattctggaaagccgggcgacgcaaggttccagcctgttgattccataa

SEQ ID NO: 483638 - DNA, 1416 bp, Shigella sonnei
atggcaggaaataaacccttcaacaaacagcaggctgaaccccgcgaacgcgatccacaagttgccgggctgaaagtgcctccgcactcgatcgaagcggagcagtcggtgttgggcggtttaatgctggataacgaacgctgggacgatgtagccgagcgtgtggtggcagacgatttttacacccgcccacaccgccatatctttactgaaatggcgcgtttgcaggaaagcggtagtcctatcgatctgattacccttgcggaatcgctggaacgccaggggcaactcgatagcgtcggtggttttgcttatctggcagagctgtcaaaaaatacgccaagtgcggcgaacatcagtgcttatgctgacatcgtgcgtgaacgtgccgttgtccgtgagatgatctcggttgcgaatgagattgctgaagccggttttgatccgcaggggcgtaccagcgaagatctgctggaccttgctgaatcccgcgtctttaaaattgccgaaagtcgtgcaaacaaagacgaagggccgaagaacatcgccgatgtgctcgacgcaaccgtggcgcgtattgagcagttgtttcagcagccacacgatggcgttaccggagtaaacaccggttatgacgatctcaacaaaaaaaccgctggcttgcagccgtcggatttgatcatcgtcgccgcgcgtccgtcgatgggtaaaacaacatttgcgatgaacctcgtcgaaaacgcggcgatgttgcaggataaaccagtacttatcttctcgctggagatgccttcagaacagattatgatgcgttctctggcgtcgctgtcgcgcgttgaccagactaaaatccgtaccgggcagctcgatgatgaagactgggcgcgcatttccggcaccatgggtattttgctcgaaaaacgcaatatctatatcgatgactcctccggcctgacgccaacggaagtgcgttcccgcgcacgccgtattgcccgtgaacacggcggcatcgggcttatcatgatcgactacctgcaactgatgcgcgtaccggcgctttccgataaccgtacgctggaaattgcagaaatctctcgctcgctgaaagcactggcgaaagaactgaacgtgccggtggtggcgctgtcccagttgaaccgttctctggaacaacgtgccgacaaacgcccggtcaactccgacctgcgtgaatctggctctatcgagcaggatgcggacttgattatgtttatctatcgtgatgaggtgtatcacgaaaacagtgatttaaaaggcatcgcggaaattattatcggtaaacaacgtaacggcccaatcgggacggtacgcctgacctttaacggtcaatggtcgcgcttcgacaactatgcggggccgcagtacgacgacgaataa

SEQ ID NO: 483639 - DNA, 1080 bp, Shigella sonnei
atgcaagcggcaactgttgtgattaaccgccgcgctctgcgacacaacctgcaacgtcttcgtgaactggcccctgccagtaaaatggttgcggtggtgaaagcgaacgcttatggtcacggtcttcttgagaccgcgcgaacgctccccgatgctgacgcctttggcgtagcccgtctcgaagaagctctgcgactgcgtgcggggggaatcaccaaacctgtactgttactcgaaggcttttttgatgccagagatctgccgacgatttctgcgcaacattttcataccgccgtgcataacgaagaacagctggctgcgctggaagaggctagcctggacgagccggttaccgtctggatgaaactcgataccggtatgcaccgtctgggcgtaaggccggaacaggctgaggcgttttatcatcgcctgacacagtgcaaaaacgttcgtcagccggtgaatatcgtcagccattttgcgcgcgcggatgaaccaaaatgtggcgcaaccgagaaacaactcgctatctttaataccttttgcgaaggcaaacctggtcaacgttccattgccgcgtcgggtggcattctgctgtggccacaatcgcattttgactgggtgcgcccgggcatcattctttatggcgtctcgccgctggaagatcgctccatcggtgccgattttggctgtcagccagtgatgtcactaacctccagcctgattgccgtgcgtgagcataaagccggagagcctgttggttatggtggaacctgggtaagcgaacgtgatacccgtcttggcgtagtcgcgatgggctatggcgatggttatccgcgcgccgctccatccggtacgccagtgctggtgaacggtcgcgaagtaccgattgtcggacgcgtggcgatggatatgatctgcgtagacttaggtccacaggcgcaggacaaagccggggatccggtcattttatggggcgaaggtttgcccgtagaacgtatcgctgaaatgacaaaagtgagcgcttacgaacttattacgcgcctgacttcaagggtcgcgatgaaatacgtggattaa

SEQ ID NO: 483640 - DNA, 1194 bp, Shigella sonnei
gtgtttcaaaaagttgacgcctacgctggcgacccgattcttacgcttatggagcgttttaaagaagaccctcgcagcgacaaagtgaatttaagtatcggtctgtactacaacgaagacggaattattccacaactgaaagccgtggcggaggcggaagcgcgcctgaatgcgcagccccatggcgcttcgctttatttaccgatggaagggcttaacagctatcgccatgccattgcgccgctgctgtttggtgcggaccatccggtactgcaacaacagcgcgtagcaaccattcaaacccttggcggctcaggggcattgaaagtgggcgcggatttcctgaaacgctacttcccggaatcaggcgtctgggtcagcgatcctacctgggaaaaccacgtagcaatattcgccggggctggattcgaagtgagtacttacccctggtatgacgaagcgactaacagcgtgcgctttaatgacctgttggcgacgctgaaaacattacctgcccgcagtattgtgttgctgcatccatgttgccacaacccaacgggtgccgatctcactaatgatcagtgggatgcggtgattgaaattctcaaagcccgcgagcttatcccattcctcgatattgcctatcaaggatttagtgccggtatggaagaggatgcctacgctattcgcgccattgccagcgctggattacccgctctggtgagcaattcgttctcgaaaattttctccctttacggcgagcgcgtcggcggactttctgttctgtgtgaagatgccgaagccgctggccgcgtactggggcaattgaaagcaacagttcgccgcaactactccagcccgccgaattttggtgcgcaggtggtggctgcagtgctgaatgacgaggcattgaaagccagctggctggcggaagtagaagagatgcgtactcgcattctggcaatgcgtcaggaattggtgaaggtattaagcacagagatgccagaacgcaatttcgattatctgcttaatcagcgcggcatgttcagttataccggtttaagtgccgctcaggttgaccgactacgtgaagaatttggtgtctatctcatcgccagcggtcgcatgtgtgtcgccgggttaaatacggcaaatgtacaacgtgtggcaaaggcgtttgctgcggtgatgtaa

SEQ ID NO: 483641 - DNA, 504 bp, Shigella sonnei
atgaatatatcatatgtgaatagcaacaaaacgacatctttacctgttgagctagatgcactaaataataaagacatctcttatgccaaagatttttcttatgctaaagatttctttttatacatagaaacacagttaaaaattgcaaaagatttttgtagacctggagaagaagtatcaagttctattgcaagtaaagtttttcacgcatttatcgatttagttaacaaaatcaggggtaagaaagactttatgtatatttgcacgctttgctgttttgccgaggaggttaaaggtgattattctcattacaggacctttttatttgatattggtaatcaatataaggttaaacttacacaaagcggaaaaaaagagttctctttaacattagaatttaacgatactataattgaatctcagaaagtcacaggcaataaggcaaagtatattcttgaggatatagaaatattctatcgtaacaaacccgatacttattattaa

SEQ ID NO: 483642 - DNA, 714 bp, Shigella sonnei; identical to SEQ ID NO: 471546

SEQ ID NO: 483643 - DNA, 417 bp, Shigella sonnei
atgtggtatcaaaagacgctcacgcttagcgccaaatctcgtgggtttcatctggtaacggatgaaattctgaatcagctggctgatatgccgcgcgttaacatcggcttactgcatctgttgctgcaacatacctccgcctctctgacacttaatgagaactgcgatcccaccgtacgccacgacatggagcgttttttcctccgcaccgttcccgacaacggaaattatgagcatgactatgagggagcagacgatatgccttctcatatcaaatcctcaatgctgggaacatcgcttgtattgccgttacataaagggcgtattcagaccggcacctggcaaggcatctggctggggaaacatcgcatccacggcggatcgcgtcgcatcatcgcgacactacaaggggagtaa

SEQ ID NO: 483644 - DNA, 357 bp, Shigella sonnei
atgaccatttcggagttgctacaatattgcatggcaaaaccaggcgcagaacagagcgtgcataacgactggaaagcgacgcagatcaaagtggaagatgtactgtttgcgatggtgaaagaagtagaaaatcgcccagctgtttcgctgaaaaccagcccggagctggcggagctgctacgtcagcagcacagcgatgtgcgtcctagccgccatctgaataaagcgcactggagcaccgtgtatctcgacggttcgctgccggattcgcaaatctattatctggtggatgcgtcttatcagcaggcagtgaatttactaccggaagaaaagcgtaaattgctggtacaactctga

SEQ ID NO: 483645 - DNA, 2823 bp, Shigella sonnei
atggataagatcgaagttcggggcgcccgcacccataatctcaaaaacatcaacctcgttatcccccgcgacaagctcattgtcgtgaccgggctttcgggttctggcaaatcctcgctcgctttcgacaccttatatgccgaagggcagcgccgttacgttgaatccctttccgcctacgcgcggcagtttctgtcactgatggaaaagccggacgtcgatcatattgaggggctttctcctgccatctcaattgagcagaaatcgacgtctcataacccgcgttctacggtggggacaatcaccgaaatccacgactatttgcgtttgttgttcgcccgcgtcggcgaaccgcgctgtccggaccacgacgtcccgctggcggcgcaaaccgtcagccagatggtggataacgtgctgtcgcagccggaaggcaagcgtctgatgctgctcgcgccaatcattaaagagcgcaaaggcgaacacaccaaaacgctggagaacctggcaagccagggttacatccgtgctcgtattgatggcgaagtctgcgatctttccgatccgccgaaactggaactgcaaaagaaacacactattgaagtggtggttgatcgcttcaaggtgcgtgacgatcttacccaacgtcttgcggagtcgtttgaaaccgcgctggagctttccggtggtacagcggtagtggcggatatggacgacccgaaagcggaagagctgctgttctccgccaacttcgcctgcccaatttgcggctacagtatgcgtgaactggagccgcgactgttttcgtttaacaacccggcaggtgcctgcccgacctgtgacggccttggcgtacagcaatatttcgatcctgaccgcgtgatccaaaaccccgagctgtcactggctggcggtgcgatccgtggctgggatcgccgcaacttctattatttccagatgctgaaatcgctggcagatcactataagttcgacgtcgaagcgccgtggggcagcctgagcgcgaacgtgcataaagtggtgttgtacggttctggcaaagaaaacattgaattcaaatacatgaacgatcgtggcgatacctccattcgtcgtcatccgttcgaaggcgtgctgcacaatatggagcgccgttataaagagacggaatccagtgcggtacgtgaagaattagccaagtttatcagcaatcgcccatgcgccagctgcgaaggaacgcgtctgcgtcgggaagcgcgccacgtgtatgtcgagaatacgccgctgcctgctatctccgacatgagcatcggtcatgcgatggaattcttcaacaatctcaaactcgcaggtcagcgggcgaagattgcagaaaaaatccttaaagagatcggcgatcgtctgaaattcctcgttaacgtcggcctgaattacctgacactttcccgctcggcagaaacactttccggcggtgaagcccagcgtatccgtctggcgagccagattggtgcgggcctggttggcgttatgtatgtactggacgagccgtctatcggcctgcaccagcgcgataacgagcgcctgttgggtacgcttatccatctgcgcgatctcggtaataccgtgattgtggtggagcatgacgaagacgcaattcgcgccgctgaccatgtgatcgatatcggtcctggtgcgggtgttcacggcggtgaagtggtcgcagaaggtccgctggaagcgattatggcggtgcctgaatcgttgaccgggcagtacatgagcggtaaacgcaagattgaagtgccgaagaaacgcgttccggcgaatccagaaaaagtgctgaagctgacaggtgcacgcggcaacaacctgaaggacgtgacgctcacgctgccagtcggtctgtttacctgcatcacaggggtttcaggttccggtaaatcgacgctgattaacgacacactgttcccgattgcccaacgccagttgaatggtgcgaccatcgccgaaccggcaccgtatcgcgatattcaggggctggagcatttcgataaagtgatcgatatcgaccaaagcccaattggtcgtactccacgttctaacccggcgacctataccggcgtgtttacacctgtgcgcgaactgtttgcgggcgtaccggaatcccgtgcgcgtggttatacgccaggacgtttcagctttaacgtccgtggcgggcgctgcgaagcctgtcagggcgacggtgtgatcaaagtggagatgcacttcctgccggatatctacgtgccgtgcgatcagtgcaaaggtaaacgctataaccgtgaaacgctggaaattaagtacaaaggcaaaaccatccacgaagtgctggatatgaccatcgaagaggcgcgtgagttctttgatgcggtgccagctctggcgcgtaagctgcaaacgttgatggacgttggtctgacgtacattcgcctggggcagtccgcaaccacactttctggtggtgaagcccagcgcgtgaagctggcgcgtgagctgtcaaaacgcggcaccgggcagacgctgtatattctcgacgagccgaccaccggtctgcacttcgccgatattcagcaactcctcgacgtgctgcataaactgcgcgatcagggcaataccattgtggtgattgagcacaatctcgacgtgatcaaaaccgctgactggattgtcgacctgggaccagaaggcggcagtggcggcggcgaaatcctcgtctccggtacgccagaaaccgtcgcggagtgcgaagcttcgcatacggcacgcttcctcaagccgatgctgtaa

SEQ ID NO: 483646 - DNA, 537 bp, Shigella sonnei
atggccagcagaggcgtaaacaaggttattctcgttggtaatctgggtcaggacccggaagtacgctacatgccaaatggtggcgcagttgccaacattacgctggctacttccgaatcctggcgtgataaagcgaccggcgagatgaaagaacagactgaatggcaccgcgttgtgctgttcggcaaactggcagaagtggccagcgaatatctgcgtaaaggttctcaggtttatatcgaaggtcagctgcgtacccgtaaatggaccgatcaatccggtcaggatcgctacaccacagaagtcgtggtgaacgttggcggcaccatgcagatgctgggtggtcgtcagggtggtggcgctccggcaggtggtaatatcggtggtggtcagccgcagggcggttggggtcagcctcagcagccgcagggtggcaatcagttcagcggcggcgcgcagtctcgcccgcagcagtccgctccggcagcgccgtctaacgagccgccgatggactttgatgatgacattccgttctga

SEQ ID NO: 483647 - DNA, 1587 bp, Shigella sonnei
atgagtcatcgtgcacgacaccaattactggcgttgccgggcattatctttttagttctctttcccatcattctttcgctatggattgccttcctttgggcaaaatcagaagtgaataatcagctccgaacctttgctcaactggcactggataaatccgagctggtcattcgccaggcagatttagtgagcgatgcagctgaacgctatcaggggcaagtttgcactccagcccatcaaaagcgaatgttgaatattattcgtggctatctttatattaatgaattgatctatgcccgtgataaccattttttatgctcatcgctgatagcgcctgtaaacggctatacgattgcaccggccgattataagcgtgaacctaacgtttctatctattattaccgcgatacgccttttttctctggctataaaatgacctatatgcagcggggaaattatgtggcggttatcaaccctctcttctggagtgaagtgatgtctgatgacccgacattgcaatggggtgtgtatgatacggtgacgaaaacctttttctcgttaagcaaagaggcctcggcagcaacgttttctccgctgattcatttgaaggatttaaccgtacaaagaaatggctatttatatgcgacagtttattcgacaaaacgcccaattgcagccattgttgcgacttcatatcaacgtcttataacccatttttataatcatcttatttttgcgttgcccgccggtattttggggagtcttgttctgctattactctggctacgtattcgacaaaactatttatctcccaaacgtaaattgcaacgcgccctcgaaaaacatcaactttgtctttattaccagccaataatcgatatcaaaacagaaaaatgtatcggcgctgaagcgttgttacgttggcttggtgagcaggggcaaataatgaatccggcagagtttattccgctggcagaaaaggaggggatgatagaacagataactgattatgttattgataatgtcttccgcgatctgggcgcgtacttggcaacacatgccgatcgctatgtttctattaacctgtcggcctccgattttcatacgtcacggttgatagcgcgaatcaatcagaaaacagagcaatacgcggtgcgtccgcagcaaattaaatttgaagtgactgagcatgcatttcttgatgtcgaaaaaatgacgccgattattctggctttccgccaggctggttacgaagtggcaattgatgattttggtattggctactctaacttgcataaccttaaatcattgaatgtcgatattttgaaaatcgataaatcgtttgttgaaacgctgaccacccacaaaaccagtcatttgattgcggaacacatcatcgagctggcgcacagcctggggttaaaaacgatcgctgaaggcgtcgaaactgaggagcaggttaactggctgcgcaaacgcggcgtgcgctattgccagggatggttttttgcgaaggcgatgccgccgcaggtgtttatgcaatggatggagcaattacccgcgcgggagttaacgcgcgggcaataa

SEQ ID NO: 483648 - DNA, 324 bp, Shigella sonnei
atgtcccatcagaaaattattcaggatcttatcgcatggattgacgagcatattgaccagccgcttaacattgatgtagtcgcaaaaaaatcaggctattcaaagtggtacttgcaacgaatgttccgcacggtgacgcatcagacgcttggcgattacattcgccaacgtcgcctgttactggccgccgttgagttgcgcaccaccgagcgtccgatttttgatatcgcaatggacctgggttatatctcgcagcagaccttctcccgcgttttccgtcggcagtttgatcgcactcccagcgattatcgccaccgcctgtag

SEQ ID NO: 483649 - DNA, 417 bp, Shigella sonnei
ttgcctgttgtggtcgttcgcgtcggtgaggctagcgttgatgtcctcgtaggtcagcaaacgtggacgctgacacataaatggtttgagtcggtatggacgggtgattatcttctgttgtggaaaatgtcgccggaaggggagagtaccattacgcgtgatagcagcgaggaagagattctctggctggaaacgatgttaaaccgtgcattgcatatttcgacagaaccttcggcggagtggcgtcccttgttggtagaaaaaataaagcaatttcaaaaaagccaccacttgaaaactgacggtgttgttggcttttcaacgttagtacatctctggcaggtggcaggggagagtgcctacttatatcgggatgaagcaaatatttccccggaaacaacagtgaaggggaaatga

SEQ ID NO: 483650 - DNA, 420 bp, Shigella sonnei
atgtttgaattctatatcgccgcgcgtgagcagaaagaaacaggtcaccctggtatcttctcccgacaaaaacacagcaccataatatatgtcatttgtttattgctgatttgcctgtggtttgcaggaatggtgttggttggtgggtatgccaggcagctatgggcgctttggatagtaaaagcagaagtcactgtagaggctgaaacgcccgcttttaaacaatcaacacaacactatttcttcaaaaaacagccactccccgtcgtcgaatccgtcgaggaggaagatgacccagacgtcgcggttgagaatgctccctcttcttctgaagacgaagaaaatactgtaaaagaaagcgacgagaaagccggtttaagagagcgtgtcaaaaatgcgctgaacgaacttgagagataa

SEQ ID NO: 483651 - DNA, 312 bp, Shigella sonnei; identical to SEQ ID NO: 458795

SEQ ID NO: 483652 - DNA, 630 bp, Shigella sonnei
atgattggtttagtcggtaaaaaagtgggtatgacccgtatcttcacagaagacggcgtttctatcccagtaaccgtaatcgaagttgaagcaaaccgcgttactcaggttaaagacctggctaacgatggctaccgtgctattcaggtgaccaccggtgctaaaaaagctaaccgtgtgaccaagcctgaagctggccacttcgctaaagctggcgtagaagctggccgtggtctgtgggaattccgcctggctgaaggcgaagagttcactgtaggtcagagcattagcgttgaactgtttgctgaggttaaaaaagttgacgtaactggcacctctaaaggtaaaggtttcgcaggtaccgttaagcgctggaacttccgtacccaggacgctactcacggtaactccttgtctcaccgcgttccgggttctatcggtcagaaccagactccgggcaaagtgttcaaaggcaagaaaatggcaggtcagatgggtaacgaacgtgtaaccgttcagagccttgacgtagtacgcgttgacgctgagcgcaacctgctgctggttaaaggtgctgtcccgggtgcaaccggtagcgacctgatcgttaaaccagctgtgaaggcgtaa

SEQ ID NO: 483653 - DNA, 606 bp, Shigella sonnei; identical to SEQ ID NO: 458797

SEQ ID NO: 483654 - DNA, 303 bp, Shigella sonnei; identical to SEQ ID NO: 4257

SEQ ID NO: 483655 - DNA, 822 bp, Shigella sonnei; identical to SEQ ID NO: 4256

SEQ ID NO: 483656 - DNA, 279 bp, Shigella sonnei
atgccacgttctctcaagaaaggtccttttattgacctgcacttgctgaagaaggtagagaaagcggtggaaagcggagacaagaagcccctgcgcacttggtcccgtcgttcaacgatctttcctaacatgatcggtttgaccatcgctgtccataatggtcgtcagcacgttccggtatttgtgaccgacgaaatggtcggtcacaaactgggtgaattcgcaccgactcgtacttatcgcggccacgctgctgataaaaaagcgaagaagaaataa

SEQ ID NO: 483657 - DNA, 333 bp, Shigella sonnei; identical to SEQ ID NO: 4254

SEQ ID NO: 483658 - DNA, 702 bp, Shigella sonnei
atgggtcagaaagtacatcctaatggtattcgcttgggtattgtaaaaccatggaactctacctggtttgcgaacaccaaagaattcgctgacaacctggacagcgattttaaagtacgtcagtacctgactaaggaactggctaaagcgtctgtatctcgtatcgttatcgagcgtccggctaagagcatccgtgtaaccattcacactgctcgcccgggtatcgttatcggtaaaaaaggtgaagacgtagaaaaactgcgtaaggtcgtagcggacatcgctggcgttcctgcacagatcaacatcgccgaagttcgtaagcctgaactggacgcaaaactggttgctgacagcatcacttctcagctggaacgtcgcgttatgttccgtcgtgctatgaagcgtgctgtacagaacgcaatgcgtctgggcgctaaaggtattaaagttgaagttagcggccgtctgggcggcgcggaaatcgcacgtaccgaatggtaccgcgaaggtcgcgtaccgctgcacactctgcgtgctgacatcgactacaacacctctgaagcgcacaccacttacggtgtaatcggcgttaaagtgtggatcttcaaaggcgagatcctgggtggtatggctgctgttgaacaaccggaaaaaccggctgctcagcctaaaaagcagcagcgtaaaggccgtaaataa

SEQ ID NO: 483659 - DNA, 411 bp, Shigella sonnei; identical to SEQ ID NO: 458803

SEQ ID NO: 483660 - DNA, 192 bp, Shigella sonnei; identical to SEQ ID NO: 4251

SEQ ID NO: 483661 - DNA, 255 bp, Shigella sonnei; identical to SEQ ID NO: 4250

SEQ ID NO: 483662 - DNA, 372 bp, Shigella sonnei; identical to SEQ ID NO: 4249

SEQ ID NO: 483663 - DNA, 315 bp, Shigella sonnei; identical to SEQ ID NO: 458807

SEQ ID NO: 483664 - DNA, 540 bp, Shigella sonnei
atggcgaaactgcatgattactacaaagacgaagtagttaaaaaactcatgactgagtttaactacaattctgtcatgcaagtccctcgggtcgagaagatcaccctgaacatgggtgttggtgaagcgatcgctgacaaaaaactgctggataacgcagcagcagacctggcagcaatctccggtcaaaaaccgctgatcaccaaagcacgcaaatctgttgcaggcttcaaaatccgtcagggctatccgatcggctgtaaagtaactctgcgtggcgaacgcatgtgggagttctttgagcgcctgatcactattgctgtacctcgtattcgtgacttccgtggcctgtccgctaagtctttcgacggtcgtggtaactacagcatgggtgtccgtgagcagatcatcttcccagaaatcgactacgataaagtcgaccgcgttcgtggtttggatattaccattaccactactgcgaaatctgacgaagaaggccgcgctctgctggctgcctttgacttcccgttccgcaagtaa

SEQ ID NO: 483665 - DNA, 306 bp, Shigella sonnei
atggctaagcaatcaatgaaagcacgcgaagtaaaacgcgtagctttagctgataaatacttcgcgaaacgcgctgaactgaaagcgatcatctctgatgtgaacgcttccgacgaagatcgttggaacgctgttctcaagctgcagactctgccgcgtgattccagcccgtctcgtcagcgtaaccgctgccgtcaaacaggtcgcccgcatggtttcctgcggaagttcgggttgagccgtattaaggtccgtgaagccgctatgcgcggtgaaatcccgggtctgaaaaaggctagctggtaa

SEQ ID NO: 483666 - DNA, 393 bp, Shigella sonnei; identical to SEQ ID NO: 4245

SEQ ID NO: 483667 - DNA, 534 bp, Shigella sonnei
atgtctcgtgttgctaaagcaccggtcgttgttcctgccggcgttgacgtaaaaatcaacggtcaggttattacgatcaaaggtaaaaacggcgagctgactcgtactctcaacgatgctgttgaagttaaacatgcagataataccctgaccttcggtccgcgtgatggttacgcagacggttgggcacaggctggtaccgcgcgtgccctgctgaactcaatggttatcggtgttaccgaaggcttcactaagaagctgcagctggttggtgtaggttaccgtgcagcggttaaaggcaatgtgattaacctgtctctgggtttctctcatcctgttgaccatcagctgcctgcgggtatcactgctgaatgtccgactcagactgaaatcgtgctgaaaggcgttgataagcaggtgatcggccaggttgcagcggatctgcgcgcctaccgtcgtcctgagccttataaaggcaagggtgttcgttacgccgacgaagtcgtgcgtaccaaagaggctaagaagaagtaa

SEQ ID NO: 483668 - DNA, 354 bp, Shigella sonnei
atggataagaaatttgctcgtatccgtcgtgcgacccgcgcacgccgcaagctccaggagctgggcgcaactcgcctggtggtacatcgtaccccgcgtcacatttacgcacaggtaattgcaccgaacggttctgaagttctggtagctgcttctactgtagaaaaagctatcgctgaacaactgaagtacaccggtaacaaagacgcggctgcagctgtgggtaaagctgtcgctgaacgcgctctggaaaaaggcatcaaagatgtatcctttgaccgttccgggttccaatatcatggtcgtgtccaggcactggcagatgctgcccgtgaagctggccttcagttctaa

SEQ ID NO: 483669 - DNA, 504 bp, Shigella sonnei; identical to SEQ ID NO: 458813

SEQ ID NO: 483670 - DNA, 180 bp, Shigella sonnei; identical to SEQ ID NO: 4241

SEQ ID NO: 483671 - DNA, 435 bp, Shigella sonnei
atgcgtttaaatactctgtctccggccgaaggctccaaaaaggcgggtaaacgcctgggtcgtggtatcggttctggcctcggtaaaaccggtggtcgtggtcacaaaggtcagaagtctcgttctggcggtggcgtacgtcgcggtttcgagggtggtcagatgcctctgtaccgtcgtctgccgaaattcggcttcacttctcgtaaagcagcgattacagccgaagttcgtctgtctgacctggctaaagtagaaggcggtgttgtagacctgaacacgctgaaagcggctaacattatcggtatccagatcgagttcgcgaaagtgatcctggctggcgaagtaacgactccggtaactgttcgtggcctgcgtgttactaaaggcgctcgtgctgctatcgaagctgctggcggtaaaatcgaggaataa

SEQ ID NO: 483672 - DNA, 1332 bp, Shigella sonnei
atggctaaacaaccgggattagattttcaaagtgccaaaggtggcttaggcgagctgaaacgcagactgctgtttgttatcggtgcgctgattgtgttccgtattggctcttttattccgatccctggtattgatgccgctgtacttgccaaactgcttgagcaacagcgaggcaccatcattgagatgtttaacatgttctctggtggtgctctcagccgtgcttctatctttgctctggggatcatgccgtatatttcggcgtcgatcattatccagctgctgacggtggttcacccaacgttggcggaaattaagaaagaaggggagtctggtcgtcgtaagatcagccagtacacccgctacggtactctggtgctggcaatattccagtcgatcggtattgctactggtctgccgaatatgcctggtatgcaaggcctggtgattaacccgggctttgcattctacttcaccgctgttgtaagtctggtcacaggaacgatgttcctgatgtggttgggcgaacagattactgaacgaggtatcggcaacggtatttcaatcattatcttcgtcggtattgtcgcgggactcccgccagccattgcccatactatcgagcaagcgcgtcaaggcgacctgcacttcctcgtgttgctgttggttgcagtattagtatttgcagtgacgttctttgttgtatttgttgagcgtggtcaacgccgcattgtggtaaactacgcgaaacgtcagcaaggtcgtcgtgtttatgctgcacagagcacacatttaccgctgaaagtgaatatggcggggggaatcccggcaatcttcgcttccagtattattctgttcccggcgaccatcgcgtcatggttcgggggcggtactggttggaactggctgacaacaatttcgctgtatttgcagcctgggcaaccgctttatgtgttactctatgcgtctgcaatcatcttcttctgtttcttctacacggcgttggttttcaacccgcgtgaaacagcagataacctgaagaagtccggtgcatttgtaccaggaattcgtccgggagagcaaacggcgaagtatatcgataaagtaatgacccgcctgaccctggttggtgcgctgtatattacctttatctgcctgatcccggagttcatgcgtgatgcaatgaaagtaccgttctacttcggtgggacctcactgcttatcgttgttgtcgtgattatggactttatggctcaagtgcaaactctgatgatgtccagtcagtatgagtctgcattgaagaaggcgaacctgaaaggctacggccgataa

SEQ ID NO: 483673 - DNA, 357 bp, Shigella sonnei; identical to SEQ ID NO: 4238

SEQ ID NO: 483674 - DNA, 390 bp, Shigella sonnei; identical to SEQ ID NO: 458818

SEQ ID NO: 483675 - DNA, 621 bp, Shigella sonnei; identical to SEQ ID NO: 4236

SEQ ID NO: 483676 - DNA, 990 bp, Shigella sonnei; identical to SEQ ID NO: 4235

SEQ ID NO: 483677 - DNA, 384 bp, Shigella sonnei
atgcgccatcgtaagagtggtcgtcaactgaaccgcaacagcagccatcgccaggctatgttccgcaatatggcaggttcactggttcgtcatgaaatcatcaagacgactctgcctaaagcgaaagagctgcgccgcgtagttgagccgctgattactcttgccaagactgatagcgttgctaatcgtcgtctggcatttgcccgtactcgtgataacgagatcgtggcaaaactgtttaacgaactgggcccgcgtttcgcgagccgtgccggtggttacactcgtattctgaagtgtggcttccgtgcaggcgacaacgcgccgatggcttacatcgagctggttgatcgttcagagaaagcagaagctgctgcagagtaa

SEQ ID NO: 483678 - DNA, 369 bp, Shigella sonnei
atgtggttacttgaccagtgggcagagcgccatatagcagaagcgcaagcgaaaggtgagtttgataacctggcaggtagcggcgaaccattgatactggatgatgattctcacgtgccaccggaattacgtgcggggtatcgcttgctgaagaatgccggttgcttaccgccagaacttgagcaacggagagaagcaattcagcttctggatattctcaaaggtatccgtcacgatgatccgcaatatcaagaggttagccgtcgattgtcattactggaattgaagctgcgacaagctggattgagtaccgattttttacgcggcgattatgctgacaagttgttggacaaaatcaacgataactag

SEQ ID NO: 483679 - DNA, 426 bp, Shigella sonnei
atgtatcgcattggtgagctggcaaaaatggcggaagtaacacctgacacgattcgttattacgaaaaacagcagatgatggagcatgaagtgcgtactgaaggcgggtttcgcctgtataccgaaagcgatctccagcgattgaaatttatccgccatgccagacaactaggtttcagtctggagtcgatccgcgagttgctgtcgatccgcatcgatcctgaacaccatacctgtcaggagtcaaaaggcattgtgcaggaaagattgcaggaagtcgaagcacggatagccgagttgcagagtatgcagcgttccttgcaacgccttaacgatgcctgttgtgggaccgcccatagcagtgtttattgctcgattcttgaagctcttgaacaaggggcgagtggcgttaagagtggctgttga

SEQ ID NO: 483680 - DNA, 219 bp, Shigella sonnei
atgagccgatatcagcatactaaagggcagataaaggataatgcgatagaagcattactacatgatcccttattccgacagcgagtagagaaaaataagaaagggaaaggcagttacatgcgaaaaggaaaacatggcaatcgggggaactgggaggccagtggcaagaaagtaaatcacttttttaccactggtcttctgctttcaggcgcttgttaa

SEQ ID NO: 483681 - DNA, 411 bp, Shigella sonnei; identical to SEQ ID NO: 458825

SEQ ID NO: 483682 - DNA, 1377 bp, Shigella sonnei; identical to SEQ ID NO: 458826

SEQ ID NO: 483683 - DNA, 1290 bp, Shigella sonnei
atgaaaaaacaacgtaatttacgtagcatggcggcccaggccgttgaacaagtcgtcgagcaagggcaatcattaagcaacattctgccaccgctccagcaaaaagtttctgataaagacaaagcacttcttcaagagttgtgctttggcgtactgcgtacgctttcgcagttagactggctgattaataagttaatggcccgtccgatgaccggcaaacagcgcactgtgcattacctgattatggttggtttgtatcaactgctttatacccgcattccacctcatgctgcgctggctgaaacggttgaaggcgctatcgcaattaagcgtccgcaacttaaagggttgattaacggtgtattacgccagttccagcgtcagcaagaagagttattagccgagtttaataccagtgatgcacgttatctgcatccttcctggttgctgaagcgtctgcaaaaagcgtatccagagcagtggcaatccatcgtcgaagccaataaccagcgtccgccaatgtggctgcgcgttaatcgtacgcatcattcccgcgacagctggcttgcattgttggatgaagcaggaatgaaaggtttcccgcatgcggattaccctgatgctgtacggctggaaacacctgcacctgttcatgcgctacctggttttgaagacggatgggttaccgttcaggatgcatcagcacaaggttgcatgacctggcttgcgccacaaaacggtgaacacattctggatctttgtgccgcccccggcggtaaaacaacgcatatccttgaggtggcaccagaagcgcaggttgttgcggttgatattgacgaacagcgcctctctcgcgttcacgacaatttaaaacgccttggtatgaaggcgaccgtgaaacaaggtgatggccgttacccttcccaatggtgtggcgagcaacagtttgatcgcattttattagatgcgccttgttcagcaacgggggtgattcgtcgccatccggatattaaatggttacgtcgcgatcgcgatatcccggaactcgcgcaattgcagtctgaaattctcgacgccatttggccgcatttaaaatccggtggaaccctggtctatgccacctgttcggtgttaccggaagagaatagcctgcagattaaagcttttttgcaacgtaccgctgatgccgaactttgcgaaacaggaacaccagagcaaccgggtaaacaaaatctgcctggtgccgaagagggcgacggcttcttttacgctaagctaatcaaaaagtga

SEQ ID NO: 483684 - DNA, 948 bp, Shigella sonnei
gtgtcagaatcactacgtattatttttgcgggtacacctgactttgcagcgcgtcatctcgacgcgctgttgtcttctggtcataacgtcgttggcgtgttcacccagccagaccgaccggcaggacgcggtaaaaaactgatgcccagcccggttaaagttctggctgaggaaaaaggtctgcccgtttttcaacctgtttccctgcgtccacaagaaagccagcaactggtcgccgatctgcaggctgatgttatggtcgtcgtcgcctatggcttaattctgcctaaagcagtgctggagatgccgcgtcttggctgtatcaacgttcatggttcactgctgccacgctggcgcggtgctgcaccaatccaacgctcactatgggcgggtgatgcagaaactggtgtgaccattatgcaaatggatgtcggtttagacaccggtgatatgctctataagctctcctgcccgattactgcagaagataccagtggtacgctgtacgacaagctggcagagcttggcccacaagggctaatcaccacgttgaaacaactagcagacggcacggcgaaaccagaagttcaggacgaaactcttgtcacttacgccgagaagttgagtaaagaagaagcgcgtattgactggtcgctttcggcagcgcagcttgaacgctgcattcgcgctttcaacccatggccaatgagctggctggaaattgaaggacaaccggttaaagtctggaaagcgtcggtcattgatacggcaaccaacgctgcaccaggaacgatccttgaagccaacaaacaaggcattcaggttgcgactggtgatggcatcctgaacctgctctcgttacaacctgcgggtaagaaagcgatgagcgcgcaagacctcctgaattctcgtcgggaatggtttgttccgggcaaccgtctggcctga

SEQ ID NO: 483685 - DNA, 510 bp, Shigella sonnei
atgtcagttttgcaagtgttacatattccggacgagcggcttcgcaaagttgctaaaccggtagaagaagtgaatgcagaaatacagcgtatcgtcgatgatatgttcgagacgatgtacgcagaagaaggtattggcctggcggcaacccaggttgatatccatcaacgtatcattgttattgatgtttcggaaaaccgtgacgaacggctggtgttaatcaatccggagcttttagaaaaaagcggcgaaacaggcattgaagaaggttgcctgtcgatccctgaacaacgtgctttagtgccgcgcgcagagaaagttaaaattcgcgcccttgaccgcgacggtaaaccatttgaactggaagcagaggggctgttagccatctgtattcagcatgagatggatcacctggtcggcaaactgtttatggattatctgtcaccgctgaaacaacaacgtattcgtcagaaagttgaaaaactagatcgtctgaaagcccgggcttaa

SEQ ID NO: 483686 - DNA, 1125 bp, Shigella sonnei
atggtcgatacagaaatttggctgcgtttaatgagtatcagcagcttgtacggcgatgatatggtccgtatagctcactggctggcaaaacagtcgcaaattgatgcggttggattgcagcaaacagggcttacattgcggcaggcacaacgctttctttcatttccgcgaaagagtatcgaaagctcactttgttggttggagcaacccaaccatcatttaatccctgcggacagcgaattttatcctcctcaacttctggtgacgacagattaccccggcgcactgtttgttgaaggagaactgcacgcgctgcattcatttcagcttgccgtagtggggagtcgggcgcattcatggtatggcgagcgatggggacggttattttgcgaaactctggcgacgcgtggagtgacaattacgagtggactggcgcgtggaatcgatggtgtggcgcataaagctgccttacaggtaaatggcgtcagcattgctgtattggggaatggacttaataccattcatccccgccgccatgcccgactggctgccagtctgcttgaacatggcggagctctcgtctcggaatttcccctcgatgttccaccccttgcttacaatttcccacgaagaaatcgcattatcagtggtctaagtaaaggtgtactggtggtggaagcggctttgcgcagtggttcgctggtgacagcacgttgtgcgcttgagcagaggcgtgaagtttttgccttgccaggtccaatagggaatccgggaagcgaagggcctcactggttaataaaacaaggtgcgattcttgtgacggaaccggaagaaattctggaaaacttgcaatttggattgcactggttgccagacgcccctgaaaattcattttattcaccagatcagcaagacgtggcattgccatttcctgagctcctggctaacgtaggagatgaggtaacacctgttgacgtcgtcgctgaacgtgccggccaacctgtgccagaggtagttactcaactactcgaactggagttagcaggatggatcgcagctgtacccggcggctatgtccgattgaggagggcatgccatgttcgacgtactaatgtatttgtttga

SEQ ID NO: 483687 - DNA, 474 bp, Shigella sonnei
atgttcgacgtactaatgtatttgtttgaaacctatattcacactgaagctgagttgcgtgtggatcaagacaaacttgaacaggatcttaccgacgcaggttttgagcgagaagatatctacaatgccctgctatggctggaaaaacttgctgattatcaggaagggttggcagaaccgatgcaactggcctcggatcctctctccatgcgtatttatacaccggaagagtgtgaacgactggatgccagctgccgtgggtttctgcttttccttgagcagattcaggtgctcaaccttgaaactcgtgaaatggtgatagagcgagtgctcgcgctggataacgcagagttcgaactggatgatctgaaatgggtgatcctgatggtgttgttcaacatcccggggtgcgaaaatgcgtaccagcaaatggaagaattactctttgaagtgaatgaaggtatgctgcattaa

SEQ ID NO: 483688 - DNA, 543 bp, Shigella sonnei
atggcaaaatcagcactgttcacggtgcgtaataatgagtcctgcccaaagtgcggggctgaactggttattcgatccgggaaacacggtccgtttcttggatgctcacagtatccggcgtgtgactacgtccgtcttctgaaatcttcagcggatggacatattgtcaaagttctggaggggcaggtttgccctgcatgtggcgcaaatctggtattacgccagggacgctttggtatgtttattggttgcagtaactaccctgaatgcgaacataccgaacttatcgataaaccggacgaaacagcaattacatgcccccaatgtcggacgggccatctggtccagcgccgctcccgttatggcaaaacatttcactcctgtgatcgctacccggagtgtcaatttgccattaacttcaaaccaatagctggagaatgccctgagtgtcattatccgctactcatcgaaaagaaaaccgcgcagggtgtaaaacacttttgtgccagtaaacaatgtggaaagccggtttcggcggaataa

SEQ ID NO: 483689 - DNA, 573 bp, Shigella sonnei; identical to SEQ ID NO: 458833

SEQ ID NO: 483690 - DNA, 819 bp, Shigella sonnei
atggaaacctatgctgtttttggtaatccgatagcccacagcaaatcgccattcattcatcagcaatttgctcagcaactgaatattgaacatccctatgggcgcgtgttggcacccatcaatgatttcatcaacacactgaacgctttctttcgtgctggtggtaaaggtgcgaatgtgacggtgccttttaaagaagaggcttttgccagagcggatgagcttactgaacgggcagcgttggctggtgcagttaataccctcaagcggttagaagatggacgcctgctgggtgacaataccgatggtgtaggcttgttaagcgatctggaacgtctgtcttttatccgccctggtttacgtattctgcttatcggcgctggtggagcatctcgcggcgtactactgccacttctttccctagactgtgcggtgacaatcactaatcggacggtatcccgcgcggaagagttggctaaattgtttgcgcacactggcagtattcaggcgttgggtatggacgaactggaaggtcatgagtttgatctcattattaatgcaacatccagtggcatcagtggtgatattccggcgatcccgtcatcgctcattcatccaggcatttattgctatgacatgttctatcagaaaggaaaaactccttttctggcatggtgtgagcagcgaggctcaaagcgtaatgctgatggtttaggaatgctggtggcacaggcggctcatgccttccttctttggcatggcgttctgcctgatgtagaaccggtcatcaaactattgcaacaggaattgtcagcgtga

SEQ ID NO: 483691 - DNA, 258 bp, Shigella sonnei
gtgaatcaggccatccagtttccggatagggaagagtgggacgagaataaaagatgtgtatgttttcctgctctcgtgaatggtatgcaactgacatgtgcgatctctggcgagagtctggcgtatcgctttactggaggtacgccagaacagtggttagcgagttttcgtcagcatcgctgggacctggaagaagaagcggaaaacttaattcaggaacaaagtgaagatgatcaaggttgggtctggttaccttga

SEQ ID NO: 483692 - DNA, 555 bp, Shigella sonnei
atgtctgatgttttacgcccataccgcgatctttttccacaaatcggccagcgcgtaatgatcgacgatagcagcgtcgtgattggtgacgttcgtctggctgatgatgtggggatctggccgctcgttgtgattcgtggagatgtacattatgtacagatcggagcacgcaccaatatccaggatggcagtatgttgcatgtcactcataaatcctcgtacaacccagatggcaacccattaaccattggcgaagatgtcactgttggtcacaaggtgatgctccacggctgcaccattggcaatcgagttttggttgggatgggctcaattttacttgatggcgcaatagtagaagatgatgtgatgattggtgcgggtagcctggtcccacaaaataaacggctggagagcggatatctgtatctcggtagtcccgtcaaacagatccgcccgttaagtgatgaagagaaggctgggttacgctattccgcaaataactacgtgaaatggaaggacgaatatctggatcaaggtaaccagacccaaccttga

SEQ ID NO: 483693 - DNA, 381 bp, Shigella sonnei; identical to SEQ ID NO: 35582

SEQ ID NO: 483694 - DNA, 798 bp, Shigella sonnei
atgctggcaaaagataggactaacctaaagattgaagaaatacggatgcataaacatcatgagattcacagggttaagcctcttatgccagcttcatgtcgtatccgtcagggaaaaaaagttatcaattgggagatgcatagtctaactgttgataataatcagataatattatttccctgtggatatgaattttatattgcgaattacccagaagcaggtctttatcttgcagaaatgctttattatcccattgatctaattgaaaagttccaaaatctttatgcgataaccgatcaaattcgtaacacgacaggtttctgcttacctcagaattccgagttaatatattgttgggagcaactaaaaacatctatttcccgaggcttctcaacgcaaattcaggaacacttagcaatgggcgttctactttcattaggagcacatcatgttaattgtttacttttatcagatagtaaacaatcattaataagtcgttgttataacctaatgctatccgaacctggaacaaaatggacagcaaacaaggtagcgagatatctctacatttctgtttccacattgcatcgccgtctggcaagcgagggagtaagttttcaaagtatattggacgacgtgaggttaaataatgcgttgtctgctatacaaacgacagtaaaacccatcagcgagattgccagggaaaatggttacaagtgtccttctcgttttactgaaaggttccataatcgttttaagataacaccaagagagctaagaaaagcgtccagagagtaa

SEQ ID NO: 483695 - DNA, 552 bp, Shigella sonnei
atgaaaaaacttatcgtttcaagtgtattggcattcataacattttctgcgcaggccgcagcatttcaggtcactagtaatgaaataaaaacaggagagcaacttacaacgtctcatgtattttctggagttgggtgtgaggggggtaatacatcgccctcattaacctggtctggtgctccagaaggcaccaaaagctttgccgtaactgtgtatgatccagatgcgcctacaggcagcggatggtggcactggactgttgctaatattccagcaacggtaacatatttgcccgctgatgcaggaagacgtgatggtacaaaacttccgactggtgctgtccaaggccgaaatgattttggctatgcgggatttggtggagcatgtcctcccaaaggagataaaccccatcattaccagtttaaaatatgggctctaaaaactgataagattcctgtggattctaattccagcggagcgttagttggttatatgcttaatgccaataaaattgcaaccgctgagataatacccgtttatgaggtaaagtag

SEQ ID NO: 483696 - DNA, 333 bp, Shigella sonnei
atgaacccttatatttatcttggtggcgcaatacttgcagaggtcattggtacaaccttaatgaagttttcagaggggtttacacggttatggccctctgttggcacaattatttgctattgtgcatcattttggttattagctcagacactggcttatatacctacagggattgcttatgctatctggtcaggagtcggtatcgttctgattagtttgctttcctggggattttttggccaacgactggacctgccagccatcataggcatgatgttgatttgtgccggtgtgttagtcattaacttgttgtcacgaagcgcaccgcattaa

SEQ ID NO: 483697 - DNA, 315 bp, Shigella sonnei
atgtcagcgatacaggggattgaaggggttatcagccagttacaggctacggcgatgagtgcgcgtgcgcaggaatcactgccacaaccgaccattagttttgccgggcagctgcacgccgcgctcgatcgcataagcgatacacaaacagccgcccgcacgcaggcagaaaaattcactctcggtgaacccggcgtggcgttaaacgatgtgatgaccgatatgcaaaaagcctcagtttctatgcaaatggggattcaggtgcgtaataagctggtggcggcttatcaggaagtgatgtccatgcaggtgtag

SEQ ID NO: 483698 - DNA, 1659 bp, Shigella sonnei
atgaatgcgactgcagcccagacaaaatctcttgagtggcttaatcgcctgcgtgcgaatccgaaaattccattgattgttgccggttccgcggcagtggcggtcatggtcgcactgatcctgtgggcgaaagcccccgactaccgcacattattcagcaatctttccgatcaggatggtggcgcaattgtcagccaactgacgcaaatgaatattccttactgcttcagcgaagccagcggcgctattgaagttccggcagataaagttcacgaactgcgtctgcgcctggcacaacaaggtttgcccaaaggcggcgcggtcggtttcgaactgcttgatcaggaaaagtttggtatcagccagttcagcgaacaggtgaattatcagcgggcgctggaaggcgagctttctcgtaccatcgaaactatcggcccggtaaaaggggcgcgcgtacatctggcaatgccgaaaccgtctttattcgtccgtgaacaaaaatccccttctgcatcggtgacggtaaatctgttacccggccgcgcactcgatgaagggcaaattagcgccattgtgcacctggtttccagcgccgttgctggtctgccgccgggaaacgtcacgctggtggatcagggcggacatctgttaacccagtccaataccagcgggcgcgatcttaatgacgctcagttgaaatatgccagcgatgtcgaaggccgtattcagcggcgtattgaagcaatcctgtcgcctattgttggtaacggtaatattcacgcccaggtcacggcgcaactggacttcgccagtaaagaacaaacggaagaacagtatcgccctaacggtgatgaatctcatgcggcgcttcgttcacgccagcttaatgagagcgagcaaagcggttccggttatccgggcggcgtaccgggggcgttgtcgaatcaaccggcacctgcgaataacgcgccaatcagcacgcctccggcaaatcaaaataaccgccagcagcaggcgagcaccaccagcaatagcgggccgcgtagcacacagcggaatgaaaccagtaactacgaagtcgatcgcaccattcgtcataccaaaatgaacgtgggcgatgtgcaacgtctgtcagtcgcggtagtggtgaattacaaaaccttgccagacggtaaaccattgcctctcagcaacgaacagatgaagcaaattgaagatctgacccgcgaagcgatgggcttttctgaaaaacgcggtgactcgctcaatgtcgttaactcgccgttcaatagcagtgacgaaagcggcggagaactgccgttctggcaacagcaagcgtttatcgatcagttgctggctgccggtcgctggttgctggtactgctggtggcgtggctgctgtggcggaaagcggtacgcccgcagttaacacgtcgcgccgaggcgatgaaagctgtacagcaacaggcgcaggcccgtgaggaagtggaagatgcggtggaagtccgcctgagcaaagacgaacaactccaacaacgacgcgctaaccaacgtctgggggcagaagtcatgagccagcgtatccgtgaaatgtctgataacgatccgcgcgtggtggcgctggtcattcgccagtggataaataacgatcatgagtaa

SEQ ID NO: 483699 - DNA, 996 bp, Shigella sonnei
atgagtaacctgacaggcaccgataaaagcgtcatcctgctgatgaccattggcgaagaccgggcggcagaggtgttcaagcacctctcccagcgcgaagtgcaaaccctgagcgctgcaatggcgaacgtcacgcagatctccaacaagcagctaacctatgtgctggcggagtttgagcaagaagctgaacagtttgccgcactgaatatcaacgccaacgattatctgcgttcggtattggtcaaagctctgggtgaggaacgtgccgccagcctgctggaagatattctcgaaactcgcgataccgccagcggtattgaaacgctcaactttatggagccgcagagtgccgccgatctgattcgcgatgagcatccgcaaattatcgccaccattctggtgcatctgaagcgcgcgcaggccgccgatattctggcgttgttcgatgaacgtctgcgccacgacgtgatgttgcgtatcgccacctttggcggcgtgcagccagccgcgctggcggaactgaccgaagtactgaatggcttgctcgacggtcagaatctcaagcgcagcaaaatgggcggcgtgagaacggcagccgaaattatcaacctgatgaaaactcagcaggaagaagccgttattaccgccgtgcgcgaattcgacggcgagctggcgcaaaaaattatcgacgagatgttcctgttcgaaaatctggtggatgtcgacgatcgcagcattcagcgtctgttgcaggaagtggattccgaatcgctgttgatcgcgctgaaaggggccgagcagccactgcgcgagaaattcctgcgcaatatgtcgcagcgtgccgccgatattctgcacgacgatctcgccaaccgtggtccggtgcgtctgtcgcaggtggaaaacgaacagaaagcgattctgctgattgtgcgccgccttgccgaaactggcgagatggtaattggcagcggcgaggatacctatgtctga

SEQ ID NO: 483700 - DNA, 687 bp, Shigella sonnei
atgtctgataatctgccgtggaaaacctggacgccggacgatctcgcgccaccacaggcagagtttgtgcccatggtcgagccggaagaaaccatcattgaagaggccgaacctagccttgagcagcaactggcgcaactgcaaatgcaggcccatgagcaaggttatcaggcggggattgccgaaggtcgccagcaaggtcatgagcagggctatcaggaaggactggcccaggggctggagcaaggtctggcagaggcgaagtctcaacaagcgccaattcatgcccggatgcagcaactggtcagcgaatttcaaactacccttgatgcgcttgatagtgtgattgcttcgcgcctgatgcagatggcgctggaggcggcacgtcaggtgatcggtcagacgccaacagtggataactcggcactgatcaaacagatccaacagttgttgcagcaagaaccgttattcagcggtaaaccacagctgcgcgtgcacccggatgatctgcaacgtgtggatgatatgctcggcgcaaccttaagtttgcatggctggcgcttgcggggcgatcccacactccatcctggcggctgtaaagtctccgccgatgaaggcgatctcgacgccagtgtcgccactcgctggcaagaactctgccgtctggcagcaccaggagtggtgtaa

SEQ ID NO: 483701 - DNA, 1374 bp, Shigella sonnei
atgaccacgcgcctgactcgctggctaaccacgctggataactttgaagccaaaatggcgcagttgcctgcggtacgtcgctatgggcgattaacccgcgctaccgggctggtgctggaagccaccggattacaattgccgctcggcgcaacctgtgtcattgaacgccagaacggcagcgaaacgcacgaagtagaaagcgaagtcgttggctttaacggtcaacggctgtttttaatgccgctggaggaagtggaaggtgtcctgcccggcgcgcgggtttatgccaaaaacatttcggctgaaggactgcaaagcggcaagcagttgccgctcggtccggcgttattaggtcgcgttctggacggcagcggtaagccgctcgatggcctgccctcccccgatacgacggaaaccggtgcgctgattaccccgccatttaacccgttgcaacgtacaccgattgaacatgtgctggacaccggcgtgcgcccaatcaatgccctgcttaccgttgggcgtgggcagcgtatggggctgtttgccgggtccggcgttggtaaaagtgtgctgctggggatgatggcacgttacacccgcgccgatgtcattgtcgtgggtttgattggtgaacgtgggcgcgaagtaaaagattttattgagaatatcctcggtgctgaagggcgtgcacgctccgtggtgattgccgctccggcggatgtctctccgcttctgcgaatgcaaggtgccgcctatgccacgcgcattgccgaagattttcgcgatcgtggtcagcatgtgttgctgattatggactccctcacccgctacgcgatggcccagcgtgaaattgcgctggcgattggcgaaccacccgccaccaaaggttatccaccgtcggtgtttgccaaattaccggcactggtcgagcgtgccggaaatggcattagcggcggcggctcgattaccgcgttttataccgtgcttactgaaggcgatgaccagcaggaccccattgcagactccgcacgggcgatcctcgacggtcacattgtgctgtctcgccgactggcggaagccgggcactatccggctatcgatattgaagcgtcgatcagccgcgcaatgacggcgttgatcagtgagcaacattacgcgcgagtgcgcaccttcaaacagctgttgtcgagttttcagcgtaaccgcgatctggttagcgtcggcgcgtatgccaaaggcagcgatccgatgctcgataaagccatcgccctgtggccgcagctggagggctatttacaacaaggcatttttgaacgtgcggactgggaagcgtctctccaggggctggagcgtattttcccgacagtgtcataa

SEQ ID NO: 483702 - DNA, 444 bp, Shigella sonnei
atggcagaacatggtgcgctggcgaccctgaaagatctggcagaaaaagaggtagaggatgccgcgcgcctgctgggtgaaatgcgtcgcgggtgtcagcaggcggaagaacagctcaaaatgctgatcgattatcagaatgaatatcgcaataacctcaacagcgatatgagtgccgggatgaccagcaaccgctggatcaactatcagcagtttatccagacgctggaaaaagccattactcagcatcgccagcaacttaatcagtggacgcagaaagttgacattgccctgaacagctggcgagaaaagaaacaacgtttgcaggcctggcagacactgcaggaacggcaatccacggcggcactgcttgcagaaaaccgcctcgatcagaaaaagatggatgagttcgcccagcgcgccgccatgaggaaacctgaatga

SEQ ID NO: 483703 - DNA, 1128 bp, Shigella sonnei
atgattcgcttagcgcccttgattaccgccgacgttgacaccaccacattgcctggcggcaaagccagcgatgctgcacaagattttctcgcgttgttgagcgaagcattagcaagcgagacaactaccgacaaagcggccccccaggtgctggtggcaacagataagcccacgacaaaaggcgagctgctgatcagcgatattgtttccgacgcgcaacaagcggatttactgatccctgtggatgaaacactgcctgtcatcaacgtcgaacaatccacatcgacaccgttaaccaccgctcatacgatgacgttggctgcggtggctgacaaaaatacgacaaaagacgaaaaagcggatgatctgaatgaagacctcaccgcaagcctgagcgccctttttgcgatgttgccgggttttgacaatacgcccaaagtgactgatgcgccgtcaaccgtgttaccggcagagaaaccaacgctcttcacaaaactgacttctgcgcaactcacaacagcacagcctgatgatgcccccggcacgccagctcagccattaacaccgctggtagcagaagcccagagtaaagcggaagtcatcagcacaccttcaccggtgaccgctgccgccagcccgctaatcactccacaccagacacagccactgctcaccgtcgccgcgcctgtcttgagtgcaccgctgggttctcacgaatggcaacaatcattaagccagcatatttcgctgttcacccgccagggacaacaaagtgcagagttgcgtctgcacccgcaggatttaggtgaagtgcaaatctccctcaaagtggatgataaccaggcgcaaatccagatggtttcgccgcatcagcacgtacgcgccgccctggaagcagcgctgccggtactgcgtacgcagctggccgagagtggcattcagttagggcaaagcaacatcagtggcgaaagctttagtggtcagcagcaggccgcttcccaacaacagcaaagccaacgcacagtaaaccatgaacctctggcgggggaagaagacgatacgcttccggttcccgtctctttacaagggcgcgtaacaggcaacagcggcgttgatattttcgcctaa

SEQ ID NO: 483704 - DNA, 465 bp, Shigella sonnei
atgactgattacgcgataagcaagaaaagcaagcgatcgctttggctcccgattctggtattcattaccctcgcggcctgtgccagcgcaggttacagctactggcattcgcatcaggttgccgctgaagacaaagcgcagcatcgcgtcgtgccctcaccggtcttctatgcgctggatacctttacggtcaatttgggcgatgcggatcgcgtgctttatatcggtataaccctgcgactcaaagatgaagctacccgctcgcggctgagtgagtatttgccggaagtccgtagccgtttgctgttactgttttcgcgtcaggatgctgccgtactggcgacagaagaaggcaagaaaaacctgattgccgagattaaaaccacgctttccaccccgcttgttgccgggcaaccgaaacaggatgtcaccgacgtgatgtataccgcttttattctgcgataa

SEQ ID NO: 483705 - DNA, 1005 bp, Shigella sonnei
atgggcgatagtattctttctcaagctgaaattgatgcgctgttgaatggtgacagcgaagtcaaagacgaaccgacagccagtgttagcggcgaaagtgacattcgtccgtacgatccgaatacccaacgacgggttgtgcgcgaacgtttgcaggcgctggaaatcattaatgagcgctttgcccgccattttcgtatggggctgttcaacctgctgcgtcgtagcccggatataaccgtcggggccatccgcattcagccgtaccatgaatttgcccgcaacctgccggtgccgaccaacctgaaccttatccatctgaaaccgctgcgcggcacagggctggtggtgttttcaccgagtctggtgtttatcgccgtggataacctgtttggcggcaatggacgcttcccgaccaaagtggaaggtcgcgagtttacccataccgaacagcgcgtcatcaaccgcatgttaaagctggcgcttgaaggctatagcgacgcctggaaggcgattaatccgctggaagttgagtacgtgcgttcggaaatgcaggtgaaatttaccaatatcaccacctcgccgaacgacattgtggttaacacgccgttccatgtggagattggcaacctgaccggcgaatttaatatctgtctgccattcagcatgatcgagccgctacgggaattgttggttaacccgccgctggaaaactcgcgtaatgaagatcagaactggcgcgataacctggtgcgccaggtgcagcattcacagctggagctggtcgccaactttgccgatatctcgctacgcctgtcgcagattttaaaactgaaacccggcgacgtcctgccgatagaaaaacccgatggcatcatcgcccatgttgacggcgtcccggtgctgaccagtcagtacggcactctcaacggtcagtatgcgttacggatagaacatttgattaacccgattttaaattctctgaacgaggaacagcccaaatga

SEQ ID NO: 483706 - DNA, 414 bp, Shigella sonnei
atgagtgacatgaataatccggccgatgacaacaacggcgcaatggacgatctgtgggctgaagcgttgagcgaacaaaaatcaaccagcagcaaaagcgctgccgacgcggtgttccagcaatttggcggtggtgatgtcagcggaacgttgcaggatatcgacctgataatggatattccggtcaagctgaccgtcgagctgggccgtacgcggatgaccatcaaagagctgttgcgtctgacgcaagggtccgtcgtggcgctggacggtctggcgggcgaaccactggatattctgatcaacggttatttaatctcccagggcgaagtggtggtcgttgccgataaatatggcgtgcggatcaccgatatcattactccgtctgagcgaatgcgtcgcctgagccgttag

SEQ ID NO: 483707 - DNA, 366 bp, Shigella sonnei
atgaataaccacgctactgtgcaatcttccacgccggtttctgctgcgccactgctgcaggtcagcggcgcactcatcgccattattgccctgatcctcgctgctgcctggctggtaaaacggttgggatttgccccgaaacgcactggcgttaacggtctgaaaattagcgccagtgcttcgctgggcgcgcgtgaacgggttgtggtggtcgatgtggaagatgcacggctggtgctcggcgttaccgcagggcaaatcaatctgctgcataaacttcccccttcagcaccaacagaagagataccgcagaccgattttcagtcggtcatgaaaaatttgcttaagcgtagtgggagatcctga

SEQ ID NO: 483708 - DNA, 738 bp, Shigella sonnei
atgcgtcgtttgttgtctgtcgcacctgtccttctctggctggttacgcccctcgccttcgcgcaactgccgggtatcaccagccagccgctgcctggcggtggacaaagctggtcgctcccggtgcagacgctggtgttcatcacctcgttgacgtttattccggcaattttactgatgatgaccagtttcacccgcatcatcattgtttttggtttattgcgtaacgcgctgggaacgccctccgcgccacctaaccaggtattgctggggctggcactatttttgaccttttttattatgtcatcggtgatcgacaaaatttatgtcgatgcgtaccagccattcagcgaagagaaaatatcaatgcaggaggcgctggaaaaaggggcgcagccgctacgtgagtttatgctgcgtcagacccgtgaggcagatttagggttgtttgccagactagcgaataccggcccgttgcagggacctgaagccgtgccgatgcgcattttgctcccggcctacgtgaccagcgaattgaaaaccgcatttcagataggcttcacgattttcattccttttttgattatcgacctggtgattgccagcgtgttgatggcattggggatgatgatggtcccccccgccaccattgctctgccctttaaactgatgctgtttgtactggtggatggctggcaattgctggtcggttcgctggcgcagagcttttacagctag

SEQ ID NO: 483709 - DNA, 270 bp, Shigella sonnei
atgacacctgaatcggtcatgatgatggggactgaagcgatgaaagtcgcgctggcactggctgccccgctgttgctggtggcgctggtcacgggccttatcatcagtattttgcaggccgccacgcagatcaacgaaatgacgctgtcgtttattccaaaaatcatcgccgtatttattgccattattattgccggaccgtggatgctcaatctgttgctggattacgtccgcaccttgttcactaacctgccgtatatcatcgggtag

SEQ ID NO: 483710 - DNA, 786 bp, Shigella sonnei
atgatgcaggtgacaagcgatcaatggctttcctggttaagcctgtacttctggccgttactgcgcgtgctggcgctcatttctaccgcaccaattctgagcgaacgcagcgtgccgaaacgggtaaaactggggctggcaatgatgatcacgttcgtcattgccccatcattacctgccaacgatgttcctgttttttcgttctttgctctgtggctggccgtgcagcagatcctgatcggcattgcgcttggttttaccatgcaatttgcctttgccgctgtgcgaaccgctggcgaaattatcggtctgcaaatggggctgtcatttgcgacgtttgtcgatccggccagccatctcaatatgcccgttttagcgcgtatcatggatatgctggcgttactgctgttcctgacatttaacggtcatttatggttgatttcactgctggtcgatacctttcacaccctgccaattggtggcgaaccgttgaacagcaatgcgtttctggcactcaccaaagcggggagtttgattttccttaacgggctgatgctggcgttaccgctcattactctgctgctgaccctgaatctggcattaggtttactgaatcgtatggccccgcaattatccatttttgttattggatttccattaactctgactgtcggtatctctttaatggcggcattaatgccgttaattgcacctttttgcgaacatttattcagtgagatgtttaatttgctggctgatattattagtgaattgccattaatataa

SEQ ID NO: 483711 - DNA, 624 bp, Shigella sonnei
atgtcaacgattattatggatttatgtagttacacccgactaggtttaaccgggtatctgttgagtagaggggttaaaaaaagagaaatcaacgacattgaaaccgttgatgaccttgccatagcttgtgattcacagcgcccttcagtggtgtttattaatgaggactgtttcatccatgatgcttctaacagtcagcacatcaagcacatcattaatcaacatcccaatacgttatttatcgtttttatggcaattgccaatgttcattttgatgaatatctattggtcagaaaaaaattattgataagttctaaatcgattaaaccggaatctctcgacgatatccttggcgatattctgaaaaaagagacaacgataacctcttttttaaatatgccgacgttatcattgagccgaaccgaatcgagtatgttgcgaatgtggatggcaggtcagggaaccattcaaatctctgaccaaatgaatatcaaagccaagaccgtttcatcgcataaaggtaatattaaacgtaagatcaaaacacataataaacaggttatctaccatgtcgtccgactgacggataatgtgactaatggtatttttgtcaacatgcgctaa

SEQ ID NO: 483712 - DNA, 189 bp, Shigella sonnei; identical to SEQ ID NO: 23782

SEQ ID NO: 483713 - DNA, 228 bp, Shigella sonnei; identical to SEQ ID NO: 1612

SEQ ID NO: 483714 - DNA, 816 bp, Shigella sonnei
atgttttcaattcaacaaccactactggtttttagcgatcttgatggcaccctgctggacagtcatagttatgactggcaaccgactgccctctggctcagccgtttacgcgaagcgaatgttcccgtcattctctgtagcagtaaaacttcagcggaaatgctgtacttgcaaaaaacgttggggctacaagggttaccactgattgccgaaaatggcgcagtgatccagcttgctgaacaatggcaggatatagacggttttccacgcatcatctcaggtattagccatggcgaaatcagccaggttttaaatacgctacgcgagaaagaacattttaaattcacgactttcgatgatgtcgacgatgcaaccatcgccgaatggacgggattaagccgtagccaggcggcgctgacgcagctgcatgaggcgtcggtaacgctaatctggcgcgacagtgacgagcgtatggcacaatttaccgctcgtctgaacgaactgggcttacagtttatgcagggtgcgcgcttctggcacgtcctggatgcctctgccggaaaagatcaggccgccaactggattatcgcgacctatcaacaattatcaggcaaacgcccaaccacacttggcctgggcgatgggccaaacgatgcgcccttactggaggtaatggattacgcggtgattgtgaaagggctaaaccgtgaaggggtgcatctgcatgatgaggatccgacccgcgtctggcgaacgcagcgtgaaggaccggaaggctggcgtgaagggctggaccattttttctccgctcgttaa

SEQ ID NO: 483715 - DNA, 1695 bp, Shigella sonnei
gtgcagcacgagacaaaaatggaaaaccagagctggttgaaaaaactcgcacgccgcctggggcctggtcatgtcgttaatctctgctttatcgtggtattgcttttttccaccttgctgacctggcgtgaagtggtagtgctggaagatgcctatatctccagccagcgtaatcatctggaaaacgtagccaacgcgctcgataagcatttgcagtataacgtcgacaaactgatctttttgcgtaatggcatgcgcgaagctctcgtagcgccactggatttcacttcactgcgtaatgctgtaaccgagttcgaacagcatcgcgacgagcacgcctggcaaattgaactcaaccgacgacgcaccctgtcagtcaatggcgtatcggatgcattagtcagcgaggggaatctcctgtctcgcgaaaatgaaagcctcgacaatgaaattaccgctgcactggaagttggttacttgctgcgactggcgcacaacacctcgtcgatggttgaacaggcgatgtatgtctcgcgtgccggattttacgtttcgacgcagccgaccttgtttacgcgcaatgtaccaacgcgttattacggctatgtcacccaaccctggtttatcggccattcgcaacgagaaaatcgtcaccgcgcggtacgctggtttacttcgcaaccggaacacgccagcaatactgaaccgcaggttaccgtcagtgttccggtagacagtaataactactggtatggcgtgctggggatgagtattcccgtgcgtaccatgcagcaatttttaagaaacgccatcgataaaaacctcgatggtgagtatcagctctatgacagtaagctgagatttttgacctcttccaatcctgaccatccaacagggaatatttttgatcctcgtgaactggccttgctggcgcaggcgatggaacatgacacgcggggcggcattcgtatggacagtcgctatgttagctgggaacgtctggaccatttcgacggtgtgctggtgcgcgtccatacgctaagcgaaggcgtgcgcggcgatttcggcagtatcagcattgcattaaccctgctgtgggcgctctttaccaccatgttactcatctcctggtatgtgattcgccggatggttagcaacatgtatgttctgcaaagctcgttgcagtggcaggcgtggcacgacaccttaacccgtttatataatcgtggcgcactgtttgaaaaagcccgtccgctcgcgaaattgtgtcagacgcaccaacatcctttttctgtcattcaggtcgaccttgaccattttaaagcgattaatgaccgctttggtcatcaggcgggcgaccgtgttctttctcatgctgccggattaattagcagttccttgcgtgcgcaggacgttgccgggcgggtcggtggtgaggagttttgtgtgattctgccaggcgcgagtctgacggaggctgcggaagtcgcagaacgtattcgcctgaagttaaatgaaaaagagatgttgattgctaagagtacgacgatacgcatcagtgcctcgttgggggtaagtagcagcgaggaaaccggtgattatgattttgaacaactccagtcactggctgaccgtcggctttatctcgctaaacaggccgggcgtaatcgggtatgcgcgagcgataacgcttaa

SEQ ID NO: 483716 - DNA, 183 bp, Shigella sonnei
atgagctttatggttagtgaggaagttacggttaaagagggcggcccgcggatgattgtcactggatactccagcggtatggttgagtgtcgttggtatgacggttacggggtcaagcgggaagcttttcatgaaaccgagcttgttccgggggaggggagtcgttctgcggaagaagtttga

SEQ ID NO: 483717 - DNA, 918 bp, Shigella sonnei
atgcttttggccgggagtagtttactgacgttgctcgatgatatcgccacactactggacgatatctccgtgatgggcaaactggcggcgaagaaaaccgccggtgtattaggggatgacttatcgctcaatgcgcaacaagtttcaggcgtgcgggccaaccgggaacttcccgtggtctggggcgtggcgaaaggatcgctgattaataaagtgattctggtgccgctggcgctgatcatcagtgcgtttatcccgtgggcgattacgcctctgttgatgattggtggcgcgtttctctgctttgaaggagtagagaaagtgctgcatatgctggaggcgcgtaaacataaagaagatccggcgcagagccagcagcgtctggagaagctggcggcgcaggatccgctgaagtttgaaaaggacaaaataaaaggggcgattcgtaccgattttatattgtctgccgaaatcgtcgccatcacgctggggattgtggccgaagcgccgttgcttaatcaggtgctggtgctttcaggcatcgcgctggtagtgaccgtgggcgtctacggtctggtaggggttatcgttaagattgatgacctggggtattggctggcggaaaaatccagcgcgctgatgcaggcattaggtaaagggttattgatcattgcgccctggttgatgaaggcgttatcgattgtcggcacgctggcgatgttcctcgtcggcggcggtattgtggtacatggtattgcgccgctgcatcacgccattgaacatttcgccgggcagcaaagtgcagtggtggcgatgatattaccgactgttttaaatctgattcttggatttatcatcggcggcatcgtggtgctgggagtgaaagccgtagcgaaaatgcgcggtcaggcacattaa

SEQ ID NO: 483718 - DNA, 360 bp, Shigella sonnei
atgcgtttccgccagttgttaccgctttttggcgcgctgtttgcgttgtatatcatttggggctcaacctattttgtcattcggattggcgtggaaagctggcctccgttaatgatggcaggcgttcgattcctggcagccggtattttattgatggcatttttgctactgcgcggacacaagctccccccgctacgtccgctgctcaatgccgcgctgattggcctgttattgctggctgtcggtaatggcatggtgacggttgccgagcatcaaaatgttccttccggcatcgccgccgttgtggttgcaaccgtgcccctctttaccctggtgcttcagccgcctgtttggcattaa

SEQ ID NO: 483719 - DNA, 510 bp, Shigella sonnei
atgctcaatagcggtggaaatttaagcggcaatccgtggggcgcgattctgattttaatcggctcgattagctgggcgtttggctcggtttatggctcgcgcattaccttacctgtagggatgatggcgggtgcgattgagatgctggcggcaggcgtggtgttaatgatcgcgtcgatgattgcaggtgaaaaactgacggcgctcccttccctttcaggcttccttgcggtcggctatctggcgctgtttggttcgattatcgccatcaacgcttatatgtatttaatccgtaatgtcagtccggctctcgccaccagctacgcctacgttaacccggtggtcgcggtcttgctgggtacgggactgggcggagagacgctgtcgaagattgaatggctggcgctcggcgtaattgtcttcgcggtggtactggtcacgttgggaaaatatctcttcccggcaaaacccgtagttgcgccagttattcaggacgcatcaagcgagtaa

SEQ ID NO: 483720 - DNA, 471 bp, Shigella sonnei
atggccgacgttcacgataaggccactcgcagcaaaaatatgcgcgcgattgccacgcgtgatacggcgattgagaagcgcctcgccagtctgttaaccgggcagggcctggcgtttcgcgttcaggacgccagtctgcccggaagcccggattttgtcgttgatgaatatcgctgcgtgatatttacccatggctgcttctggcatcatcatcactgctatctgtttaaagtgcctgcgactcgaaccgagttctggctggagaagataggtaaaaatgttgaacgcgatcgccgcgatatcagtcgtttgcaggaactcggctggcgcgtactgattgtctgggagtgtgcattacgtgggcgcgagaagctgacggatgaagcgcttaccgagcgtctggaagagtggatctgcggcgaaggtgccagcgcgcagatcgacacgcaggggattcatttactcgcttga

SEQ ID NO: 483721 - DNA, 1419 bp, Shigella sonnei
atgcaggaaaatatatcagtaaccgattcatacagcaccgggaatgccgcacaggcaatgctggagaaactgctgcaaatttatgatgttaaaacgctggtggcgcagcttaatggtgtgggtgagaatcactggagcgcggcaattttaaaacgtgcgctggcgaatgactcggcatggcaccgtttaagtgagaaagagttcgcccatctgcaaacgttgttacccaaaccatcggcacatcatccgcattatgcgtttcgctttatcgatctatttgccggaattggcggcatccgtcgcggttttgaatcgattggcggacaatgcgtgtttaccagcgaatggaacaaacatgcggtacgcacttataaagccaaccattattgcgatccggcgacgcatcattttaatgaagatatccgcgacatcaccctcagccataaagaaggcgtgagtgatgaggcggcggcggaacatattcgtcaacacattcctgaacacgatgttttactggccggtttcccttgtcagccattttcgctggctggcgtatcgaaaaagaactcgctcgggcgggcgcacggttttgcctgcgatacccagggcacgctgttttttgatgtggtacgcattatcgacgcgcgtcgtccggcgatgtttgtgctcgaaaacgtcaaaaacctgaaaagtcacgaccagggtaaaacgttccgcatcatcatgcagacgctggacgaactgggctatgacgtggctgatgcagaagataacgggccggacgatccgaaaatcatcgatggtaaacattttctgccgcagcaccgtgaacgcatcgtgctggtgggttttcgtcgcgatcttaatctgaaagccgattttactctgcgtgatatcagcgaatgtttccctgcacagcgagtgacgctggcgcagctgttggacccgatggtcgaggcgaaatatatcctgacgccggtgctgtggaagtacctctatcgatatgcgaaaaaacatcaggcgcgcggtaacggcttcggttatggaatggtttatccgaacaatccgcaaagcgtcacgcgtacgctgtctgcgcgttattacaaagatggcgcggaaattttaatcgatcgcggctgggatatggccacgggtgagaaagattttgacgatccgctgaatcagcaacatcgtccacgtcggttaacgcctcgggaatgcgcgcgcttaatgggttttgaagcgccgggagaagcgaaattccgcattccggtttcggacactcaggcctatcgccagttcggtaactcggtggtcgtgccggtctttgccgcggtggcaaaactgcttgagccaaaaatcaaacaggcggtggcgttgcgtcagcaagaggcacaacatggccgacgttcacgataa

SEQ ID NO: 483722 - DNA, 657 bp, Shigella sonnei
atggacttacaacactggcaggcacagttcgaaaactggttgaaaaaccatcatcagcaccaggacgcggcacagaagctggcggcagatgacgatgtcgatatgctggtgattttaaccgcctgttattttcacgatattgtgagcctggcgaaaaatcatccgcaaaggcagcgttcttcaatcctggcggcagaagagacgcgtcgcctgctccgtgaagagttcgagcaatttccggcggagaaaatcgaggccgtttgtcatgccattgccgctcacagtttcagcgcgcaaatcgcccccttaacaacggaagctaaaatcgtccaggatgcggatcggctggaagccctgggggcgattggcctggcgcgcgtgtttgccgtttcaggggcattgggcgtggcgctgtttgatggtgaagatccgttcgcacagcatcgcccgcttgatgataaacgctacgcgctggatcatttccagactaagttgctgaagctaccgcaaaccatgcaaaccgcaagaggcaagcagctggcgcagcacaacgcgcattttttagtcgagtttatggcgaagctcagtgccgaactggcgggggagaatgaaggtgtcgatcacaaggtgatagatgcgttttcacccgcgggataa

SEQ ID NO: 483723 - DNA, 303 bp, Shigella sonnei
atggaatacggttcgacaaagatggaagagagactctctcgcagccctggcggcaaattggctttgtgggctttctatacatggtgtggctatttcgtctgggcaatggcgcgttacatctgggtgatgagccggatccctgatgccccggtgtcgggatttgaaagcgatttaggctctaccgcgggaaagtggttaggggcactggtcggatttttatttatggctctggtcggggcattgttaggcagcattgcctggtacacccgacctcgtcccgcacgtagcagacgctatgaataa

SEQ ID NO: 483724 - DNA, 828 bp, Shigella sonnei
atgaaaagaaaagttctggcaatgctggtcccagcgttattagttgctggcgcagcaaatgcggctgaaatttataataaaaatggcaataaactggatctgtacggaaaagttgatgctcgtcatactttttccgataaccctggcgatgacggcgatgaaactatcatcgagttaggcttcaaaggtgagacccaaattacagatcagttaactggttatggtcaagcactgaccaaaacaaaggctagcgacactgaaggttctgataatacttatgtcaaacttgcttttgcaggtctgaagttcggcgagatgggctcctttgactatggtcgtaactatggtgtgatttacgacgttgaagcctggacagatatgcttcctgtattcggcggcgactcctatacctggactgataacttcatggcaggccgtgcaaatggggtagctacttaccgcaatagtgatttcttcggtctggtggaaggtctgaactttgcattgcagtatcaaggtaacaacgaaggcagcaatgcaggagaagatcaagaaggtactaaaaatggtcacgaagacgttcgcttccagaacggtgatggttttggtctttccacttcatatgactttgacttcggtttgagcttaggtgccgcttactcaaactctgaccgtaccaattctcaagtagctcttggcgggtatcactacaatgaatacagcaaatttgctggtggtgatacagctgaagcatggacatttggtgcaaaatacgacgccaacaatgtttatcttgcaatgggtgatgctgccaacttactgatttag

SEQ ID NO: 483725 - DNA, 603 bp, Shigella sonnei
atgcaaatagtcatgtttgacaggcagtcaatatttattcatggaatgaaaatcagtttacagcagcgtattccaggagtgagtattcagggggccagtcaggcagacgagttatggcaaaagctggaaagttaccctgaagccttagttatgctcgatggcgatcaggatggtgagttttgctactggttgctgcaaaaaaccgtggtgcagtttcctgaggttaaggtgttaatcacggcgacggattgcaataaacggtggttacaggaagttattcattttaatgtgctggccattgtgcctcgtgattcaaccgtcgagacatttgcgttggcggtaaatagtgcggcgatggggatgatgtttctgcctggagactggcggacgacgccggaaaaggacattaaagatctcaaatcgttaagcgcccgccagcgggagattttaaccatgttagcggcgggcgaatcaaataaggagatcggcagagcgctgaatatcagtaccggaacggtaaaagcgcatctggaatccctgtatcgccgtctggaagtgaaaaatcgcacccaggcggcaatgatgttaaatatctcctcctga

SEQ ID NO: 483726 - DNA, 972 bp, Shigella sonnei
atgttagaaaaaacaataaacaatgcgatatgcgcgttactgtttcgctgtgaacaacaatcggtcaaagaaatggataaaattcacgcaatgcagttgttcatcaaagtcgcggagctggaaagtttttcccgcgcggcggatttctttgctttgccaaagggaagtgtttcgcgccagatacaggcactggaacatcaacttggcacccagcttctccagcgcactacgcgacgggtcaaactcacgccagaaggcatgacctattatcaacgggcaaaagatgtgttgagtaatctcagcgaactggacggtctgtttcaacaggatgccaccagtatcagcggtaaattacgcatcgacatcccgtcaggaatcgcgaaaaacctgttactgccgcgtctgtcggaatttctctatcagcatccgggaattgagctggaactgagtagccataaccgtccggtagatattcttcatgatggttttgattgcgtgatacgcactggcgcgttaccggaagatggcgttatcgcccgtcccctcggcaaactgaccatggtcaactgtgccagtccgcactatctgacgcgctttggttatccgcaaagccccgatgatctgacttcacacgcaatggtgcgttatacaccgcacctgggtgtacatccgttaggttttgaggttgccagcgttaatggcgtccagtggtttaagtctggcggcatgttgacggtaaacagtagcgaaaactatctcgccgccggtcttgccggtctggggattattcagatcccgcgcattgccgtgcgcgaagccctgcgtgccgggcagcttattgaagtgttgccaggctaccgtgccgagccgctctccctttcgctggtttatccgcagcgtcgggagctttcccggcgtgtaaacctgtttatgcagtggctggctggcgtaatgaaagagtacctggactga

SEQ ID NO: 483727 - DNA, 1014 bp, Shigella sonnei
atgacgcaggaaaacgagatcaaacgtcccacccaggatctggagcacgagccgattaagcagttggataatagcgagaaaggcggcaaagttagccaggcgctggaaaccgtcaccaccactgccgaaaaagtccaacgccaaccggttattgcgcacctgattcgcgcgacagaacgctttaacgatcggctgggtaaccagtttggtgcggctatcacctatttctcatttttgtcgatgatcccgattttgatggtgtcgtttgccgcagggggctttgtgctggcctcccatccgatgttgctacaggatatcttcgacaaaattctgcaaaacatcagcgatccgacgctagccgccacgttgaaaaacaccatcaacaccgccgttcagcagcgtacgactgtagggcttgtcggcctggctgtggcgctttattccggcatcaactggatgggtaacctgcgtgaagcgattcgcgcccagtcgcgcgatgtctgggaacgctcgccgcaagatcaggagaagttctgggtaaaatatctacgtgattttatttcgctgattggtttgttgattgcgctgattgtgacgctttcgatcacctcggttgccggttcggcgcagcaaatgattattagcgccctgcacctgaacagcattgagtggctgaaaccgacgtggcggttgattggcctggcgatttccatcttcgccaactatctgcttttcttctggatcttctggcggttaccgcgccaccgtccgcgcaaaaaagccctgattcgcggaacatttctggctgctattggttttgaagtgattaaaatcgtgatgacctacaccctgccatcgctgatgaaatccccctctggcgcagcatttggttccgtgctggggctgatggcatttttctacttcttcgcccgtttgacgctgttttgcgcggcgtggattgccaccgccgaatataaagacgacccgcgaatgccagggaaaacgcagccttaa

SEQ ID NO: 483728 - DNA, 1323 bp, Shigella sonnei
atgcaagcaacagccacaacactcgaccacgagcaagaatacacgccgatcaactcgcgtaataaagtccttgtcgcctctctcattggcacggccattgagttcttcgacttttacatttacgccactgcggccgttattgtgtttccgcatatcttcttcccgcagggcgatccaacggcagcaacgctacagtcgctcgccaccttcgccatcgccttcgtcgcgcgccccattggctctgccgtttttggtcattttggcgatcgcgttgggcgtaaagcgacgctggtcgcctcgttgctaacgatggggatttcaaccgtggtgattggtctgctgccgggctatgccacgattggtattttcgccccgctgctgctggcgctggctcgatttggtcagggtctgggcttaggcggtgaatggggcggcgcggcgctgctggcgactgaaaacgccccaccgcgcaaacgtgcactgtatggctccttcccacagctgggcgcaccgattggcttcttctttgccaacggcactttcttgctgctttcctggctactgaccgacgagcagtttatgagctggggctggcgtgtgccatttatcttctcggcggtactggtcattatcggcctgtatgttcgcgtgtcgctgcatgagtcgccggtgtttgagaaagtcgctaaagcgaaaaaacaggtgaagatcccgctgggtacgctgctgaccaaacatgttcgcgtaaccgtactgggtacgttcatcatgctggcaacctatacgctgttttacatcatgacggtctactctatgaccttcagtaccgccgccgcgccagttgggcttggcctgccgcgtaacgaagtgttgtggatgctgatgatggcagttattggttttggcgtgatggtgccagtcgccggattactggctgatgcctttggtcgccgtaaaagcatggtaattatcaccacgctgatcatcctgttcgcgctgttcgcctttaacccgctgctcggttctggcaacccgattctggtttttgccttcctgctgctggggttaagtctgatggggctgaccttcgggccgatgggcgcgctgttaccagagctgttcccaacagaagtgcgttacaccggagcatcattctcttacaacgtagcgtcgattctcggggcttccgttgcaccgtatatcgcagcctggttgcagactaactacgggttaggtgcggtggggttatatctggcggcgatggctggcttgacgttaatcgccctgctgctgacccatgagacgcgacatcagtcgttgtaa

SEQ ID NO: 483729 - DNA, 2061 bp, Shigella sonnei
atgagcaaggcaggcaaaataaccgctgcgatttcaggggctttcttgttgttgattgtcgtggcgatcattttgattgcaacttttgactggaatcgactcaaaccgaccatcaaccagaaagtctctgcggagttgaatcgtccgttcgctatccgtggcgatctgggcgtggtgtgggagcggcaaaaacaagaaactggctggcgcagctgggtgccgtggcctcatgtacatgcagaagacatcattcttggtaatccaccggatattcccgaagtcacgatggtgcatttgccgcgagtagaggcaacgctggcaccgctggcgctgctgaccaaaacggtctggctgccgtggttcaagctcgaaaagcccgacgcgcgcctgattcgcctctccgaaaagaacaataactggacgtttaatcttgccaacgatgacaacaaagacgcgaatgcaaagccgtcggcatggtcgtttcggctggataatattcttttcgatcaagggcggatcgccattgatgacaaagtaagcaaagcggatctggaaatttttgttgatccgttaggcaagccgctgccgttcagcgaagttactggatcgaaaggtaaagcggataaagaaaaggtgggcgattacgtttttggcctgaaggcgcagggacgttataacggtgaaccgctcacgggtacgggaaaaataggcggtatgctggcgctgcgtggcgaagggacgccgtttccggtacaggctgatttccgttcaggtaatacccgtgttgcttttgatggcgtcgtgaatgacccaatgaagatgggcggtgtcgatttacggcttaaattttctggcgattcactgggtgatctctatgaactgacgggcgttctgctgcccgataccccgccgtttgaaacggatggtcggctggtagcgaaaatcgacactgaaaaatcgtcggtctttgattatcgcggttttaatgggcgaattggcgatagcgatatccacggttctctggtctacaccaccggaaagccacgaccaaaactggaaggtgatgtcgagtcgcggcaattgcggctggcggacctgggaccgttgattggcgttgattccgggaaaggggcagaaaagtcgaaacggtctgaacagaagaagggcgaaaaaagcgttcagcctgcgggcaaagtgctgccttatgaccgcttcgaaaccgataaatgggacgttatggatgccgatgttcgcttcaaagggcggcgcattgagcatggcagtagcctgccgattagcgatctttctactcatatcatcctcaaaaatgctgacctgcgcctgcaaccgctgaaatttggcatggcgggcggcagcattgcgacgaatattcatctggaaggcgataaaaagccgatgcaggggcgggcagatattcaggctcgtcgactgaaactgaaagaactgatgcccgatgtggaactgatgcagaagacgctgggggaaatgaacggtgacgcggaactacgcggtagcggtaactcggtggcggcgcttttaggcaacagtaacggcaacctgaaactgttgatgaatgacgggctggtgagccgcaacctgatggagattgttgggctgaatgtcggcaactacattgtcggtgcgatatttggtgacgatgaggtgcgggtgaactgcgcggcggcgaatctgaatattgccaacggcgtggcgcgcccgcagatttttgctttcgatactgagaacgcgttgattaatgttaccggcacggcaagttttgcttcagaacagctggatttgactattgatccggagagtaaagggattcggattatcacactgcgttcgccgctgtatgtgcgtgggacgtttaaaaatccgcaggctggggtgaaagccggaccgctgattgcccgtggtgctgttgctgcggcactggcaacgctggtaacaccgacggcggcgttactggcactgatctcaccttccgaaggggaggctaatcagtgtcggacgatattgtcgcagatgaagaagtga

SEQ ID NO: 483730 - DNA, 768 bp, Shigella sonnei
atgataaggcaggttatccagcgaataagcaaccctgaagcaagcatcgagagcttgcaggaacggcgtttttggttgcagtgtgagcgtgcttacacctggcagccgatctatcaaacatgcggacggttaatggccgtggagctattaacggtggtcacgcatcccttgaacccttcgcaacgcctgccgccggatcgctattttactgaaatcaccgtcagccatcggatggaggttgtgaaagagcagattgatttgctggcgcaaaaagccgacttctttgtagagcacgacctgctggcatcggtcaatattgatggccctacgctcatcgccctgcgtcagcaaccaaaaatcctgcgccaaattgagcgtcttccctggctgcgtttcgaactggtggaacacatccgcctgccgaaagattcaacctttgcctcgatgtgtgaatttggcccgctgtggctggatgattttggcaccgggatggcaaatttctctgcgctaagtgaagtgcgttatgactacatcaaaatcgcgcgagagctgttcgtgatgctgcgtcagtcgccggaaggccgcacactcttttctcagcttttacatctaatgaatcgctattgtcgcggggtgattgtcgagggcgtagaaacaccggaagagtggcgtgatgttcagaactcgcccgcattcgccgcacaaggctggtttctttcacgcccggcaccgatggaaacgctgaatacggcggttctggcgctataa

SEQ ID NO: 483731 - DNA, 930 bp, Shigella sonnei
atgtccaaaaagattgccgtgattggcgaatgcatgattgagctttccgagaaaggcgcggacgttaagcgcggtttcggcggcgataccctgaacacttccgtctatatcgcccgtcaggtcgatcctgcggcattaaccgttcattacgtaacggcgctgggaacggacagttttagccagcaaatgctggacgcctggcacggcgagaacgttgatacttccctgacccaacggatggaaaaccgtctgccgggcctttactacattgaaaccgacagcaccggcgagcgtacgttctactactggcggaacgaagccgccgccaaattctggctggagagtgagcagtctgcggcgatttgcgaagagctggcgaatttcgattatctctacctgagcgggattagcctggcgatcttaagcccgaccagccgcgaaaagctgctttccctgctgcgcgaatgccgcgccaacggcggaaaagtgattttcgacaataactatcgtccgcgcctgtgggccagcaaagaagagacacagcaggtgtaccaacaaatgctggaatgcacggatatcgccttcctgacgctggacgatgaagacgcgctgtggggtcaacagccggtggaagacgtcattgcgcgcacccataacgcgggcgtgaaagaagtggtggtgaaacgcggggcggattcttgcctggtgtccattgctggcgaagggttagtggatgttccggcggtgaaactgccgaaagaaaaagtgatcgataccaccgcagctggcgactctttcagcgccggttatctggcggtatgtttgacgggcggcagtgcggaaaacgcggcgaaacgcgggcacctgaccgcaagtaccgttattcagtatcgcggcgcgattatcccgcgtgaggcgatgccagcgtaa

SEQ ID NO: 483732 - DNA, 1497 bp, Shigella sonnei
atgcagggcacaaaaattcgacttttagcgggcggtttgctgatgatggccactgctggctatgtgcaggcagatgcgctccagcctgatccagcatggcaacaggggacgctttccaacggtttacagtggcaagtgctgaccaccccccagcgtcccagcgatcgtgttgaaattcgcctgctggttaatatcggttcgctcgccgaaagtacacaacagagcggttacagtcacgccatccctcgtattgcgctaacgcaaagcggtggccttgacgcagcacaggcgcgttcattgtggcagcaggggatcgaccctaaacgcccgatgccgccggtaattgtctcttatgacaccacgctgtttaatctgagtttgcccaataaccgtaacgatttgctgaaagaagcgctctcttatctggcaaatgccactggcaaattgaccatcacaccagaaaccatcaaccacgcgctgcaaagtcaggacatggtggcaacctggcctgccgatactaaagagggctggtggcgctatcgtctgaaagggtcaaccttgttaggtcacgatcctgccgatccgctgaaacaacccgttgaagcggaaaaaattaaagatttctatcagaaatggtacaccccggatgcaatgacgctactggtggtgggaaacgtggatgcgcgctcggttgtcgaccaaatcaacaaaacgtttggcgaactgaaaggcaaacgtgaaacgccagctccggtgccgacgctttctccgctgcgtgcggaagcggtgagtattatgactgacgcggtgcgtcaggaccggttatctatcatgtgggatacgccgtggcagccgattcgtgaatcagccgcactgctgcgctactggcgtgcggacctggcccgcgaggcgctgttctggcatgttcagcaagcgttaagcgccagtaacagcaaagacatcggtcttggatttgactgccgtgtgctgtatctgcgtgcgcagtgtgccatcaacatcgaatcaccaaacgacaagctgaacagcaaccttaatctggtggcgcgtgaactggcgaaggttcgcgataaaggtctgccggaagaagagttcaatgcgttagtggcgcaaaagaaactggagctgcagaaactgtttgccgcctatgcgcgggctgataccgatattctgatgggtcagcggatgcgttcgctgcaaaatcaggtcgtcgatatcgcgccggagcagtatcagaaactgcggcaggatttccttaacagcctgacggtggagatgttaaatcaggatctgcgtcagcagttgtcgaatgatatggcgttaatactgctgcagccgaaaggcgagccggaatttaacatgaaagcgttgcaggcggcctgggatcaaatcatggccccatcgactgctgctgccgccacctctgtcgccacggatgacgtacatcctgaagtgacggatattccacctgcacagtaa

SEQ ID NO: 483733 - DNA, 1287 bp, Shigella sonnei
atgaaaacctctctgtttaaaagcctttactttcaggtcctgacagcgatagccattggtattctccttggccatttctatcctgaaataggcgagcaaatgaaaccgcttggcgacggcttcgttaagctcattaagatgatcatcgctcctgtcatcttttgtaccgtcgtaacgggcattgcgggcatggaaagcatgaaggcggtcggtcgtaccggcgcagtcgcactgctttactttgaaattgtcagtaccatcgcgctgattattggtcttatcatcgttaacgtcgtgcagcctggtgccggaatgaacgtcgatccggcaacgcttgatgcgaaagcggtagcggtttacgccgatcaggcgaaagaccagggcattgtcgccttcattatggatgtcatcccggcgagcgtcattggcgcatttgccagcggtaacattctgcaggtgctgctgtttgccgtactgtttggttttgcgctccaccgtctgggcagcaaaggccaactgatttttaacgtcatcgaaagtttctcgcaggtcatcttcggcatcatcaatatgatcatgcgtctggcacctattggtgcgttcggggcaatggcgtttaccatcggtaaatacggcgtcggcacactggtgcaactggggcagctgattatctgtttctatattacctgtatcctgtttgtggtgctggtattgggttcaatcgctaaagcgactggtttcagtatcttcaaatttatccgctacatccgtgaagaactgctgattgtactggggacttcatcttccgagtcggcgctgccgcgtatgctcgacaagatggagaaactcggctgccgcaaatcggtggtggggctggtcatcccgacaggctactcgtttaaccttgatggcacatcgatatacctgacaatggcggcggtgtttatcgcccaggccactaacagtcagatggatatcgtccaccaaatcacgctgttaatcgtgttgctgctttcttctaaaggggcggcaggggtaacgggtagtggctttatcgtgctggcggcgacgctctctgcggtgggccatttgccggtagcgggtctggcgctgatcctcggtatcgaccgctttatgtcagaagctcgtgcgctgactaacctggtcggtaacggcgtagcgaccattgtcgttgctaagtgggtgaaagaactggaccacaaaaaactggacgatgtgctgaataatcgtgcgccggatggcaaaacgcacgaattatcctcttaa

SEQ ID NO: 483734 - DNA, 1950 bp, Shigella sonnei
atggtggcagccgttgtcctggtgttcgtttttattttttgcaccgttttgctgttccatctggtccagcagaatcgctataacacggctacgcaactggaaagcattgctcgctctgtccgcgaacccttatcttcagctattttgaaaggcgatattcccgaagcggaagctattcttgccagcattaaaccggcaggcgtggtcagccgtgccgatgtagtgctgcctaaccagttccaggcgctgcgtaaaagttttattccagagcgcccggtgccgataatggttactcgcctgtttgagctaccggttcaaatctcgctgggcgtttactcgctcgaacgtccggcaaacccgcagccaattgcctatctggtactacaggcggattccttccgtatgtataagttcgtgatgagcaccctctcaacgttagtgaccatttacttacttttgtcgcttatcctgaccgtcgccatcagctggtgcattaaccgcctgattttgcatccgttacgcaatattgctcgcgaacttaacgccatcccagcccaggagcttgttggtcaccaactggcattaccgcgtctgcatcaggacgatgaaatcggtatgttggtgcgcagttacaacctcaaccagcaattgctgcagcgccattatgaagaacagaacgaaaatgcgatgcgcttcccggtgtcggatttgccgaacaaagccttgctgatggagatgctggagcaggttgtcgcgcgtaaacaaaccaccgcgctgatgatcatcacctgtgaaaccctgcgtgatactgcgggcgtgctgaaagaggcgcaacgagaaattctgctgctgacgctggtggaaaaactcaaatcggtactgtcgccacgtatgatcctcgcgcagattagcggttatgactttgctgtcattgccaacggtgtacaggaaccgtggcacgcaatcaccttaggtcagcaagtgctcaccatcatgagcgagcgcctgccgattgaacgtattcaactccgtccgcactgtagcattggcgtggcgatgttctacggcgatctcaccgccgaacagctttacagtcgcgctatttctgcggcatttaccgctcgccataaaggcaagaatcagattcagttctttgatccgcagcagatggaagccgcccagaagcggttgacggaagagagcgatatccttaatgcactggaaaatcatcagtttgctatttggttacagccacaggtcgagatgaccagcggtaaactggtcagtgcggaagtgttactgcgtatccagcaaccggatggcagttgggacctgccggatggcttaatcgatcgcattgagtgctgtgggctgatggttaccgtcggtcactgggtgctggaagagtcctgtcgattgcttgcagcctggcaagagcgcggcattatgctgcccttgtcggtaaacctctctgcgctgcaactgatgcacccaaatatggtggcggatatgctggaactgttaacccgctatcgcattcagccgggaacactgattctggaagtgacagaaagccgacgtattgacgaccctcatgctgcggtggcaatcctccgtccgctgcgcaatgccggagttcgggtggcgctggatgatttcggcatgggctacgcagggctgcgtcagctgcagcatatgaaatcgttgccaatcgacgtactgaaaatcgacaaaatgtttgttgaaggcttgccggaagatagcagcatgattgctgcaattatcatgctggcgcagagcctgaacttacaaatgattgccgaaggcgtggagactgaagcacaacgcgactggctggcaaaagcgggcgttggtattgcccagggcttcctttttgctcacccactccctattgaaatcttcgaagagagttacctggaagaaaagtag

SEQ ID NO: 483735 - DNA, 1749 bp, Shigella sonnei
gtgctggaaaccgctaaccgcctgcgagaaagcggcaaagaggcagaagcggaagcgatgctgcgccagcaaccaccttccacgcgtattgacctcacgctggctgactgggcgcaacaacgacgtgattacaccgccgcccgcgctgcatatcagaatgtcctgacgcgggagccagctaacgccgacgccattcttggtctgacggaagtggatattgctgccggtgacaaagcggcggcacgtagccagctggcgaaactgcccgctaccgataacgcctcgctgaacacacagcggcgcgtggcgctggcacaggcgcagcttggcgataccgcagcagcgcagcggacgtttaataagttgatcccgcaggcaaaatctcagccaccgtcgatggaaagcgcgatggtgctgcgtgatggtgcgaagtttgaagcgcaggcgggcgatccaacgcaggcgctggaaacctacaaagacgccatggtcgcatccggtgtgactacgacgcgtccgcaggataacgacacctttacccgactgacccgtaacgacgagaaagatgactggctgaaacgtggcgtgcgcagcgatgcggcggacctctatcgccagcaggatcttaacgtcacccttgagcacgattactggggttcgagcggcaccggtggttactccgatctgaaagcgcacactaccatgttgcaggtggatgcgccgtattctgacgggcggatgttctttcgcagtgatttcgtcaatatgaacgtcggcagtttctccactaatgccgatggcaaatgggatgacaactggggcacctgtacattacaggactgtagcggcaaccgcagccagtcggattccggtgccagcgtggcggtcggctggcgaaatgacgtctggagctgggatatcggtaccacgccgatgggcttcaacgtggtggatgtggtcggcggcatcagttacagcgatgatatcgggccgctgggttacaccgttaacgcccaccgtcggcccatctccagttctttgctggcctttggtgggcaaaaagactccccgagcaataccgggaaaaaatggggtggcgtacgtgccgacggtgtggggctaagtctgagctacgataaaggtgaagcaaacggcgtctgggcatcgcttagtggcgaccagttaaccggtaaaaatgtcgaagataactggcgcgtgcgctggatgacgggctattactataaggtcattaaccagaacaatcgccgcgtcacaatcggcctgaacaacatgatctggcattacgacaaagatctgagtggctactcactcggtcagggcggttactacagtccgcaggaatacctgtcgtttgccataccggtgatgtggcgggagcgcacggaaaactggtcgtgggagctgggggcgtctggctcgtggtcgcattcacgcaccaaaaccatgccgcgttatccgctgatgaatctgatcccgaccgactggcaggaagaagctgcgcggcaatccaacgatggcggcagcagtcagggcttcggctacacggcgcgggcattacttgaacgacgtgttacttccaactggtttgttggcacggcaattgatatccagcaggcgaaagattacgcacccagccatttcctgctctacgtacgttattccgccgccggatggcagggtgacatggatttaccgccgcagccgctgataccttacgccgactggtaa

SEQ ID NO: 483736 - DNA, 1647 bp, Shigella sonnei
atgcgcaaattcacactaaacatattcacgctttccctcggtctggccgtcatgccgatggtcgaggcagcaccaaccgctcagcaacagttgctggagcaagttcggttaggcgaagcgacccatcgtgaagatctggtgcaacagtcgttatatcggctggaacttattgatccgaataacccggacgtcgttgccgcccgtttccgttctttgttacgtcagggcgatattgatggcgcgcaaaaacagctcgatcggctgtcgcagttagcgccgagttcaaatgcgtataaatcgtcgcggactacgatgctactttccacgccggatggtcgtcaggcactgcaacaggcacgattgcaggcgacgaccggtcatgcagaagaagctgtggcgagttacaacaaactattcaacggtgcgccgccggaaggtgacattgctgtcgagtactggagtacggtggcgaaaattccggctcgccgtggcgaagcgattaatcagttaaaacgcatcaatgcggatgcaccgggcaatacgggcctgcaaaacaatctggcgctattgctgtttagtagcgatcgccgtgacgaaggttttgccgtcctggaacagatggcaaaatcgaacgccgggcgcgaaggggcctctaaaatctggtacgggcagattaaagacatgcccgtcagtgatgccagtgtgtcggcgctgaaaaaatatctctcgatctttagtgatggcgatagcgtggcggctgcgcaatcgcaactggcagaacagcaaaaacagctggccgatcctgctttccgcgctcgtgcgcaaggtttagcggcggtggactctggtatggcgggtaaagccattcccgaactacaacaggcggtgcgggcgaacccgaaagacagtgaagctctgggggcgctgggccaggcgtattctcagaaaggcgatcgcgccaatgcagtggcgaatctggaaaaagccctcgcactggacccgcacagcagcaacaacgacaaatggaacagtctgctgaaagtaaaccgctactggctggcgatccagcagggcgatgctgcgctgaaagccaataatcctgaccgggcagaacgcctgttccagcaggcgcgtaatgtcgataacaccgacagttatgcagtgctggggctgggcgatgtggcgatggcgcgaaaagattatcccgccgccgaacgttattatcagcagaccttgcgtatggacagcggcaacactaacgccgtgcgcgggctggcaaatatttaccgccagcaatcgccagaaaaagctgaagcgtttatcgcctcgctctctgccagtcagcggcgtagcattgatgatatcgaacgcagcctgcaaaacgaccgtctggcacagcaggcagaggcactggaaaaccagggcaaatgggcgcaggcggcagcacttcagcggcaacgactggcgctggaccccggcagcgtatggattacttaccgactttcgcaggatctctggcaggccggacaacgcagccaggccgatacgttaatgcgcaatctggcgcagcagaagtcgaacgacccagagcaggtttacgcttacgggctgtacctacgcttacgggctgtacctctctggtcatga

SEQ ID NO: 483737 - DNA, 1107 bp, Shigella sonnei
atgaatgtgttgcgtagtggaatcgtgacgatgctgctgttggctgcctttagtgttcaggcagcctgtacctggcctgcctgggagcagtttaaaaaggattacatcagtcaggaagggcgcgtcatcgcccccagcgacgcgcgcaaaatcaccacctccgaagggcaaagttacggtatgttctttgccctggcggctaacgaccgtgtagctttcgataatattctcgactggacgcagaacaatctcgctcagggctctttaaaagaacgtttgcccgcctggctgtggggcaagaaagagaacagtaagtgggaagtgctggacagcaattcggcctccgatggtgatgtctggatggcctggtcgttgctggaggcggggcgtttgtggaaagagcagcgttataccgacatcggcagcgcgttgctaaaacgtatcgcgcgggaggaagtggtgacggtgcctgggctgggttccatgttgttaccgggcaaagtgggttttgctgaggataacagctggcgttttaaccccagctacctgccgccgacgctggcgcagtatttcacccgctttggcgcgccgtggaccacgctgcgcgaaaccaatcaacgtttattgctggaaaccgccccgaaaggtttttcgccagactgggtgcgctatgagaaagacaaaggctggcagctaaaagccgaaaaaacattgatcagcagctacgacgctatccgcgtttacatgtgggtaggcatgatgcctgacagcgatccgcaaaaagcgcggatgctcaaccggtttaaaccgatggcgacattcactgagaaaaacggttatccgccggaaaaagtggatgtggctacggggaaagcgcagggtaaaggaccgatcggtttttctgccgccatgctgccctttttacaaaaccgcgatgcgcaggccgttcagcgccagcgcgtggccgataactttcccggcagcgatgcctattacaactatgtgctgaccctgtttggacaaggctgggatcaacaccgtttccgcttctcgacaaaaggtgagttattacctgactggggccaggaatgcgcaaattcacactaa

SEQ ID NO: 483738 - DNA, 2304 bp, Shigella sonnei
atggggatgagtgcgttcccctctttcatgacgcaggcgacgccagcaacgcaaccactgatcaatgctgagccagctgtagccgcccagacggaacaaaatccgcaggtggggcaagtgatgccgggcgtgcagggcgctgatgcgccagtcgtggcgcagaacggtccttcgcgtgatgtgaagctgacctttgcgcaaattgcgccgccgccgggcagcatggtgctacgtggcattaacccgaacggcagcattgagtttggtatgcgcagcgatgaagtggtgacgaaggcgatgctcaacctcgaatacacgccatcgccatcgttactgcctgtccagtcgcagttaaaggtttatctcaatgatgagctgatgggcgtgctgccagtgaccaaagaacagttgggtaaaaaaacgctggcgcaaatgcccattaacccactgtttattaccgacttcaaccgtgtgcggctggagtttgtcggccattatcaggacgtgtgcgaaaacccggccagcaccacgctttggctggatgttgggcggagcagtggactggatctgacctatcagaccctgaatgtgaagagtgacctgtcacacttcccggtgccattctttgacccgcgcgataaccgtactaacaccttgccgatggtctttgcgggtgcgccggatgttgggctgcaacaagcatctgccattgtcgcctcgtggtttggttcgcgttctggctggcgtgggcagaacttcccggtgctctataaccaattgccggatcgcaatgccattgtctttgcaaccaacgacaaacggccggacttcctgcgcgatcatccggcggtaaaagccccggtgattgagatgattaaccatccgcagaatccttacgtcaaactgctggtggtgtttggtcgtgacgacaaagacctgttgcaggcagcgaaaggtatcgctcagggtaacattctgttccgtggtgaaagcgtggtagtgaatgaagtgaaaccgctgctaccgcgtaagccgtacgatgcgccgaactgggtacgtaccgatcgtccggtcacatttggcgaactgaaaacctatgaagaacagttacaatccagcggtcttgagccagcagcgattaacgtttcgctaaacctgccgccggatctctacctgatgcgcagtaccggcattgatatggatattaattaccgctacaccatgccgccggtgaaagacagttcgcggatggatatcagcctgaataaccagttcctgcaatccttcaacctgagcagtaaacaggaggcgaaccgcctgctgctgcggattccggtattacaaggtttgctggatggcaaaacggatgtctctattccggcgctgaaactgggcgcgaccaaccagctgcgcttcgactttgagtatatgaacccgatgccgggcggttcggtggataactgtattaccttccagccggtgcagaatcatgtggtgattggtgacgattccaccatcgacttctcgaagtattaccacttcatcccgatgccggatctacgcgcctttgctaacgcgggcttcccgttcagccggatggcggatctgtcgcaaaccatcaccgtgatgccgaaaacgcctaacgaagcacagatggaaacgttgctgaatactgttggttttatcggcgcacagacgggcttcccggcgattaatctgacggtgaccgatgatggcagcaccattcagggcaaagatgccgacatcatgatcatcggtggtatcccggacaaattaaaagacgataagcagatcgacctgttggtgcaggcgaccgaaagctgggtgaaaacaccgatgcgccagaccccgttccccggcattgtgccggacgagagcgatcgtgcggcagaaacccagtcaacgctgacctcttccggtgcgatggcggcggtgattggcttccagtcgccgtataacgaccagcgcagcgtgattgcgctgctggcagatagcccacgcggttatgaaatgcttaacgatgcggtgaacgatagcggcaaacgcgccaccatgttcggttcggtcgcggtgatccgcgagtccggtatcaacagcctacgtgttggcgacgtttattacgtaggtcatctgccgtggttcgagcgcttgtggtatgcgctggcaaaccatccgattctgctggcggtgctggcggcaatcagtgtgatattgctggcatgggtactgtggcgtctgctgcgaattattagtcgtcgtcgtcttaacccggataacgagtaa

SEQ ID NO: 483739 - DNA, 2262 bp, Shigella sonnei
atgaacgagctgcctgagcgcgttagccataaaacacagcatcttgatgagaaaaaagagctcggtcatttgagtgccggggcgcggcggttgatcctcggtatcatcgtcaccttctcgctgattctggcgttaatctgcgttactcaaccgtttaacccgctggcgcagtttatcttcctgatgctgctgtggggtgtagcgctgatcgtacggcggatgccggggcgcttctcggcgctaatgttgattgtgctgtcgctgaccgtttcttgccgttatatctggtggcgttacacctctacgctgaactgggacgatccggtcagcctggtgtgcgggcttattctgctcttcgctgaaacgtacgcgtggattgtgctggtgctcggctacttccaggtagtatggccgctgaatcgtcagccggtgccattgccgaaggatatgtcgctgtggccgtcagtggatatctttgtcccgacttacaacgaaaatctcaatgtggtgaaaaataccatttacgcctcgctgggtatcgactggccgaaagacaaactgaacatctggatcctcgatgacggcggcagggaagagtttcgccagtttgcgcaaaacgtgggggtgaaatatatcgcccgcaccactcatgaacatgcgaaagcgggcaacatcaacaatgcgctgaaatatgccaaaggcgagttcgtgtcgattttcgactgcgaccacgtaccaacgcgatcgttcctgcaaatgaccatgggctggttcctgaaagagaaacagctggcgatgatgcagactccacaccacttcttctcgccggacccgtttgaacgcaacctgggacgttttcgtaaaacgccgaacgaaggcacgctgttctatggtctggtgcaggatggcaacgatatgtgggacgccactttcttctgcggttcctatgcggtgattcgtcgtaagccgctggatgaaattggcggcattgctgtcgaaaccgtgactgaagatgcgcatacttctctgcgtttgcaccgtcgtggctatacctccgcgtatatgcgtattccgcaggcggcggggctggcgaccgaaagtctgtcggcgcatatcggtcagcgtattcgctgggcgcgcgggatggtacaaatcttccgtctcgataacccgctcaccggtaaaggactgaagtttgctcagcggctgtgctacgtcaacgccatgttccacttcttgtcgggcattccacggctgatcttcctgactgcgccgctggcgttcctgctgcttcatgcctacatcatctatgcgccagcgttgatgatcgccctattcgtgctgccgcatatgatccatgccagcctgaccaactcgaagatccagggcaaatatcgccactctttttggagtgaaatctacgaaacggtgctggcgtggtatatcgcaccaccgacgctggtggcgctgattaacccgcacaaaggcaaatttaacgtcaccgccaaaggtggactggtggaagaagagtacgtcgactgggtgatctcgcggccctacatcttccttgttctactcaacctggtgggcgttgcggtaggcatctggcgctacttctatggcccgccaaccgagatgctcaccgtggtcgtcagtatggtgtgggtgttctacaacctgattgttcttggcggcgcagttgcggtatcggtagaaagcaaacaggtacgccgatcgcaccgcgtggagatgacgatgcccgcggcaattgcccgcgaagatggtcacctcttctcgtgtaccgttcaggatttctccgacggtggtttggggatcaagatcaacggtcaggcgcagattctggaagggcagaaagtgaatctgttgcttaaacgcggtcagcaggaatacgtcttcccgacccaggtggcgcgcgtgatgggtaatgaagttgggctgaaattaatgccgctcaccacccagcaacatatcgattttgtgcagtgtacgtttgcccgtgcggatacatgggcgctctggcaggacagctacccggaagataagccgctggaaagtctgctggatattctgaagctcggcttccgtggctaccgccatctggcggagtttgcgccttcttcggtgaagggcatattccgtgtgctgacttctctggtttcctgggttgtatcgtttattccgcgccacccggagcggagcgaaacggcacaaccatcggatcaggctttggctcaacaatga

SEQ ID NO: 483740 - DNA, 165 bp, Shigella sonnei
atgagtatcctgacccggtggttgcttatcccgccggtcaacgcgcggcttatcgggcgttatcgcgattatcgtcgtcacggtgcgtcggctttcagcgcgacgctcggctgtttctggatgatcctggcctggatttttattccgctggagcacccgcgctag

SEQ ID NO: 483741 - DNA, 753 bp, Shigella sonnei; identical to SEQ ID NO: 458905

SEQ ID NO: 483742 - DNA, 189 bp, Shigella sonnei; identical to SEQ ID NO: 472432

SEQ ID NO: 483743 - DNA, 363 bp, Shigella sonnei
atgtttctaaactatttcgcgttgggagtgctgatcttcgtctttctggtgattttttatggaatcatcgcgatacatgacatcccttatctgattgccaaaaagcgcaaccatccccatgccgacgctattcatacggcgggctgggtgagcctgtttaccctgcatgttatctggccgttcctgtggatctgggcgacgctctatcaaccggagcgcgggtggggcatgcagtcacatgttgcgtcgcaggagaaagcgactgacccggaaatcgccgcactttctgaccgaatttcccggctagagcatcaactcgccgccgagaaaaagactgactattccacgttcccggagatctaa

SEQ ID NO: 483744 - DNA, 1914 bp, Shigella sonnei
atgtcatccgatattaagatcaaagtgcaaagctttggtcgtttcctcagcaacatggtgatgccaaatatcggcgcgtttatcgcgtggggtatcatcaccgcgttatttattccaacagggtggttaccgaacgagacgctggcgaagctggtcgggccgatgatcacttatctcctgccgctgctgatcggttataccggtggtaagctggtaggcggcgaacgtggcggcgtagtcggtgccatcaccaccatgggcgttatcgtcggcgcagacatgccgatgttcctcggttctatgattgcaggtccgctgggcggctggtgcattaagcacttcgaccgctgggtagacggtaagatcaaatccggttttgagatgctggtgaataacttctccgcaggcatcatcgggatgatcctcgctattctggcattcctcggcattggcccgattgttgaagccctgtccaaaatgctggctgcgggcgttaacttcatggttgtccatgacatgctgccgctggcgtctatctttgttgaaccggcgaaaatcctgttcctcaacaacgccattaaccacggtatcttctcgccgctgggtattcagcagtcccatgaactgggtaaatcaatcttcttcctgattgaagctaacccaggtccaggtatgggcgtgctgctggcgtacatgttctttggtcgtggtagcgctaaacagtctgcgggcggtgcggcaatcatccacttcctgggtggtatccacgaaatctacttcccgtatgtgctgatgaatccgcgtctgatcctcgcagtcatcctcggcggtatgactggcgtgttcacgctgactatcctgggcggtggtctggtttctccggcatctccgggttctatccttgctgtactggcgatgacaccaaaaggtgcttatttcgctaacatcgcgggtgtgtgtgcggcgatggctgtctccttcgttgtctctgctattttgctgaaaaccagcaaagtgaaagaagaagatgatattgaagcagcaactcgtcgtatgcaggacatgaaagctgagtctaaaggcacatctccgctgtctgcgggcgatgtgactaacgacctgagccacgtacgtaaaatcatcgttgcctgtgacgccggtatgggttccagtgcgatgggcgcaggcgtgctgcgtaagaaaattcaggatgcaggtctgtcacagatttcggtcactaacagcgcgatcaacaacctgccgccagatgtggacctcgtcatcactcaccgtgacctgaccgaacgcgctatgcgccaggttccgcaggcgcagcatatttcgctgaccaacttcctcgacagcggcctgtacaccagcctaaccgaacgtctggttgctgcccagcgccatactgaaaacgaagtgaaagtgaaagacagtctgaaagacagctttgacgattccagtgctaacctgttcaaactgggcgcggagaacatcttcctcggtcgcaaagcagcaaccaaagaagaagcgattcgttttgctggcgagcagctggtgaaaggcggttacgttgagccggaatacgttcaggcgatgctggatcgtgaaaaactgaccccgacttatctgggtgagtctatcgcggtgccacacggtacggttgaagcgaaagatcgcgtactgaaaacgggcgtggtgttctgccagtacccggaaggcgtgcgcttcggtgaagaagaagatgacattgcccgtctggtgattggtattgcagcccgtaacaacgagcacattcaggttatcaccagcctgaccaatgcactggatgatgagtccgtcatcgagcgtctggcacacaccaccagcgtggatgaagtgctggaactgttggcaggtcgtaagtaa

SEQ ID NO: 483745 - DNA, 1149 bp, Shigella sonnei
atgaaagcattacattttggcgcaggtaatatcggtcgtggctttatcggtaaactgctggcagacgcgggtatccaactgacgtttgccgatgtcaatcaggtggtacttgatgccctgaatgcccgtcatagctatcaggttcatgtggttggtgaaaccgagcaggtagataccgtttccggcgtcaatgctgtcagcagcattggtgatgatgtcgttgatctgattgctcaggtcgatttagtcactaccgccgttggcccggttgtgctggaacgtattgctccggctatcgccaaagggctggtgaaacgcaaagaacaaggtaatgaatccccgctgaacatcatcgcctgtgaaaacatggtacgcggtaccacgcagctgaaaggccatgtgatgaacgccctgccggaagacgccaaagcgtgggtagaagaacacgttggctttgtcgattccgccgttgaccgcatcgtaccgccttcggcttcggcaactaacgatccgctggaagtgacggtagaaactttcagcgaatggattgtcgataaaacgcagttcaaaggcgcactgccgaacatcccaggcatggagttaaccgacaacctgatggcatttgtcgaacgtaaactcttcaccctgaacacgggtcatgctataaccgcgtacctcggaaaactggccggtcatcagaccattcgtgacgctattctcgacgagaaaatccgcgcggtggtaaaaggtgcgatggaagaaagtggtgcggtactgatcaagcgctacggctttgacgcagacaaacatgcggcgtacatccagaaaatcctcggtcgttttgagaacccgtatctgaaagatgatgtagagcgcgtaggccgtcagccgctgcgtaaactgagtgctggcgaccgtctgatcaagccattgctcggtacgctggaatacagccttccgcacaagaatctgattcaggggattgctggtgcaatgcacttccgcagtgaagatgatccgcaggctcaggaactggcagcactgatcgctgacaaaggtccgcaggcggcgctggcacagatttccgatcttgatgccaacagcgaggttgtatccgaggcggtaaccgcttataaagcaatgcaataa

SEQ ID NO: 483746 - DNA, 588 bp, Shigella sonnei
atggtggaccaggcgcaggacaccctgcgcccgaataacagattgtcagatatgcaggcaacaatggaacaaacccaggcctttgaaaaccgtgtgcttgagcgtctgaatgctggcaaaaccgtgcgaagctttctgatcaccgccgtcgagcttttgaccgaggcggtaaatcttctggtgcttcaggtattccgcaaagacgattacgcggtgaagtatgctgtagaaccgttactcgacggcgacggtccgctgggcgatctttctgtgcgtttaaaactcatttacgggttgggcgtcattaaccgccaggaatacgaagatgcggagctgctgatggcattgcgtgaagaactaaatcacgacggcaacgagtacgcctttaccgacgacgagatccttggaccctttggtgaactgcactgcgtggcggcgttaccaccgccgccacagtttgaaccagcagactccagtttgtatgcaatgcaaattcagcgctatcaacaggctgtgcgatcaacaatggtcctttcactgactgagctgatttccagaatcagcttaaaaaaagcctttcaaaagtaa

SEQ ID NO: 483747 - DNA, 210 bp, Shigella sonnei; identical to SEQ ID NO: 472094

SEQ ID NO: 483748 - DNA, 363 bp, Shigella sonnei
atgaaagaagtcgaaaaaaacgaaatcaaacgtctcagcgatcgtctggacgccatccgccaccagcaggccgatctgtcgctggttgaagccgcagacaaatatgccgagctggaaaaagagaaagccacgctggaagcagaaattgctcgcctgcgtgaagttcatagccaaaaactgagtaaagaagcacagaagctgatgaagatgccgtttcagcgcgcaattaccaaaaaagagcaggctgatatgggcaagctgaagaaaagtgttcgcggactggtggttgtgcacccaatgaccgcgctgggccgtgaaatgggcctgcaggagatgactggattctctaagactgcgttttaa

SEQ ID NO: 483749 - DNA, 4851 bp, Shigella sonnei
atgaacaaaatatttaaagttatctggaaccctgcgacagggaattatactgttaccagcgaaacggcaaaaagccgtggcaagaaatctgggcgcagtaagctgttaatttctgcgctggttgcgggtggaatgttgtcgtcgtttggggcattggcgaatgccgggaatgacaacggccagggtgttgattacggtagtggatcagctggcgacagctgggttgctataggcaaaggggcgaaagcaaatacttttatgaacaccagtggttccagtactgctgtgggttatgacgctatagctgaaggccaatatagctctgccatcgggtcaaaaacccatgcgattggtggtgcatcaatggcctttggggttagtgcaatatcagaaggcgatagaagtatagcactgggtgcctcttcgtattcattaggccaatactcaatggccctcggccgttattcaaaagcattgggtaaattgtctattgctatgggggactcttccaaagcggaaggagcaaacgccattgccctgggaaatgccactaaagctactgagattatgagtattgctcttggcgacaccgccaatgcgtcaaaagcgtattcaatggcgctgggagcaagtagcgtcgcatctgaagaaaacgcaattgccctggggcgtagcagtgtagctagcggtactgacagcctcgcatttggcagacaatcacttgccagcgcagcgaacgctattgcgataggtgctgagaccgaagccgctgaaaatgcaactgctattggcaataatgcgaaggcaaaagggactaatagcatggcaatggggttcggaagccttgccgataaagtcaatactatcgcattaggaaatggcagccaggctctggcagataatgcaatcgccataggccagggcaacaaagctgatggcgtggatgccatcgctctgggtaatggtagccagtcgagaggcttaaacaccattgccttaggcacagccagtaatgcaactggtgataagagtcttgcgcttggtagtaatagcagtgccaacggtattaactctgtcgcgctgggcgcagattccattgcggatttagacaataccgtctctgtcggcaatagttcattaaaacgcaagatcgttaatgtgaaaaatggcgcgatcaagtctgacagttacgatgccattaatggttcacagctttatgccattagcgactcggtagcaaaaaggcttggaggaggggctgcagtagatgttgatgacggtactgttacagcaccaacctacaatttaaaaaatggtagcaaaaataacgtaggggctgcgctcgctgtacttgatgaaaacaccctgcaatgggaccaaaccaaaggcaaatacagcgctgctcatggtactagtagcccaactgccagcgtaatcaccgatgttgcggatggcacgatttcagcctccagtaaggatgcggttaacggttcccaactgaaagctaccaatgacgatgtcgaagccaacaccgccaatatcgctactaataccagcaacattgccacgaatacagcaagtattgccaccaataccaccaatatcaccaacctgacggattccgttggtgaccttcaggctgatgccctgctctggaacgaaactaaaaaggcattcagtgcagctcacggccaggataccaccagcaaaatcaccaacgttaaagatgccgacctgacggctgacagcactgatgctgttaacggctctcagctgaaaaccaccaacgatgctgtggcgacgaataccaccaatatcgccaataacacttccaatattgccactaacaccaccaacatctctaatctgactgagacggtgactaatcttggtgaggatgcgctgaaatgggataaggacaatggtgtattcacggcagctcatggcaccgagaccaccagcaaaatcaccaacgttaaagatggcgacctgacgactggcagcaccgatgccgttaacggctctcagctgaaaaccaccaacgatgccgtggcgacgaataccaccaatatcgccactaacaccaccaacatctctaatctgactgagacggtgactaatcttggtgaggatgcgctgaaatgggataaggacaatggtgtcttcactgcagctcatggcaacaataccgccagcaaaatcaccaatatcctggacggcacagtcactgcaaccagttccgatgccattaacggtagccagctttatgacttaagcagcaatatcgccacctacttcggcggcaatgcttctgtgaatactgacggtgtgtttaccggtccaacctacaaaatcggtgaaacaaattattataacgtcggcgatgcactggctgcgattaactcctcatttagcacgtctctcggcgatgctctgctttgggatgccaccgcaggtaaattcagtgccaaacacggtactaatggtgacgcaagcgtgatcactgatgtcgcagatggtgaaatttcagactccagttctgacgcagtaaacggctcacaactccacggcgtgagcagttatgttgttgatgcgctggggggtggtgccgaagtcaatgcagacggcaccatcactgcgccgacgtacaccattgctaatgctgattacgataatgtcggtgatgccctgaatgctatcgataccactcttgacgacgctctgctctgggatgcggacgccggtgaaaatggtgcatttagcgccgctcacggaaaagataaaactgccagtgtaatcactaacgtcgctaacggtgcaatctctgctgccagcagcgacgcgattaacggctcacaactctataccaccaataagtacatcgctgatgcgctgggtggtgacgcagaagtcaacgctgacggcaccatcaccgcaccgacttacaccattgcgaacgccgagtacaacaacgtcggtgacgccctggatgcgcttgatgataacgccctgctgtgggatgagactgccaatggcggtgctggagcctacaatgccagccatgacggtaaagccagcatcatcactaatgtcgctaatggcagtattagtgaggacagtaccgatgcagtgaacggttctcagttgaatgcgacgaatatgatgattgagcagaacacccaaattatcaatcagctcgctggtaacaccgacgcaacctatatcgaagaaaatggcgctggtatcaactacgttcgtactaacgacaacgatttagcctttaacgatgcaagcgcctctggtgtcggcgctacagctgtaggttataacgctgtcgcgtctggtgccagcagcgtagccattggtcagaacagcagcagcaccgttgataccggtattgcgctgggtagcagctccgtttccagccgtgtgattgccaaaggttctcgtgacactagcgtaacggaaaatggcgtggtgattggttatgacaccactgacggcgaactgctaggtgcattgtcaattggtgatgacggtaaataccgccaaatcatcaacgtagctgatggttcagaagcccatgacgccgttacggttcgccagttgcagaacgctattggagcggtcgccactacgccaaccaagtactttcacgccaactcaacggcagaagactcactggccgttggtgaagactcgctggcaatgggtgcgaaaactgtcgttaatggtaatgcaggtattggtatcggtttgaacactctggttctagctgatgcgatcaacggcattgctatcggcagtaacgcacgcgcaaaccatgcaaacagtatcgcaatgggtaacggttctcagaccacccgtggtgcacagactggctacaccgcctacaacatggacgcaccgcagaactctgtaggtgagttttctgtcggtagtgaagacggtcaacgtcagatcacaaacgtcgcagctggttcagcggataccgatgcggttaacgtgggtcagttgaaagtcactgatgagcgcgtagcgcaaaatacccagagcattactaacctgaacaatcaggtcactaatctggatactcgcgttactaatatcgaaaacggtattggcgacattgtcaccaccggtagcaccaagtacttcaagaccaacaccgatggcgtagatgccaacgcccagggtaaagatagcgttgctattggttctggttccattgctgccgctgacaacagcgtcgcactgggtaccggttccgttgcagaggaagaaaatacaatctctgtaggttcttctactaaccaacgccgtatcaccaacgtagctgccggtgttaatgccaccgatgcggttaacgtgtcgcagctgaaatcttctgaagcaggcggcgtgcgctacgacaccaaagctgatggttctatcgactatagcaatatcaccctcggtggtggcaacggcagtacgactcgtatcagcaacgtctccgctggcgtcaacaacaacgacgcggtgaactacgcgcagttgaagcaaagcgtgcaggaaacgaagcaatacaccgatcagcggatggttgagatggataacaaactgtctaaaactgaaagcaagttgagcggtggtatcgcttctgcaatggcaatgaccggtctgccgcaggcttatacaccgggtgccagcatggcttctattggtggcggtacttacaacggtgaatcggcagttgctttaggtgtatcgatggtgagcgccaatggtcgttgggtctacaaattacaaggtagtaccaatagccagggtgaatactccgccgcactcggtgccggtattcagtggtaa

SEQ ID NO: 483750 - DNA, 1656 bp, Shigella sonnei
atgaatctctggcaacaaaactacgatcccgccgggaatatctggctttccagtctgatagcatcgcttcccatcctgtttttcttctttgcgctgattaagctcaaactgaaaggatacgtcgccgcctcatggacggtagcaatcgcccttgccgtggctttgctgttctataaaatgccggtcgctaacgcgctggcctcggtggtttatggcttcttctatggtttgtggcccatcgcgtggatcattattgcagcagtgttcgtctataagatctcggtgaaaaccgggcagtttgacatcattcgctcgtctattctttcgataacccctgaccagcgtctgcaaatgctgatcgtcggtttctgtttcggcgctttccttgaaggagccgcaggctttggcgcaccggtagcaattaccgccgcattgctggtcggcctgggttttaaaccgctgtacgccgccggactgtgcctgattgttaacaccgcgccagtggcatttggcgcgatgggcattccaatcctggttgccggacaagtaacaggcatcgacagctttgagattggccagatggtggggcggcagctaccgtttatgaccattatcgtgctgttctggatcatggcgattatggacggctggcgcggtatcaaggagacgtggcctgcggtcgtggttgcgggcggctcgtttgccatcgctcagtaccttagctctaacttcattgggccggagctgccggacattatctcttcgctggtatcactgctctgcctgacgctgttcctcaaacgctggcagccagtgcgcgtattccgttttggtgatttgggggcgtcaaagattgatatgacgctggcccacaccggttacactgcgggtcaggtgttacgtgcctggacaccgttcctgttcctgacagctaccgtaacactgtggagcatcccgccgtttaaagccctgttcgcatcgggtggtgcgctgtatgagtgggtgatcaacattccggtgccgtacctcgataaactggttgcccgtatgccaccagtggtcagcgaggctacagcctatgccgccgtgtttaagtttgactggttctctgccaccggcaccgccattctgtttgctgcactgctctcgattgtctggctgaagatgaaaccgtctgacgctatcagcaccttcggcagcacgctgaaagaactggctctacccatctactccatcggcatggtgctggcgttcgcctttatctcgaactattccggactgtcatcaacactggcactggcactggcgcacaccggtcatgcattcaccttcttctcgccgttcctcggctggctgggggtattcctgaccgggtcggatacctcatctaacgccctgttcgccgcgctgcaagccaccgcagcacaacaaattggcgtctctgatctgttgctggttgccgccaataccaccggtggcgtcaccggtaagatgatctccccgcaatctatcgctatcgcctgtgcggcggtaggcctggtgggcaaagagtctgatttgttccgctttactgtcaaacacagcctgatcttcacctgtatggtgggcgtgatcaccacgcttcaggcttatgtcttaacgtggatgattccttaa

SEQ ID NO: 483751 - DNA, 777 bp, Shigella sonnei
atgattgttttacccagacgcctgtcagacgaggttgccgatcgtgtgcgggcgctgattgatgaaaaaaacctggaagcgggcatgaagttgcccgctgagcgccaactggcgatgcaactcggcgtatcacgtaattcactgcgcgaggcgctggcaaaactggtgagcgaaggcgtgctgctcagtcgacgcggcggcgggacgtttattcgctggcgtcatgacacatggtcggagcaaaacatcgtccagccgctaaaaacgctgatggccgatgatccggattacagtttcgatattctggaagcccgctacgccattgaagccagcaccgcatggcatgcggcaatgcgcgccacacctggcgacaaagaaaagattcagctttgctttgaagcaacgctaagtgaagacccggatatcgcctcacaagcggacgttcgttttcatctggcgattgccgaagcctcacataacatcgtgctgctgcaaaccatgcgcggtttcttcgatgtcctgcaatcctcagtgaagcatagccgtcagcggatgtatctggtgccaccggttttttcacaactgaccgaacaacatcaggctgtcattgacgccatttttgctggtgatgccgacggggcgcgtaaagcaatgatggcgcaccttagttttgttcacaccaccatgaaacgattcgatgaagatcaggctcgccacgcacggattacccgcctgcccggtgagcataatgagcattcgagggagaaaaacgcatga

SEQ ID NO: 483752 - DNA, 1191 bp, Shigella sonnei; identical to SEQ ID NO: 472087

SEQ ID NO: 483753 - DNA, 474 bp, Shigella sonnei; identical to SEQ ID NO: 459283

SEQ ID NO: 483754 - DNA, 822 bp, Shigella sonnei; identical to SEQ ID NO: 459284

SEQ ID NO: 483755 - DNA, 1020 bp, Shigella sonnei
atgaaccaacgtaatgcttcaatgactgtgatcggtgccggctcgtacggcaccgctcttgccattaccctggcaagaaatggccacgaggttgtcctctggggccatgaccctgaacatatcgcaacgcttgaacgcgaccgctgtaacgccgcgtttctccccgatgtgccttttcccgatacgctccatcttgaaagcgatctcgccactgcgctggcagccagccgtaatattctcgtcgtcgtacccagccatgtctttggtgaagtgctgcgccagattaaaccgctgatgcgtcctgatgcgcgtctggtgtgggcgaccaaagggctggaagcggaaaccggacgtctgttacaggacgtggcgcgtgaggccttaggcgatcaaattccgctggcggttatctctggcccaacgtttgcgaaagaactggcggcaggtttaccgacggctatttcgttggcctctaccgaccagacctttgccgatgatctccaacaattgctgcactgtggcaaaagtttccgcgtttacagcaacccggatttcatcggtgtgcagcttggcggtgcggtgaaaaacgtcattgccattggcgcggggatgtccgacggtatcggttttggtgcgaatgcgcgtacggcactgatcacccgtgggctggctgaaatgtcgcgtcttggcgcggcgctgggtgccgatcctgccacctttatgggcatggcggggctgggcgatctggtgcttacctgtaccgacaaccagtcgcgtaaccgccgttttggcatgatgctcggtcagggcatggatgtacaaagcgcgcaggagaagattggtcaggtggtggaaggctaccgcaatacgaaagaagtccgcgaactggcgcatcgcttcggcgtagaaatgccaataaccgaggaaatttatcaagtattatattgcggaaaaaacgcgcgcgaggcagcattgacgttattaggtcgtgcacgcaaggacgagcgcagcagccactaa

SEQ ID NO: 483756 - DNA, 468 bp, Shigella sonnei
atgtcagaacaaaacaacactgaaatgactttccagatccaacgtatttataccaaggatatctctttcgaagcgccgaacgcgccgcacgttttccagaaagattggcaaccagaagttaaacttgatctggatacggcatcttcccaactggcagatgacgtatacgaagtggtactgcgtgttaccgtaacggcctccctgggcgaagaaaccgcgttcctgtgtgaagttcagcagggcggtattttctccatcgcgggtatcgaaggcacccagatggcacattgcctgggcgcatactgcccgaacattctgttcccgtatgctcgtgagtgcatcaccagcgtggtatcccgcggtacattcccgcaactgaaccttgcgccgattaacttcgatgcgctgttcatgaactatttgcagcagcaggctggcgaaggtactgaagaacatcaggatgcctga

SEQ ID NO: 483757 - DNA, 252 bp, Shigella sonnei; identical to SEQ ID NO: 459287

SEQ ID NO: 483758 - DNA, 432 bp, Shigella sonnei
atgcaagaaattatgcaatttgttggccgtcatcccatactgagtatcgcctggatcgcgttactggtggcggttcttgtgactacgtttaagagcctgacctcgaaagtgaaggtgattactcgtggtgaagctacgcgtctgatcaacaaagaagacgctgtggttgtggatttacgtcagcgtgatgacttccgtaaaggccatatcgcaggttctatcaatctgttgccgagcgaaatcaaagccaacaatgttggtgagcttgagaagcacaaagacaaaccggttatcgtggtagacggttctggcatgcagtgccaggagcctgcaaacgcgctgacgaaagctggttttgcgcaagtattcgtgctgaaagagggcgttgctggctgggctggcgaaaacttgcctctggtgcgcggcaaataa

SEQ ID NO: 483759 - DNA, 1545 bp, Shigella sonnei
atgtcggtttctaaaaaacctatggtactggtgattctggatggctatggctatcgtgaagaacagcaggataacgccatttttagtgctaaaaccccggtaatggatgcactgtgggccaatcgtccgcataccctgatcgacgcttccggtctggaagtcggtctgcctgaccgtcagatgggtaactccgaagtaggccacgttaacctgggtgccggccgcatcgtgtatcaggacctgactcgtctggacgttgaaatcaaagatcgcgctttctttgctaatccagtgctgactggcgcggtagataaagcgaaaaacgcaggtaaagcagtacacattatgggtctgctctccgcaggcggcgtacacagccacgaagatcacatcatggcgatggtagaactggcagctgaacgcggcgcagaaaaaatctacctgcacgcattccttgacggtcgcgacaccccgccgcgcagtgctgaatcctcgctgaaaaaatttgaagagaaatttgctgcgctgggtaaaggccgcgtagcgtccatcattggtcgttactacgcgatggaccgcgataaccgttgggatcgcgttgaaaaagcctatgacctgctgactctggcgcagggtgagtttcaggccgatactgccgttgctggtttgcaggcagcttatgctcgcgacgaaaacgacgagttcgtgaaagcgaccgttattcgtgcagaaggtcagccagatgcggcaatggaagacggcgatgcgctgattttcatgaacttccgtgctgaccgcgcgcgtgaaatcactcgtgcattcgtgaacgctgatttcgatggcttcgcgcgtaagaaagtggttaacgtcgatttcgtgatgctgaccgaatacgccgctgacatcaaaactgcggttgcttacccacccgcttccctggttaacaccttcggcgagtggatggcgaaaaacgacaaaactcagttgcgtatttccgaaaccgaaaaatatgcccacgttactttcttcttcaacggtggcgtagaagagtcgttcaaaggcgaagatcgcattctgatcaactcaccgaaagtggctacctacgatctgcaaccggaaatgagctccgcagagctgaccgaaaaactggttgcggccatcaagagcggcaaatacgacaccattatctgtaactatccgaacggcgacatggtaggtcacaccggggtgatggaagcggcggttaaagcggttgaagcactggatcactgcgtggaagaagtcgcgaaagcggttgagtccgtgggtggacaactgctgatcaccgctgaccacggtaacgctgaacagatgcgcgatccggcaacgggtcaggcacacacggcacacaccaacctgccagttccgctgatttacgttggtgataagaacgtgaaagcggttgcaggcggcaaactttctgacatcgcgccgaccatgttgtcgctgatgggtatggaaatcccgcaagagatgactggtaagccgctgttcatcgtggaataa

SEQ ID NO: 483760 - DNA, 1260 bp, Shigella sonnei
atgacacgggccgtgaaaccgcgcaggtttgcaatcaggcccatcatctacgccagcgttcttagcgctggcgtattgttgtgcgccttttccgcccacgcggatgagcgtgaccaactcaaatctattcaggccgatatcgccacaaaagagcgcgcggtacgccaaaagcaacaacaacgcgcaagcctgctcgcacaattgaaaaagcaggaagaagcgatctctgaagccacccgtaagctgcgcgaaacgcaaaacacgctcaatcaactcaataaacagattgatgagatgaacgcgtcgattgccaaactggagcagcaaaaagccgcccaggagcgcagcctcgccgcacaactggatgccgcattccgtcagggcgagcataccggtattcagctaattctcagcggtgaagaaagccagcgtggacagcgtttacaggcttatttcggctatctcaaccaggcgcgacaagaaaccattgcccagttgaagcaaacgcgtgaagaagtcgccatgcagcgtgctgaactggaagagaaacaaagcgagcaacaaacgctgttatatgaacagcgcgcccaacaggcgaaactgactcaggctctgaacgagcgtaaaaagacgctggcggggctggaatcttccatccagcaaggtcagcagcagctaagtgaactgcgtgccaacgaatcccgtctgcgtaacagtattgcccgtgcggaagccgcggcgaaagcgcgtgctgaacgagaagcgcgtgaggctcaggcagttcgcgacaggcagaaagaagcgacgcgcaaaggcaccacctacaaaccgaccgaaagcgaaaaatcgctgatgtcccgaactggtggcctgggtgcgccgcgtggtcaggcattctggccagttcgtggccctacgctgcatcgctatggcgagcagctacagggtgaattacgctggaaaggaatggttatcggtgcctctgaaggtactgaagttaaagcaattgccgacggtcgggtgattctggctgactggctgcaaggctacggtctggtggtggtggttgagcacggtaaaggcgatatgagtctttacggctataatcaaagcgcgctggtgagcgttggttcgcaggttcgtgcgggccagccaattgcactggtgggcagcagtggcggtcagggcagaccttcactctatttcgaaattcgccgccagggtcaggccgtcaatccacagccgtggttgggaagataa

SEQ ID NO: 483761 - DNA, 960 bp, Shigella sonnei
ttgtttccatttcgtcgtaacgttcttgcatttgccgctctgttggcgctctcctcccctgtaattgctggcaaacttgccatcgtcattgatgattttgggtatcgcccgaacaacgaaaaccaggtgctggcgatgccttccgctatctccgtcgctgtattacccgattcaccgcacgccagagagatggcgaccaaagcgcataacagcggtcacgaagtgttgattcatctcccgatggcaccgttgagtaaacagccgctggagaaaaatacgctgcgcccggagatgagcagcgacgaaattgagcgcattattcgtagtgcggtcaataacgtgccctatgccgtggggatcaataaccacatgggcagcaagatgacctctaacctgtttggtatgcagaaagtgatgcaggcgctggagcgttataatctttacttcctcgacagcgtaaccattggtaatacccaggcgatgcgcgccgcgcaaggcactggcgtgaaggtgatcaaacggaaggtgttcctcgacgattcacagaacgaagcggacatccgtgtgcaattcaatcgcgcaattgacctagcgcgtcgcaacggatcaaccattgccattgggcatcctcacccttcaacggtacgcgtgttgcaacagatggtttataacctgccgccagacattacgctggtgaaagccagcagcttgctgaatgaaccgcaggttgatacgtctacaccgccgaaaaacactgtgcccgacacaccgcgtaatccgttccgtggcgtgaagctgtgcaaaccgaagaaaccgatagaacctgtttatgctaatcgcttctttgaagtattaagcgaaagcatcagccagagcacgctgatcgtttacttccagcatcagtggcaaggctggggcaaacagcctgaagcggcgaagcttaacgctagcgtaaattaa

SEQ ID NO: 483762 - DNA, 1842 bp, Shigella sonnei
atggagcaaaacccgcagtcacagctgaaacttcttgtcacccgtggtaaggagcaaggctatctgacctatgccgaggtcaatgaccatctgccggaagatatcgtcgattcagatcagatcgaagacatcatccaaatgatcaacgacatgggcattcaggtgatggaagaagcaccggatgccgatgatctgatgctggctgaaaacaccgcggacgaagatgctgccgaagccgccgcgcaggtgctttccagcgtggaatctgaaatcgggcgcacgactgacccggtacgcatgtacatgcgtgaaatgggcaccgttgaactgttgacccgcgaaggcgaaattgacatcgctaagcgtattgaagacgggatcaaccaggttcaatgctccgttgctgaatatccggaagcgatcacctatctgctggaacagtacgatcgtgttgaagcagaagaagcgcgtctgtccgatctgatcaccggctttgttgacccgaacgcagaagaagatctggcacctaccgccactcacgtcggttctgagctttcccaggaagatctggacgatgacgaagatgaagacgaagaagatggcgatgacgacagcgccgatgatgacaacagcatcgacccggaactggctcgcgaaaaatttgcggaactacgcgctcagtacgttgtaacgcgtgacaccatcaaagcgaaaggtcgcagtcacgctgccgctcaggaagagatcctgaaactgtctgaagtattcaaacagttccgcctggtgccgaagcagtttgactacctggtcaacagcatgcgcgtcatgatggaccgcgttcgtacgcaagaacgtctgatcatgaagctctgcgttgagcagtgcaaaatgccgaagaaaaacttcattaccctgtttaccggcaacgaaaccagcgatacctggttcaacgcggcaattgcgatgaacaagccgtggtcggaaaaactgcacgatgtctctgaagaagtgcatcgcgccctgcagaaactgcagcagattgaagaagaaaccggcctgaccatcgagcaggttaaagatatcaaccgtcgtatgtccatcggtgaagcgaaagcccgccgtgcgaagaaagagatggttgaagcgaacttacgtctggttatttctatcgccaagaaatacaccaaccgtggcttgcagttccttgacctgattcaggaaggcaacatcggtctgatgaaagcggttgataaattcgaataccgccgtggttacaagttctccacctacgcaacctggtggatccgtcaggcgatcacccgttctatcgcggatcaggcgcgcaccatccgtattccggtgcatatgattgagactatcaacaaactcaaccgtatttctcgccagatgctgcaagagatgggccgtgaaccgacgccggaagaactggctgaacgtatgctgatgccggaagacaagatccgcaaagtgctgaagatcgccaaagagccaatctccatggaaacgccgatcggtgatgatgaagattcgcatctgggggatttcatcgaggataccaccctcgagctgccgctggattctgcgaccaccgaaagcctgcgtgcggcaacgcacgacgtgctggctggcctgaccgcgcgtgaagcgaaagttctgcgtatgcgtttcggtatcgatatgaacaccgaccacacgctggaagaagtgggtaaacagttcgacgttacccgcgaacgtatccgtcagatcgaagcgaaggcgctgcgcaaactgcgtcacccgagccgttctgaagtgttgcgtagcttcctggacgattaa

SEQ ID NO: 483763 - DNA, 1746 bp, Shigella sonnei
atggctggacgaatcccacgcgtattcattaatgatctgctggcacgcactgacatcgtcgatctgatcgatgcccgtgtgaagctgaaaaagcagggcaagaatttccacgcgtgttgtccattccacaacgagaaaaccccgtcattcaccgttaacggtgagaaacagttttaccactgctttggatgtggcgcgcacggcaacgcgatcgacttcctgatgaactacgacaagctcgagttcgttgaaacggtcgaagagctggcagcaatgcacaatcttgaagtgccatttgaagcaggcagcggccccagccagatcgagcgccatcagaggcaaacgctttatcagttgatggacggtctgaatacgttttaccaacaatctttacaacaacctgttgccacgtctgcgcgccagtatctggaaaaacgcggattaagccacgaggttatcgctcgctttgcgattggttttgcgccccccggctgggacaacgtcctgaagcggtttggcggcaatccagaaaatcgccagtcattgattgatgcggggatgttggtcactaacgatcagggacgcagttacgatcgtttccgcgagcgggtgatgttccccattcgcgataaacgcggtcgggtgattggttttggcgggcgcgtgctgggcaacgatacccccaaatacctgaactcgccggaaacagacattttccataaaggccgccagctttacggtctttatgaagcgcagcaggataacgctgaacccaatcgtctgcttgtggtcgaaggctatatggacgtggtggcgctggcgcaatacggcattaattacgccgttgcgtcgttaggtacgtcaaccaccgccgatcacatacaactgttgttccgcgcgaccaacaatgtcatttgctgttatgacggcgaccgtgcaggccgcgatgccgcatggcgagcgctggaaacggcgctgccttacatgacagacggccgtcagctacgctttatgtttttgccggatggcgaagaccctgacacgctggtacgaaaagaaggtaaagaagcgtttgaagcgcggatggagcaggcgatgccgctttccgcatttctgtttaacagcctgatgccgcaagttgatctgagtacccctgacgggcgcgcacgtttgagtacgctggcactgccattgatatcgcaagtgccgggcgaaacgctgcgaatatatcttcgtcaggaattaggcaacaaattaggcatacttgatgacagccagcttgaacgattaatgccaaaagcggcagagagcggcgtttctcgccctgttccgcagctaaaacgcacgaccatgcgtatacttatagggttgctggtgcaaaatccagaattagcgacgttggtcccgccgcttgagaatctggatgaaaataagctccctggacttggcttattcagagaactggtcaacacttgtctctcccagccaggtctgaccaccgggcaacttttagagcactatcgtggtacaaataatgctgccacccttgaaaaactgtcgatgtgggacgatatagcagataagaatattgctgagcaaaccttcaccgactcactcaaccatatgtttgattcgctgcttgaactgcgccaggaagagttaatcgctcgtgagcgcacgcatggtttaagcaacgaagaacgcctggagctctggacattaaaccaggagctggcgaaaaagtga

SEQ ID NO: 483764 - DNA, 216 bp, Shigella sonnei; identical to SEQ ID NO: 1207

SEQ ID NO: 483765 - DNA, 1014 bp, Shigella sonnei
atgcgtgtactgggtattgaaacttcctgcgatgaaaccggcatcgccatttacgacgatgaaaaaggtttgttagccaaccaattgtatagtcaggtgaaattgcacgctgactatggcggcgtcgtgcctgaactggcctcccgcgatcacgtgcgcaagaccgtaccgttgatccaggcggcgctaaaggagtctggcttaacggcaaaagacattgatgctgtggcctataccgcaggccctggattagtcggcgcactgctggttggcgcaaccgtggggcgttctctggcgtttgcctggaacgttccggcaatcccggtacaccatatggaagggcatctgttagcgccgatgctggaagataacccgccggaatttccgtttgtcgcgctgctggtgtccggcggtcatacgcagttaatcagcgtgactggcattggtcagtacgagctgctcggcgagtctatcgatgatgccgccggtgaagcgtttgataaaaccgcgaagctgctggggctggattatcctggcggaccgttactgtcgaaaatggcggctcagggtactgccgggcgctttgttttcccgcgtccgatgaccgaccgtccggggctggatttcagcttttctggtctgaaaacctttgcggcgaacacgattcgtgacaacggcaccgacgaccagacgcgtgctgatatcgcccgcgcctttgaagatgcggtggtcgatacgttgatgattaagtgtaagcgagcgttggatcagacgggctttaagcgactggtcatggcgggcggcgtgagtgctaaccgcacgttacgggcgaagctggctgaaatgatgaaaaaacgccgcggcgaagtgttctacgcgcgtccggagttttgtactgataacggcgcgatgatcgcctatgccggaatggtgcggtttaaagcaggcgcgacggcggatctcggcgttagcgtgcgtccgcgctggccgctggcggagttaccggctgcgtaa

SEQ ID NO: 483766 - DNA, 1464 bp, Shigella sonnei
atgaaaccttccactgaatggtggcgataccttgcgccgctggcggtcatcgccattattgctctaattccggttcccgcagggctggagagtcatacctggctctactttgccgtttttactggcgtgatcgttggactgatcctcgaacccgtgccgggtgccgtggtggcgatggtgggtatatccatcatcgccatactctctccctggctgctgttcagcccggagcagctcgctcagccaggctttaaattcactgcaaaatccctctcgtgggccgtttccggtttttctaattcggttatctggctgattttcgccgcctttatgtttggcacaggctatgaaaaaaccgggcttggacgccgcattgcgctgattctggtgaaaaagatgggacatcgcacgctgtttctcggctatgcggtgatgttctccgagctgatcctcgcacctgtaacaccgtccaactcggcgcgtggtgcggggattatctatcccatcatccgtaacctgccaccgctctatcaatcacaaccaaacgacagcagttcgcgcagcattggctcgtacatcatgtggatggggattgttgccgactgcgtgaccagcgccattttcttgacggcgatggcaccaaacttgctgttaattggactgatgaaaagcgtatctcacgccacgctgagttggggcgactggttcctcgggatgttgccgctcagtattttgctggtgctgctggttccctggctggcttatgtgctgtacccgccggtactgaagtctggcgatcaggtgccgcgctgggcagagacggaactgcaggcaatgggcccgctctgttcgcgtgaaaaacggatgctggggctgatagtaggcgcgctggtgctgtggattttcggcggtgattatatcgatgccgcgatggtcggttacagcgtggtggcactgatgctgcttctgcgcattatcagttgggacgacattgtcagtaataaagcggcgtggaacgttttcttctggctggcctcgcttatcaccctcgctaccggactcaacaacaccggttttattagctggtttggcaaactgttagcaggcagcttaagcggttattcgccaacgatggtgatggtggcgttgattgtggtgttttatctgctgcgctactttttcgccagcgccacggcgtatacctccgccctcgcaccgatgatgattgccgctgcgctggcgatgccggaaatcccgctgccggtgttctgcctgatggttggcgcggcaattggtctggggagcattcttacaccatacgccaccggacccagtccgatttactacggtagtggttatctgccaacggcggattactggcgactgggggcgatttttgggctgatattcctcgtgttgctggtgattaccggcttactgtggatgcccgtggtgttgctttaa

SEQ ID NO: 483767 - DNA, 606 bp, Shigella sonnei
atgaaaaagatcctgacaaccccgatcaaagctgaagatctgcaagatattcgcgtcgacgatgtgatctacctgaccggtacgctggtgacctgccgtgacgtttgtcaccgccgcttgatcgaactgaaacgtccgatcccttacgatctcaacggcaaagcgattttccacgctggccccatcgtgcgcaaaaacggcgataaatgggagatggtttccgttggcccgacaaccagtatgcgtatggaaagttttgaacgtgaatttatcgagcagaccggcgtgaaactggtggttggcaaaggcggaatggggccgctgaccgaagaaggctgccagaaattcaaggcgctacatgtgattttcccggcaggctgcgcggtgctggcggcaacccaggtggaagagattgaagaagtgcactggacagagctcggaatgccggagtcgctgtgggtctgtcgggtcaaagagttcggcccgctgattgtctctattgatacccacggcaacaacctgatagccgaaaacaaaaagctgttcgccgaacgccgcgatcccatcgtggaagagatctgcgagcacgtccattacatcaaataa

SEQ ID NO: 483768 - DNA, 912 bp, Shigella sonnei
atgatgagcgaaagtaataagcaacaggcagtgaataagttgacggagattgtcgctaactttaccgccatgatttctacccgaatgcctgatgacgtggtggataaactaaaacagctaaaggatgccgaaacgtcgtcgatggggaaaattatctaccatacgatgttcgacaacatgcaaaaagcgattgacctgaatcgtcctgcctgtcaggacaccggggagattatgttcttcgttaaagtcggttcccgcttcccactgcttggcgagctgcaaagcatactcaaacaagccgtggaagaggcaaccgtcaaagcgccactacgtcacaatgcggtagaaatttttgacgaagtaaacaccggcaaaaataccggtagcggcgtaccgtgggtcacctgggacatcatccccgacaatgacgatgcggaaatcgaagtttacatggcaggcggcggctgcacgctacctggccgctcgaaagtgttaatgccgtcagaaggctacgaaggcgtggtgaaattcgtcttcgaaaatatctccaccctcgccgtaaacgcctgtccaccggtactggtgggcgtgggcatcgccacctcggtggaaaccgccgccgtactctcgcgtaaagccattttgcgcccgattggcagccgccatcccaatccaaaagcggcagaactggagctacgcctggaagaaggactcaaccgtctggggattggtccacaagggctgactggcaacagttcagtgatgggcgtacatatcgaatctgccgcccgccatccgtcaaccatcggcgttgctgtctctaccggctgctgggcgcatcgtcgcggcacactgctggttcatgccgatctcacctttgaaaatctgtctcacacccggagcgcgttatga

SEQ ID NO: 483769 - DNA, 267 bp, Shigella sonnei
atgctgaatagctggcctttagccaaagacttgcaggtactggtagaaatcgtccacagcgggagttttagcgccgcagcggcgacgcttgggcagacgcctgcatttgtcaccaagcggatccaaatccttgaaaatacgctggcaacaacgctgctgaaccgctccgctcgcggcgtggcgctgactgaaagtggccaacgttgttacgaacatgcgctggaaatcctcacccaatatcagcgactggtcgatgacgtcacgtaa

SEQ ID NO: 483770 - DNA, 645 bp, Shigella sonnei; identical to SEQ ID NO: 460112

SEQ ID NO: 483771 - DNA, 618 bp, Shigella sonnei
atgagtgcaatcgcgcctggaatgatcctcatcgcgtacctctgcggctccatttccagtgccattctggtttgccgcttgtgtgggctgcccgatccgcgaaccagcggctccggcaatccaggcgcaaccaatgtgttacgtatcggtggcaagggagcagccgtagcagtactgattttcgacgttctgaaaggaatgttgcccgtctggggcgcgtatgaattaggtgtcagccccttctggttaggcttaattgccatcgccgcctgtcttggacacatctggcccgttttcttcggatttaaaggaggaaaaggcgttgctaccgcttttggtgccatcgcacccattggctgggatctcaccggagtaatggcgggaacctggttactgaccgtgctattgagcggatactcgtcgctgggagcgattgtcagtgcactgattgctccgttttatgtctggtggtttaagccacaattcaccttcccggtttcgatgctctcttgcctgatcctgctgcgtcatcatgacaacatccagcgtctgtggcgtcgtcaggagacaaaaatctggacgaaattcaaaagaaagcgcgaaaaggatcccgagtga

SEQ ID NO: 483772 - DNA, 369 bp, Shigella sonnei
atggatattgtatttatagagcaactttcggtaatcaccactattggtgtttacgactgggaacagaccatcgaacagaagttagtgttcgatatcgaaatggcatgggataaccgtaaagcggcgaaaagtgatgatgtggcggattgcctcagttacgctgacattgcagaaacggtggtcagccacgtcgagggggcgcgttttgcgctggtggaacgcgtggctgaagaggtggcggagctgctgttagcacgcttcaactcgccgtgggtgcgcatcaaactcagcaagccaggcgcaatggcgcgggcggcgaatgttggtgtaatcattgagcgtggcaataatctgaaagaaaataattaa

SEQ ID NO: 483773 - DNA, 822 bp, Shigella sonnei
atgagcgatatgcactcgctgctgatagcggcaatattgggtgtggtcgaaggattgacagaatttctgccggtatccagcacgggccatatgattattgtcggtcacttgttggggttcgagggcgacacggcgaaaacctttgaagttgtgatccagttaggatcaattctggcggtagtagtgatgttctggcggcgtctgtttggcctgattggcatccactttggccgcccgttgcagcacgaaggagaaagcaaaggtcgtttaacgctgatccacattttgctggggatgattccggcggtggtactggggctgttgttccacgacacgattaagtcattgtttaacccgataaatgtgatgtatgcactggtcgttggcggtttgttgctgattgccgccgaatgcctgaagccgaaagagccgcgtgcgccgggtcttgatgatatgacctatcgtcaggcgtttatgattggctgtttccagtgtctggcgctgtggccgggtttctcccgttccggggccaccatttcaggtgggatgctgatgggcgtgagccgttacgctgcttccgagttctcgttcctgctggcggtaccgatgatgatgggcgcaacggcgctcgatctctacaaaagctggggcttcctgacaaccggcgatatctcgatgtttgccgttgggtttatcaccgcttttgtggtggcgctgatagcgattaaaaccttcctgcaattgattaagcgcatttcgtttatcccgttcgccatttatcgctttattgtggcggctgcggtgtacgtcgtgttcttttga

SEQ ID NO: 483774 - DNA, 1239 bp, Shigella sonnei
gtgaagatttatctggtcggtggtgctattcgggatgcattgttagggctaccggtcaaagacagagattgggtggtagtcggcagtacgccacaggagatgctcgacgcgggctaccagcaggtaggccgcgattttcctgtgtttctacatccgcaaacgcatgaagagtatgcgctggcacgtaccgaacggaaatccggttccggttacaccgattttacttgctatgccgcaccggatgtcacgctggaagatgatcttaagcgtcgcgatctgaccattaatgcgctggcccaggacgataacggcgagattatcgacccgtacaacggtctgggcgatctgcaaaatcgtctgttgcgccatgtttcccccgcttttggcgaagatccgttacgcgtactgcgcgtggcgcgttttgctgcgcgttatgcccacctcggttttcgtattgccgatgaaactctgacgctgatgcgcgagatgacccatgcgggtgaactggaacacctgacgcctgaacgggtatggaaagagacggaaagcgccctcaccacccgcaatccacaggtgttcttccaggtactgcgcgattgcggcgcactgcgcgttttattcccggaaattgacgcactgtttggcgttccggcccctgccaggtggcatccggaaatcgacacgggtattcataccttaatgacgctctcaatggcggcgatgctgagtccgcaggtcgatgtccgtttcgcaactttatgccacgatctcggtaaaggactgacgccgccagaactttggccgcgtcatcatggtcacggtccggcgggtgtgaaattagtggaacaactctgccagcgtctgcgcgtgccaaatgaaattcgcgatttagccagactggtggctgagtttcacgatctcatccacaccttcccaatgctgaacccaaaaactatcgtcaaattgtttgattccatcgacgcctggcgtaaaccgcagcgtgtcgagcaactggcgctgaccagcgaggctgacgtacgcggcagaaccggttttgaatcagcggactacccgcaaggccgttggttgcgcgaagcctgggaagtggcgcagtcagtgccgacaaaagcggtcgttgaagcgggatttaaaggtgtggagattcgcgaggagctgacccgacggcggattgcggcggtagccagttggaaggaacaacgttgcccaaagcctgactga

SEQ ID NO: 483775 - DNA, 621 bp, Shigella sonnei; identical to SEQ ID NO: 472751

SEQ ID NO: 483776 - DNA, 1302 bp, Shigella sonnei
atggctcaggaaatcgaattaaagtttattgttaatcacagtgccgttgaggcgttgcgtgaccatctcaatacgctgggcggcgagcaccatgaccccgtgcagttgctgaatatttactacgaaacgccggataactggctgcgtaggcacgatatgggcttacgtattcgtggcgaaaacggtcgctatgagatgaccatgaaagttgcaggaagagtgacaggcggcttacaccagcgcccggaatataacgtggcgttgagcgaaccgacgctcgacctggcgcagtttccctcggaagtctggccgaacggtgaattgcctgccgatctcgcttcccgcgtacaaccgctgttcagcaccgatttttatcgcgaaaaatggctggtggcggtcgatggcagccgaattgaaatcgctctcgatcagggggaggtgaaagcgggggaatttgctgaacctatctgtgagctggaactggaactgcttagcggcgacacgcgcgcggtgctgaaactggcgaaccaactggtatcgcaaaccggattacgccagggcagcctgagcaaagcggcgcgtggctatcatctggcgcagggcaatccggcgcgtgaaatcaaaccgaccaccattttgcatgttgcggcaaaagccgatgtagaacaggggctggaagcggcgctcgagctggcattagcgcaatggcagtatcatgaagaactgtgggtacgcggtaacgatgcggcgaaagaacaggtgctggcagccattagcctggtccgtcatacgctgatgctgttcggtggtattgtgccgcgtaaagcgagcactcacttacgtgatttgctgacccaatgcgaagcgaccattgcttctgcggtttctgccgtgacggcggtctactctaccgaaacggcaatggcgaagctggcgttgaccgaatggttggtaagcaaagcatggcagccatttttagatgccaaagcgcagggcaaaatcagcgactccttcaaacgctttgccgatatccatctttcccaccatgccgctgaactgaaaagcgttttctgccagccgttaggcgatctctaccgtgaccagttgccacgcctgacgcgtgacattgactcaatactgttgctggcgggttactatgatcctgtcgtcgcgcatgcctggctggagaactggcaggggctgcgtcacgctattgcgaccgggcaacgcattgaaattgagcatttccgtaatgaggcaaacaatcaggaaccgttctggttgcacagcggaaaacgttaa

SEQ ID NO: 483777 - DNA, 2841 bp, Shigella sonnei
atgaagccgctctcttcaccgttacagcagtacaggcagaccgttgttgagcggctgccagagcctttagccgaggaaccactaagtgcacaggcgaagtcagtacttactttcagtgattttgtgcaggacagcataattgcgcatcgagagtggttgacggaactggaaagccaaccgccgcaggccgatgaatggcagcattacgctgcatggttgcaggaggcgctcagtaatgtgagtgacgaagccgggttaatgcgcgagctgcggctattccggcggcgcattatggtgcgcatcgcatgggcgcaaacgctggcactggttactgaagagagcatattgcagcagctcagttatctggcggagacgctgattgttgcggcgcgtgactggctgtatgacgcctgctgccgcgagtggggaacgccgtgcaatgcgcagggcgaagcgcaaccgctgctgatcttaggcatgggtaagctgggcggcggggaactgaatttctcctctgatatcgatctgatttttgcctggccggaacatggttgtacgcagggcggacgccgggaactggataacgcgcagttttttacccgcatggggcagcggctgattaaagtgctggatcaaccaacgcaggatggcttcgtctatcgcgtggatatgcgactgcgtccgtttggcgaaagtggcccgctggtgctgagctttgccgcgttggaggattattaccaggagcaggggcgcgactgggagcgttacgcgatggtcaaagcgcggattatgggcgatagcgaaggcgtctatgctaacgagttgcgtgcgatgctacgcccgtttgttttccgtcgttacatcgatttcagcgtgattcagtcgctgcgcaacatgaaaggaatgattgcccgtgaagtgcgtcggcgcggtttgaccgacaacatcaaacttggcgcgggtggtattcgcgaaattgaatttatcgtccaggtattccagctcattcgcggcgggcgcgaaccgtcgctgcaatcgtgctctttactgccaacgctcagcgccattgctgcgctgcatctgctttctgaaaacgatgctgaacaattgcgagtggcgtatctgttcctgcggcgtctggaaaacctgctgcaaagcattaacgacgaacaaacccagacgcttccttctgatgagcttaaccgtgcgcggctggcgtgggcgatggactttgctgactggccgcaactgaccggggcgctgaccgcacatatgaacaatgtgcgccgggtgtttaatgaattgattggcgacgacgaaagtgaaactcaggaagagtcgctgtcggaacagtggcgtgagctgtggcaggatgcgttgcaggaagatgacactacgccagtgctggcgcatcttagcgaggatgatcgcaaacaggtgctaacgctgatttccgatttccgcaaagagctggataagcgcaccatcgggccgcgaggacgtcaggtgctcgaccatctgatgccgcatctgctaagtgatgtctgtgcgcgtgaagacgctgctgtcacgctgtcgcgcattaccgccttgctggtggggattgttacccgcaccacctatttagaattgctcagtgaattccctgcggcgcttaaccatttgatttctctgtgtgccgcatcgccgatgattgccagccagctggcgcgttatccattattgctggatgaattgctcgatccaaacactctttaccagccgacggcgaccgatgcctaccgcgatgagttgcgccagtatttgctgcgcgtgccggaagatgacgaagagcaacagcttgaggcgctgcgtcagttcaaacaggcgcagctgttacgcatcgccgcagcggatatcgctggtacgctaccggtgatgaaagtgagcgatcacttaacctggctggcggaagccatgatagatgccgtcgttcagcaggcgtgggttcaaatggttgcccgctacggtaagccgaatcacctcaacgatcgcgaagggcgtggttttgcagtggtcggctacggcaagctgggcggctgggagttaggctacagttccgatcttgacctgatcttcctccatgattgcccaatggatgcgatgactgacggcgagcgggaaatcgacggacgacagttttatcttcgtctggcgcaacgcattatgcacctgttcagcacgcgaacctcttccggcattttgtacgaagtggatgcgcggctgcgcccgtccggggcggcgggaatgctggttacctccacagaagcatttgccgattatcagaaaaacgaggcctggacgtgggaacatcaggcgctggtgcgtgcgcgggtagtgtacggcgatccgcagctcaccgcgcactttgacgcagtgcgtcgcgagattatgacgctgccgcgtgaaggtagaactctgcaaacggaagtgcgggaaatgcgcgagaaaatgcgcgctcatctcggcaataaacatcgcgatcgctttgatatcaaagctgatgaaggcggaattaccgatatcgaatttattacccaatatctggtgttgcgctacgctcatgaaaaaccgaagttaacgcgctggtcagacaacgtgcgtattctggagctgctggcgcaaaacgacattatggaagagcaggaagcgatggcgctgacccgtgcttacacgacgctgcgcgatgaacttcatcatctggcattacaggaattgccgggccatgtgtcgggggattgcttcaccgcagagcgtgatctggtgcgggcaagctggcagaagtggctggtggaagaatga

SEQ ID NO: 483778 - DNA, 1434 bp, Shigella sonnei
atgaaagtaacgctgccagagtttgaacgtgcaggagtgatggtggttggtgatgtaatgctggatcgttactggtacggtccctccagccgtatctcgccggaagcgccggtgcccgtggttaaagtgaataccatcgaagaacgtccgggcggcgcggctaacgtggcgatgaatatcgcttctctcggtgctaatgcacgcctggtcgggttgacgggcattgacgatgcagcgcgcgcgctgagtaaatctctggccgacgtcaacgtcaaatgcgacttcgtttctgtaccgacgcatccgaccatcaccaaattacgggtactttcccgcaaccaacagctgatccgtctggatttcgaagaaggtttcgaaggcgttgatccgcagccgctgcacgagcggattaatcaggcgctgagttcgattggcgcgctggtgctttctgactacgccaaaggtgcgctggcaagcgtacagcagatgatccaactggcgcgtaaagcgggcgttccggtgctgattgatccaaaaggtaccgattttgagcgctaccgcggcgctacgctgttaacgccgaatctctcggaatttgaagctgttgtcggtaaatgtaagaccgaagaagagattgttgagcgcggcatgaaactgattgccgattacgaactctcggctctgttagtgacccgttccgaacagggtatgtcgctgctgcaaccgggtaaagcgccgctgcatatgccaacccaggcgcaggaagtgtatgacgttaccggtgcgggcgacacggtgattggcgtcctggcggcaacgctggcagcgggtaattcgctggaagaagcctgcttctttgccaatgcggcggctggcgtggtggtcggcaaactgggaacctccacggtttcgccgatcgagctggaaaatgcagtgcgtgggcgcgcagataccggctttggcgtgatgaccgaagaggaactgaagctggccgtagcggcagcgcgtaaacgcggcgaaaaggtggtaatgaccaacggtgtctttgacatcctgcacgccgggcacgtctcctatctggcaaatgctcgcaaacagggtgaccgtctgattgtcgctgtgaacagcgatgcctccaccaaacggctgaaaggggattcccgccccgttaacccgctcgaacagcgtatgattgtgctgggcgcactggaagcggtcgactgggtggtgtcgtttgaagaagacacgccgcagcgcttgatcgccgggatcctgccagatttactggtgaagggcggcgactataaaccagaagagatcgccgggagtaaagaagtctgggccaacggcggcgaagtgctggtgctcaacttcgaagacggttgctcgaccactaacatcatcaagaagatccaacaggataaaaaaggctaa

SEQ ID NO: 483779 - DNA, 1662 bp, Shigella sonnei
atggatgatattgttaattctgtgccctcctggatgtttaccgcgattattgccgtatgcattctgtttattattggaattattttcgccaggctctatcgtcgcgcttcggcagagcaagcttttgttcgtactggtttaggtgggcaaaaagtggtgatgagcggtggcgcaatcgtgatgccgatctttcatgaaataatccccatcaatatgaatactctgaagctggaagtcagccgctcaaccattgatagcctgattacgaaagatcgtatgcgtgtcgatgtagtagtcgctttctttgtacgggtaaaaccgtctgtagaaggcatcgccactgcggcgcagacgttggggcaacgcacgctatcaccagaagacttacgtatgttggttgaagataaatttgtcgatgccctccgtgcaacagctgcacaaatgaccatgcatgagttacaggatacccgcgagaacttcgtgcagggagtacaaaatactgtcgcagaagacctatcgaaaaacggtcttgagctggaaagcgtttcacttaccaactttaaccagacctcgaaagaacatttcaatccgaacaatgcctttgacgccgaaggtttaaccaaactgactcaggagacggagcgccgtcgtcgcgaacgtaacgaagttgaacaggatgtagaagttgcggtgcgtgagaaaaaccgtgatgcactttcgcgcaagttggagattgaacaacaagaagcgtttatgacgcttgagcaggagcagcaggttaaaacccgtactgccgaacagaatgcacgtattgcggcttttgaagctgaacgtcgtcgtgaagcagagcagacgcgaattctggctgaacgacaaattcaggaaacggagatcgagcgcgagcaggccgtccgctcaagaaaggttgaggctgaacgtgaagttcgtattaaagagatcgaacagcagcaggtcaccgaaatcgccaaccagacgaaatcgatcgctattgccgccaaatcggaacaacagtcccaggcagaagcgcgtgctaaccttgcactcgcagaagcagtaagtgcgcaacaaaacgtagaaaccactcgccagaccgcagaagccgatcgtgctaaacaagttgccctaatcgctgccgcgcaggatgcagaaaccaaagcggttgaactgaccgtgcgggcgaaagcagaaaaagaagccgcagagatgcaggcggcggctatcgttgagttagccgaagctacacgtaaaaagggtctggcggaagcagaagcacaacgtgcgctgaacgatgctatcaacgtactttctgatgaacaaaccagccttaaattcaaactggccttgttgcaggcgctacctgcggtaatagagaaatccgttgagccgatgaagtccattgacggtatcaagattattcaggtcgatggtctgaatcgtggcagcgctgcgggtgatgcaaacacgggtaatgtggggggcggaaacctagcggaacaagcattatcagccgctctctcttaccgcacacaggcaccgctgattgactccttgctcaatgaaattggcgtttcaggcggctcactggcggcattgacttcacccttaacctcaacaactcccgtcgccgaaaacgtagaataa

SEQ ID NO: 483780 - DNA, 630 bp, Shigella sonnei
atgattttattcgccgactataataccccttatcttttcgctatttcctttgtactgttgatcggccttttagaaattttagcgcttatctgcggtcacatgctctccggtgctcttgatgcacatcttgaccattataattccataaccacaggtcatattagccaggcacttcattatctcaatatcggaagattgccagctctcgtcgttctctgcttgctggctggtttttttggtcttattggcatcctgttgcagcatgcctgcatcatggtctggcaatcaccactgtcgaacctgttcgtggttcctgtcagtttactgtttacgattattgcggtgcattataccggtaaaatagttgcgccctggattccacgcgaccatagttcagctattacagaagaagaatatattggtagcatggcattaattaccggtcatcaagccacttcaggtaatccctgcgaaggaaaactcaccgatcaatttggccaaatacattatttactactggagcctgaagaaggaaaaattttcactaaaggagtcaaagtgttaattatttgccgactttctgcaacgcgatatttggcggaaaacaatccctggccacaaatattgtaa

SEQ ID NO: 483781 - DNA, 201 bp, Shigella sonnei
atggatcatagtcttaattctttaaataatttcgatttcctggcgcgtagttttgccagaatgcacgcagaaggtcgcccggtcgatattcttgccgttactggtaacatggatgaagaacatagaacctggttttgcgcacgttatgcctggtattgccaacagatgatgcaggcaagagagctggagttagagcactga

SEQ ID NO: 483782 - DNA, 1107 bp, Shigella sonnei
atgaaagttaaagtactgtccctcctggtcccagctctgctggtagcaggcgcagcaaacgctgctgaagtttacaacaaagacggcaacaaattagatctgtacggtaaagtagacggcctgcactatttctctgacaacaagtcagaagacggcgaccagacctatgtacgtcttggtttcaaaggcgtaactcaggttactgaccagctgaccggttacggccagtgggaatatcagatccagggcaatacctctgaagacaacaaagaaaactcctggacccgtgtggcattcgcaggtctgaaattccaggatgtgggttctttcgactacggtcgtaactacggcgttgtttacgacgtaacttcttggaccgacgtactgccagaattcggtggcgacacctacggttctgacaacttcatgcagcagcgtggtaacggcttcgcgacctaccgtaacactgacttcttcggtctggttgacggcctgaactttgctgttcagtaccagggtaaaaacggtagcgtaagcggcgaaggcatgaccaacaacggtcgtggtgctctgcgtcagaacggcgacggcgttggcggatctatcacttatgattacgaaggcttcggtatcggtggtgcgatctccagctccaaacgtactgatgatcagaacagcccgctgtacatcggtaacggcgaccgtgctgaaacctacaccggtggtctgaaatacgacgctaacaacatctacctggctgctcagtacacccagacctataacgcaactcgcgtaggttccctgggttgggcgaacaaagcacagaactttgaagctgttgctcagtaccagttcgacttcggtctgcgtccgtctgtagcatacctgcagtctaaaggtaaaaacctgggtaccatcgctggtcgtaactacgacgacgaagatatcctgaaatatgttgatgttggtgctacctactacttcaacaaaaacatgtccacctacgttgactacaaaatcaacctgctggacgacaaccagttcactcgtgacgctggcatcaacactgataacatcgtagctctgggtctggtttaccagttctaa

SEQ ID NO: 483783 - DNA, 1056 bp, Shigella sonnei
atggaaataagctttacccgcgtggcactgctggctgccgcgctcttctttgttggttgcgatcaaaaaccacaacccgccaaaacccacgctactgaagttaccgttctagaaggcaaaaccatgggtaccttctggcgtgccagcatcccgggcattgatgccaaacgcagtgccgaacttaaagaaaagattcagacccagctggacgccgacgatcagctgctttcgacctataaaaaagattccgcgctgatgcgctttaacgattcgcaaagtttatcgccgtggccggtaagtgaagcgatggccgatatcgtcaccacctcgctgcgcattggcacgaagaccgatggcgcgatggatataaccgtcgggccgctggtgaatctgtggggctttggcccggaacaacagtcggttcaaattccgagccaggaacagatcgatgcgatgaaagccaaaaccggcttacagcacctgacggtcattaatcagtcgcatcagcaatatctgcaaaaagacctgccggatttaaatgtcgatctctccaccgtcggtgaaggttatgcggcggatcacctggcacgcttgatggagcaggaagggatttcccgctatctggtgtcggtgggcggcgcgctgaacagccgtggtatgaacggtgaaggcctgccgtggcgggtagcgattcaaaaaccaaccgataaagaaaacgcggttcaggctgtggtggatatcaacggtcatgggattagcacctctggcagctaccgtaactattacgaactggacggcaaacgtctttcccatgttatcgatccgcaaaccgggcgtcccatcgaacacaatctggtatccgtgacggtgattgctccgacggcgctggaagccgatgcctgggatactggcttgatggtactcgggccggagaaagccaaagaggttgttcgccgggaagggctggcggtttatatgatcaccaaagaaggcgatagctttaaaacctggatgtcaccacagtttaaaagcttccttatcagcgaaaaaaattaa

SEQ ID NO: 483784 - DNA, 1065 bp, Shigella sonnei
atgaaaaacgccacatgcttaactgacgatcaacgctggcaatctgtcttagcccgcgacccgaatgccgacggcgaattcgttttcgccgtgcgcaccacgggtatcttttgccgtccgtcttgccgcgccagacatgccttgcgggaaaatgtctccttctacgcaaatgccagcgaggcactcgccgccggatttcgcccctgcaaacgttgtcagccagacaaagccaatccccggcaacatcggttggataaaatcacccacgcgtgtcgactgctggaacaggaaacgcctgtaacgctggaagccttagccgaccaggtggcgatgagtccatttcatctacatcggttgtttaaagcgactaccggaatgacgcctaaagcctggcaacaggcctggcgcgctcgccgtttgcgcgaatcgctggcgaaaggggagagcgtgacgacgtctattcttaacgccggattccccgacagcagcagttactaccgcaaagccgatgaaacgctgggcatgacggctaaacaattccgtcacggtggcgaaaatctggcggtgcgttacgcgctggctgattgtgagctgggtcgttgcctggtggcagaaagcgagcgggggatttgcgcgatattgctgggcgatgatgacgcgacattaatcagcgagttgcagcagatgtttcccgctgccgacaacgcgcctgccgatctgacgtttcagcaacatgtgcgtgaagtgatcgccagcctcaatcaacgcgatacgccgctgacgttaccgctggacattcgcggcactgcttttcagcaacaagtctggcaggcactgcgcacgataccttgtggtgaaaccgtcagttatcagcaactggctaacgccatcggcaaaccgaaagcggtacgggccgttgccagcgcctgtgccgccaacaagctggctatcgtaataccctgtcatcgagtggtccgtggtgatggcacactttccggttaccgctggggcgtgtcgcgtaaagcgcaactgctgcgccgcgaagctgaaaatgaggagaggtaa

SEQ ID NO: 483785 - DNA, 651 bp, Shigella sonnei
atgttggatctgtttgccgatgctgaaccgtggcaagagccactggcggctggtgcggtaattttacggcgttttgcttttaacgctgcggagcaactgatccgcgatattaatgacgttgccagccagtcgccgtttcgccagatggtcacccccgggggatataccatgtcggtggcgatgcccaactgtgggcatctgggctggacgacccatcggcaaggttatctctattcgcccattgatccgcaaacaaataaaccgtggcccgccatgccacaaagctttcatgatttatgtcaacgtgcggctacggcggcgggctatccagatttccagccagatgcttgtcttatcaaccgctacgctcctggcgcgaaactgtcgctgcatcaggataaagacgaaccggatctgcgcgcgccgattgtttctgtttctcttggcttacccgcgatttttcaatttggtggcctgaaacgtaatgatccgctcaaacgtttgttgttggaacatggcgatgtggtggtatggggcggtgaatcgcggctgttttatcacggcattcaaccgctgaaagcggggtttcatccactcaccggcgactgccgttacaacctgacattccgtcaggcaggtaaaaaagaataa

SEQ ID NO: 483786 - DNA, 1644 bp, Shigella sonnei
atggaacttcttgtacttgtctggcggcagtatcgctggccatttatcagtgtgatggcgctaagcctcgccagtgcggctttaggcattggcttaattgcttttatcaatcagcgccttatcgaaacggcggataccagtctgctggtgttgccggagtttctgggattattgctgctgttgatggcaatcactctcggatcgcaactggcgctcaccactttggggcatcacttcgtttaccgactgcgtagtgaatttatcaagcggattctcgatacccacgtcgagcgcattgaacaactcggtagcgcctcgttgctggcgggattaaccagcgatgtgcgcaatatcaccattgcttttgtgcgtctgccggaactggtgcaggggatcattctcactatcggttcagcggcgtatctgtggatgctgtcgggcaaaatgttgctggtaacggctatctggatggcggtcaccatctggggcggttttgtgctggtggcgcgggtgtacaaacatatggcgaccctgcgtgaaaccgaagataagctgtacacggattttcaaaccgtactcgaagggcgcaaagagctgactctgaaccgtgaacgcgccgagtatgtgtttaacaacctctacattcctgatgcgcaagagtatcgccatcatattatccgcgcagacaccttccatcttagtgccgtgaactggtcaaacatcatgatgctgggcgctatcggcctggtgttctggatggcgaacagcctcggttgggctgataccaacgttgctgcgacctattcgttgacgctgttattcctgcgtacgccgctgctttcggcggttggcgcattgccgacgctgctgacggcgcaggtggcgtttaacaagctgaacaaattcgcgctcgcgcctttcaaagcagagtttccgcgcccgcaggcgtttcccaactggcaaacgctggagctgcgtaatgtgacgtttagctatcaggataacgcgttttccgttgggccgattaacctcaccattaaacgtggcgagctgctgtttctgattggtggcaacggtagtggaaaatcgacgctggcgatgttgctgacgggcttgtaccagccacaaagcggcgaaatcttgctggatggcaaacctgtcagcggcgaacaaccggaagattatcgcaaactgttttcggcagtgtttaccgatgtctggctgtttgatcaactgctggggccggaggggcaacccgctaacccgcaactggttgagaagtggctggcgcagctgaaaatggctcataagcttgagttaagcaacgggcgtattgttaacctgaagttatcaaaagggcagaaaaaacgcgtggcgctgttgctggcgctggcagaagaacgcgatattatcctgctggatgaatgggcggcggatcaggatccacacttccgtcgtgagttttatcaggtgttgctgccgctgatgcaggagatgggtaaaactattttcgccatcagtcatgatgatcattactttatccacgccgaccgcctgctggaaatgcgcaatgggcaacttagcgagctgacgggcgaagagcgcgatgccgcttcgcgtgatgccgttgcccggacggcataa

SEQ ID NO: 483787 - DNA, 1647 bp, Shigella sonnei
atgaaaaaagtgactgccatgctcttctcgatggccgtggggcttaatgccgtttcgatggcggcaaaagcgaaagcgtccgaggagcaggaaactgatgtactgttgattggcggcggcattatgagcgccacgttggggacctatttacgcgagctggagcctgaatggtcgatgaccatggtggagcgcctggagggtgtcgcgcaggagagttcgaacggctggaacaacgccggaaccgggcattctgcactgatggaactgaactacaccccgcaaaacgccgatggcagtatcagtattgaaaaagcagtcgccattaacgaagcatttcagatttcccgccagttctgggcgcaccaggtcgagcgcggcgtgctgcgtactccgcgttcatttatcaataccgttccgcatatgagctttgtctggggcgaggataacgttaatttcctgcgcgcccgttacgccgcgttgcaacaaagctcgctgtttcgcggtatgcgttactctgaagatcacgcgcagatcaaagagtgggcaccgttagtgatggaagggcgcgatccgcaacagaaagtggcagccacgcgtacggaaattggtaccgatgtgaactacggcgagatcacccgccagttaattgcttccttgcagaagaaatctaacttctcgctgcaactcagcagcgaagtccgcgccctaaagcgtaatgacgataacacctggaccgttaccgttgccgatctgaaaaatggcactgcacagaacattcgtgccaaatttgtctttatcggcgcgggcggtgcggcgctgaagctgttacaggaatcggggattccggaagcgaaagactacgccggtttcccggtgggcggacagttccttgtttcggaaaacccggacgtggttaatcaccatctggcgaaggtttacggtaaagcatccgttggcgcaccaccgatgtcggttccgcatatcgatacccgcgttctggacggtaaacgcgtagtgctgtttgggccatttgccaccttctcaaccaaattcctcaaaaacggttcattgtgggatctgatgagttccaccaccacctctaacgtgatgccgatgatgcacgtcgggctggataatttcgatctggtgaaatacttggtgagtcaggtgatgttgagtgaagaggatcgttttgaagcgttgaaagagtactatccgcaggcgaaaaaagaggactggcgtttgtggcaagcggggcagcgtgtgcagattatcaagcgtgatgccgataaaggtggtgtactgcgtctgggtactgaagtggtcagtgaccagcaagggaccattgccgcgctgctgggggcatcgccaggggcgtcaaccgctgcgccgattatgttggatctgctggaaaaagtatttggcgatcgcgtttccagcccgcaatggcaggctacgttgaaagcgatcgttccatcttatggacgcaagctgaacggtgatgtagcggcaacagaacgcgagttgcagtacaccagcgaagtgctgggcctgaaatacgacaagccgcaggcagcagatagtacgccgaaaccgcagttgaaaccgcaacccgttcaaaaagaagtggcggatattgcgttgtaa

SEQ ID NO: 483788 - DNA, 489 bp, Shigella sonnei
atgaagaccattctacctgcagtattgtttgccgctttcgccaccacttccgcctgggcggcagaaagcgtccagccactggaaaaaatcgcgccttatccacaagctgaaaaagggatgaagcgtcaggtgattcagttaaccccgcaagaagatgaatctaccctgaaagtagaactgttaaccggtcagacgctggaagtcgattgcaatttgcatcgtctcggcgggaagctggaaaacaaaacgctggaaggctggggctatgattattatgtctttgataaagttagctcgccggtttccacgatgatggcctgcccggatggcaagaaagagaagaaatttgtcaccgcgtatctgggcgatgctggaatgctgcgttacaacagcaagctgccgatcgtggtgtatacgccagacaatgtagatgtgaagtaccgcgtctggaaggcggaagagaaaattgacaacgcggtagttcgctaa

SEQ ID NO: 483789 - DNA, 165 bp, Shigella sonnei; identical to SEQ ID NO: 470969

SEQ ID NO: 483790 - DNA, 495 bp, Shigella sonnei
gtgaagattgatgcatcccgtcggggcatactcactggtcgctggcgcaaagccagtaacggtatccgtccgccctggtccggtgatgaatctcattttctgacccattgcacccgttgcgacgcctgtattaatgcttgtgaaaacaacattctgcaacgcggcgcgggcggctatccgagcgttaatttcaaaaataacgagtgcagcttctgttacgcctgcgcgcaggcttgccccgaatcgctattttctccgcgccacaccagggcctgggatttgcagttcaccattggggacgcgtgcctggcgtatcagtcagttgaatgccgccgctgtcaggatagctgtgagccaatggcaattatctttcgcccgacgctctccgggatctaccagccgcaacttaatagccaactttgcaacggatgtggagcatgtgcagccagctgtccggtatcagccataactgcggagtatctccatgcacactaa

SEQ ID NO: 483791 - DNA, 264 bp, Shigella sonnei; identical to SEQ ID NO: 458649

SEQ ID NO: 483792 - DNA, 2487 bp, Shigella sonnei
atgaaactcagtcgtcgtagctttatgaaagctaacgccgttgcggccgctgcggcggctgccggtctcagcgtgccgggcgttgcccgcgccgttgttggtcagcaggaagccattaaatgggataaagcgccgtgccgtttctgcggtactggttgcggcgttctggtcggaacgcagcaggggcgtgtggtggcctgtcagggcgacccggacgcaccggttaaccgtggcctgaactgcattaagggctatttcctgcccaagatcatgtacggtaaagaccgtttgacgcagccgctgctgcgtatgaaaaacggtaaatatgacaaagaaggcgaatttaccccaatcacctgggatcaggccttcgatgtgatggaagagaaattcaaaaccgccctgaaagaaaaagggccggaatcgatcggtatgttcggttctggtcagtggactatctgggaaggttatgccgcgtccaagctgtttaaagcgggcttccgttcgaacaacatcgacccgaacgcgcgtcactgtatggcgtcggcagtagttggctttatgcgtacctttggtatggatgagccgatgggctgctatgacgacatcgagcaggctgacgcgtttgtgctgtggggcgcaaacatggcggagatgcacccgatcctctggtcgcgcatcactaaccgtcgtctctctaatcagaacgtcaccgtggcggtgctttctacctaccagcatcgtagcttcgagctggcggataacggcatcatctttacgccacagtctgacctggtgatcctgaactacatcgccaactatatcattcaaaacaatgcgataaatcaggacttcttcagcaaacacgttaacctgcgcaaaggggcgacggacatcggctacggtttacgtccgacccatccgctggaaaaagcagcgaagaatccaggttctgacgcctccgaaccgatgagctttgaagattacaaagccttcgttgccgagtatacgctggaaaaaaccgctgaaatgaccggcgtgccgaaagaccagttagaacaactggcgcagctgtatgccgatccgaacaagaaagtcatctcctactggacgatgggcttcaaccagcatactcgtggcgtgtgggctaacaacctggtctacaacctgcacctgctgaccggcaaaatttcccagccgggttgcggtccgttctccctgaccgggcaaccttctgcgtgtggtactgcgcgtgaagtgggcacctttgctcaccgtctgcctgcggacatggtggtgaccaacgagaaacaccgtgatatctgcgagaagaagtggaatatcccgagcggcaccattccggcgaaaatcggtctgcacgcggtggcacaagaccgtgcgctgaaagacggcaaactgaatgtttactggaccatgtgtaccaacaacatgcaggccgggccgaacatcaatgaagagcgtatgccgggctggcgcgatccgcgcaacttcatcatcgtctccgatccgtatccgacagtcagtgcgctggccgccgacttgatcctgccgaccgcaatgtgggtagagaaagagggtgcttacggtaacgccgaacgccgtactcagttctggcgtcagcaggtacaggcaccgggcgaagcgaaatcggatctctggcagttagtccagttctcccgccgcttcaaaactgaagaagtgtggccggaagagctgctagcgaagaaaccggaactgcgtggcaaaacgctgtacgaagtgctttatgccacaccggaagtgagcaaattcccggtatccgaactggcggaagatcagctgaacgatgaatcccgcgagctgggcttctatctgcaaaaagggctgttcgaagagtacgcatggtttggtcgcggtcacggtcacgatctcgcgccgttcgatgactaccacaaagcgcgcggtctgcgctggccggtggtgaacggtaaagaaacgcagtggcgttacagcgaaggtaacgacccgtacgtgaaagcgggcgaaggctataagttctacggtaaaccggatggtaaagcggtgatcttcgcgctgccgttcgaaccggcggcggaagcaccggatgaagagtacgacctgtggctctctaccggacgcgttctggagcactggcacactggcagtatgactcgccgtgtgccggaactgcaccgcgccttcccggaagcggtcttgtttattcacccgctggatgcgaaagcgcgcgatctgcgccgtggcgacaaagtgaaagtggtttctcgccgtggcgaagtgatctcgattgttgaaacgcgcggtcgtaaccgtccgccacagggcctggtgtacatgccgttcttcgacgccgcacagctggttaacaaactaacgctggacgcgaccgatccgctctcgaaagagacggacttcaagaagtgcgcagtcaaactggagaaggtgtaa

SEQ ID NO: 483793 - DNA, 696 bp, Shigella sonnei
atgtcccggtcagcgaaacctcaaaatggtcgccgccgctttctgcgcgatgttgttcgcacagcaggcgggctggctgccgtgggtgtggcgctggggttacaacagcaaaccgcacgcgcatctggcgtgcggttgcgcccgcccggagccataaacgagaacgcctttgccagtgcctgtgtgcgttgcggtcagtgtgttcaggcttgcccttacgacaccttaaaactggcgacgctggcttctggcctgtcggcgggcacgccatattttgtcgcacgggatattccttgcgaaatgtgtgaggacattccgtgcgccaaagtgtgcccgagtggtgcgctggatcgtgagatcgaatcgatcgacgacgcgcggatggggctggcggtgctggtggaccaggaaaactgtctcaactttcaggggctgcgctgcgatgtttgttatcgcgaatgcccgaaaattgatgaggccatcaccctggagctggagcgcaacacgcgtaccggtaagcacgcccgctttctgccgacggttcacagcgacgcctgtaccggctgcggtaagtgcgaaaaagtgtgcgtgctggaacaaccggcaatcaaggtgttaccgctgtcactggcgaaaggggagttaggtcaccattaccgcttcggctggctggaggggaacaatggcaaatcgtaa

SEQ ID NO: 483794 - DNA, 864 bp, Shigella sonnei
atggcaaatcgtaaacgtgacgccgggcgcgaggcgctggtgaaaaaaggctggtggcgcagtcaccgttggctggtgttacgtcgcctttgtcagttcttcgtgctggggatgtttttgagcggtccgtggtttggtgtgtggatcttacacggcaactacagctgtagcctgttattcgacaccgttccgctgaccgatccgctgatgacgctgcaaagtcttgccagtggtcatctgcctgccacggtggcgttgaccggtgcggtgataatcactgtgctctacgccctggcaggaaagcgattattttgcagctgggtctgcccgctgaacccgattaccgacttagcgaactggttacgcaggcgctttgacctcaatcagtctgcgacgatccctcgccacattcgctacgtgctgttggtggtcattctgctgggatcagccttaaccggcacgctcatctgggaatggatcaaccccgtttccctgatggggcgtagcctggtaatgggcttcggcagcggcgcgctgcttattctcgcgctgtttttatttgatctactggtcgttgaacacggctggtgcgggcacatttgtccggttggcgcgctgtatggcgtgctgggtagcaaaggtgtgattaccgttgcggccagcgatcggcagaaatgtaaccgctgtatggattgttttcatgtttgcccggaaccgcatgtgctacgtgccccggtgctggatgaacaaagcccggtgcaggtcaccagccgcgattgcatgacgtgcggtcgctgcgtggatgtctgttctgaggatgtatttacaataactacacgatggagttcgggagcgaaatcatga

SEQ ID NO: 483795 - DNA, 450 bp, Shigella sonnei
atgaaaagccatgacctgaagaaagcgctgtgtcaatggacggcgatgctggccctggtggtaagcggcgcggtttgggcggctaatggcgtcgattttagccagtcgccggaagtatccgggacgcaggaaggggccattcggatgccaaaagagcaggatcggatgccgctgaactatgtgaatcagccgccaatgatcccgcatagcgttgaaggttatcaggtaacgaccaataccaaccgctgcttgcagtgccacggtgtcgaaagctatcgcaccactggcgcgccgcgtatcagtcctactcactttatggacagcgacggcaaagtgggcgcggaagtggctccgcgtcgttatttctgtctgcaatgtcacgtaccgcaggccgataccgcgccaatcgtggggaatacctttaccccatcaaaaggttacgggaaataa

SEQ ID NO: 483796 - DNA, 603 bp, Shigella sonnei
atgggaaattctgaccgtaagcctggtctgattaagcgcctgtggaaatggtggcgtacccccagccgtctggcgctgggaacgctgctgttgatcggttttgtcggcggcatcgtcttctggggcggctttaacaccggaatggaaaaagccaataccgaagagttctgcattagctgccacgaaatgcgtaacacggtgtatcaggaatacatggattccgtgcactacaacaaccgtagcggcgtccgtgcgacctgtccggattgtcacgttccgcacgagtttgtgccgaagatgatacgcaagctcaaagcaagtaaagagctgtatggtaaaatttttggcgttattgacacgccgcagaaatttgaagctcatcgtctgacaatggcacagaatgagtggcggcgcatgaaggacaataactcgcaggagtgccgtaactgtcacaacttcgagtatatggatacaaccgcccagaaatcggttgccgcgaagatgcatgaccaggcggtgaaagatgggcaaacctgtattgattgccataaagggatagcgcacaagctgcccgatatgcgtgaagtcgagccaggtttttaa

SEQ ID NO: 483797 - DNA, 618 bp, Shigella sonnei
atgcttgaagccagagagttactttgtgagcgggatgaacgaaccttatttagtggcttgtcatttacgctgaacgcaggagagtgggtacaaatcaccggtagcaacggcgcggggaagacaacgcttctccgtttgctgacggggttgtctcgccctgacgcaggcgaggttctctggcaagggcagcccttgcatcaggtacgcgacagctaccatcaaaacctgttatggataggccatcagccggggatcaaaacccggctgacggcgttagaaaatctgcacttttatcatcgcgatggcgataccgcacaatgtctggaagccctggcgcaggccgggcttgccggattcgacgatattccggtaaatcaactttctgccgggcaacaacgccgcgtcgctttagcgcgtctgtggctgacccgtgccacgttatggatcctcgacgagccttttaccgcgattgacgttaacggcgtcgatcgtctgacccagcgtatggcgcagcatacggagcagggggggattgtgattctgactacccaccagccgctcaacgttgctgaaagtaaaattcgccgcatttcactgacgcaaacgagggccgcatga

SEQ ID NO: 483798 - DNA, 663 bp, Shigella sonnei; identical to SEQ ID NO: 458656

SEQ ID NO: 483799 - DNA, 738 bp, Shigella sonnei
atgtggaaaacactgcatcaactggcgatcccaccacggctgtatcaaatctgtggctggtttataccgtggctggcaattgccagtgtggtcgtgcttaccgtcggctggatctggggattcggctttgctccggctgattatcagcagggaaatagctaccgcattatctacctgcatgtgcctgcggcgatctggtcgatgggcatttatgcatcaatggcagtggcagcgtttattggccttgtctggcagatgaaaatggccaacctggcggtggcggcgatggcccccattggtgccgtgtttacctttattgccctggttaccggctctgcatggggaaaaccgatgtggggcacctggtgggtatgggatgcacgtctgacttctgaactggtgctgctgtttttgtatgtgggtgtgattgccctgtggcacgccttcgacgaccgccgtctggcgggccgtgcggcaggtatcctggtgctgattggcgtggtgaatctgccgattattcattactccgtggagtggtggaacaccctgcatcagggatcaacgcggatgcagcaaagtatcgatccggcgatgcgttcgccgctgcgctggtcgatttttggcttcctgctcctgtctgccacgctgacgctgatgcggatgcgtaatttgattttgctgatggaaaaacgccgtccgtgggtgagtgaactgatactgaaaagaggccgtaaatga

SEQ ID NO: 483800 - DNA, 210 bp, Shigella sonnei; identical to SEQ ID NO: 470980

SEQ ID NO: 483801 - DNA, 480 bp, Shigella sonnei
atgaatattcgccgtaaaaaccgcttgtggattgcctgtgccgtgttggcagggctggcgctgactatcggtctggtgctatatgcgctgcgctcgaatatcgatctcttttatacgccgggggaaattctctacggcaagcgtgaaactcagcaaatgccggaagtcggtcagcgtttgcgcgttggcgggatggtgatgctgggtagtgtgcagcgcgatcccaattcgctgaaagtgaccttcactatttacgatgctgaaggctcagtggatgtctcttacgaaggcattttgccggatctgttccgtgaagggcagggcgttgtggtgcagggcgagctggaaaaaggcaatcatatcctcgcgaaagaagtgctggcgaaacacgacgaaaactacacgccgccagaagttgagaaagcgatggaagctaaccaccgtcgcccggcgagtgtttataaggacccagcatcatga

SEQ ID NO: 483802 - DNA, 1944 bp, Shigella sonnei
atgatgccggaaattggaaacgggctgctgtgtctggcgttagggattgcgctgctgctgtccgtgtatccgctatggggcgtggcgcgcggagatgcgcgcatgatcgcgtcttcccgcttgtttgcctggctgctgtttatgtctgtggctggcgcatttctggtgctggtcaatgctttcgtggtcaacgactttaccgtcacctatgttgccagctactccaatacccagcttccggtgtggtatcgcgtggcggctacctggggcgcgcatgaaggctcgctactgctgtgggtgctgctgatgagcggctggacctttgcggtggcgatttttagtcagcgtattccgctggatattgtggcccgcgtactggcgataatggggatggtcagcgtcggctttttgctgttcattctctttacctctaacccattctcacgcacgctgccgaacttcccgattgaagggcgcgatcttaacccgctgttacaggacccggggctgatcttccatccgcctctgctttatatggggtacgtgggtttctcggtggcgtttgcttttgccattgcttctttgctgagcgggcgtctggacagcacttatgcgcgttttactcgcccgtggacgctggcggcgtggattttcctgacgctcggcattgtgctcggttccgcatgggcctattacgaactcggctgggggggctggtggttctgggatccggtagaaaacgcctcgtttatgccgtggctggtggggactgcgctgatgcactcactggcggtcactgaacaacgcgccagcttcaaagcgtggacattactgctggcaatcagtgccttctcgttgtgtctgttggggactttcctcgtgcgttccggcgtgctggtatcggtacacgcgtttgcgtctgatccggcgcgcggtatgtttatcctcgcctttatggtgctggtgattggaggttcgctgctgctgtttgccgcgcgtggacacaaagttcgctcacgcgtaaacaatgcgctgtggtcgcgggaatctctgctgttagcgaacaacgttttgctggtcgccgcgatgctggtggtgttgctggggacgctgctgccgctggtgcacaagcaactgggactgggcagtatttcgattggcgaaccgttcttcaacaccatgtttacctggctgatggtgccgtttgcgctactgctgggtgtcggtcctctggtgcgctgggggcgcgatcgcccacgtaaaatccgcaatttattgattatcgccttcatctcaacgctggtgctgtctctgctgttgccgtggctgtttgagagcaaagttgtggcgatgacggtgctcggcctggcaatggcctgctggattgcggtgctggcaattgcggaagctgcgctgcgtatttcacgcggcacgaaaaccaccttcagttattgggggatggtggctgctcacctggggctggcagtgacaattgttggcattgcttttagccagaactatagcgttgagcgtgatgtgcgcatgaagtccggcgatagcatcgatattcatgaatatcgcttcaccttccgtgatgtcaaagaggtgactggcccgaactggcgtggcggtgtggcgactatcggcgtaacgcgagagggtaaaccggaaacagtgctgtatgcggaaaaacgttattacaacactgccgggtcgatgatgaccgaagcggcgattgacggtggcatcacgcgtgacctgtacgccgcgctcggtgaagagctggaaaacggcgcgtgggctgtgcgtctttactacaaaccatttgttcgctggatttgggcgggcgggctgatgatggcgttgggcggactgctgtgtctgtttgatcctcgctatcgtaagcgcgtgagtccgcaaaaaactgcgccggaggctgtatga

SEQ ID NO: 483803 - DNA, 558 bp, Shigella sonnei
atgaagcgcaaagtattgttaattccgttgattatcttcctggcgattgccgcggcgctgctgtggcagctggcgcgtaatgccgaaggggatgatccgaccaatctggaatcggcgctcattggcaagccagtgccgaagtttcgcctcgaatcactggacaatccggggcagttttatcaggcggatgtgctgactcagggcaaaccagtgctgcttaacgtctgggcgacctggtgtccgacctgccgtgcggaacatcaatatctgaatcagctttctgcgcagggcatccgcgtagtcggcatgaactataaagacgatcgccagaaggcaatcagctggctgaaagagctgggcaatccttacgcgctaagcctgtttgatggcgatggcatgttagggctggatctcggtgtctatggcgcgccagaaacgttccttattgacggcaacggcatcattcgctatcgccatgcgggcgatctcaatcctcgcgtctgggaagaagagatcaagccgctgtgggagaaatacagtaaggaggccgcacaatga

SEQ ID NO: 483804 - DNA, 1053 bp, Shigella sonnei
atgaggtttttattgggcatgctgatgctgatgatctccggctcagcgctggcgaccatagacgtgttgcagtttaaagatgaagcacaggaacaacagttccgtcagctcactgaagaactgcgctgcccgaaatgccagaacaacagcattgccgattccaactcgatgattgccaccgacctgcgccagaaagtgtatgaactgatgcaggaaggtaaaagtaaaaaagagattgtcgattatatggtggcgcgttacggcaacttcgtcacttacgatccgccgttaacgccgctgaccgtgctgctgtgggtgctgccagtagtagctattggcattggcggttgggtcatatacgcccgctcgcggcgtcgggtacgcgtggtgccggaagcgtttcctgaacaaagcgtgccggaaggtaagcgtgccggatatgtcgcttatttgccgggcattgtggtggcgttaattgtggctggcgtcagctactaccagaccggaaattatcaacaggtgaaaatctggcagcaggccacggcacaggctccggcgttgctggacagggcgctggatccgaaagctgatccgctcaacgaagaagagatgtcgcgccttgcgctggggatgcgtactcaactgcaaaaaaatccgggagatatagacggctggattatgttgggccgcgttggcatggcgctgggtaacgccagtatcgccaccgatgcatacgctactgcgtatcgcctcgatccgaaaaacagtgatgccgcactgggttatgctgaagcgttgacacgttcatctgatcccaacgacaaccgcctcggcggcgaactgctacgtcagctggtgagaacggaccatagcaatatccgtgtgctaagcatgtatgcgtttaatgcctttgagcagcagcgatttggcgaagccgttgccgcgtgggagatgatgttgaaactcttacctgccaacgatactcgccgtgcggtgattgaacgtagtatcgcgcaggcgatgcaacatttgtcgccgcaggagagtaaataa

SEQ ID NO: 483805 - DNA, 648 bp, Shigella sonnei
atgcctgaagcaacgccttttcaggtgatgattgtggatgatcatccacttatgcgacgcggtgttcgtcagttactggagcttgatcctggctttgaagtggtcgccgaagcgggcgacggcgcgagcgcgatcgatctggcgaatagactggatatcgacgtgatcttgctggatctcaatatgaaaggtatgagtggcctggataccctcaatgccttgcgcagggatggcgttaccgcgcaaattattatcctgaccgtatccgatgcctccagcgatgtctttgcgctgatagacgcaggcgcagacggttatctgctgaaagacagcgacccggaagtgttgctggaagcgattcgtgccggagcgaaaggcagcaaagtctttagcgaacgcgtcaatcagtacttacgtgaacgtgaaatgtttggcgcggaagaagatcccttcagcgtgctgacggagcgcgagctggatgttctgcacgagctggcacaggggctgtcaaataaacagattgcctctgtgttgaatatttccgagcagacagtaaaagttcatattcgaaatctgctgcgtaaactcaatgtccgctcacgcgtggcggccaccattctgttcctgcaacaacgcggggcacaataa

SEQ ID NO: 483806 - DNA, 387 bp, Shigella sonnei
atgcatcaatctggttctgtttctctttgtcgttccgcaatatctgttctggtggctacagcgttatattcacccatagcattggcatcaacagttgagtatggtgagacagttgatggtgttggcctggaaaaagatatccagctggtttatgggaccgccaataatacgaaaatcaatcctggcggagaacagcatataaaagaatttggtgtaagtagtaatactgaaattaacggcgggtatcagtacattgaaatgaatggcactgcagaatactcagtattaaatgatggttatcaaattgttcaaatgggtggcgcggtaaaccagactacgctcaataatggagtgctacaggtttatggcgctagactggccccctga

SEQ ID NO: 483807 - DNA, 216 bp, Shigella sonnei
atgatatttaaccgcctgaaacttgcggtagaccgcgtcattgccgcgttttctgtcgccgtcatgcttgctctggttgtatgcgtagtctggcaagtatttagccgctacgtacttaaccagccaagtacattaaccgatgagctggcacgatttttgatgatctgggtagggttattaggtgctgcaggtgatgctgccaacttactgatttag

SEQ ID NO: 483808 - DNA, 987 bp, Shigella sonnei
atgaaaatgaggtcatttacccgctcattagtctgcgcatccttgctggctctggttagcactggcgtaaacgccgcagaaaaagtgacgttaaagttagcacacaacctggaaagaagtcatgttgtacatcagagttttgaagagctggcgaaagaggtaaaacagctgtcagaaggtaatatggtgatccgtatttatcccagcagccagatgggtaatgcgcgagaaactatggaattgttgcaaaatggcgcactggatatgaccaaaggttccgccagtgatctggagtcttttgataatatttatgctatctataatttgccgttcttatttaaagatcaggctcacttcaacaaagttgtttttggtgaagttggtaaagaaattatggactcaacaaaagacaaaggcttttttgctttatcagcttatgtagcgggtacacgcagtttctatgcgaaaaaaccgattactaagccagaagatcttaaagggctgaaaattcgtgttcagccaagtccgaccaccatcaaaatgattgaactgatgggtggttcacccactccaatttcatttggcgaagtttatactgcgatgcagcaaggtgtagtagatggcgcagaaaataacgtgccttcctgggtgcagactcgacatattgaaattgccaaagttttttctgaagatgaacacgcctcaattcctgactttttggttatctccaccaaaacatggaataaattaaccccagaacagaaacaaatcctcgaaacagcagcgaagaaatccgaagcttatcaacaaaaattgtgggaaaaaattgacgctgacacacgtgctcaggcgaaagctatggggggtgaaattgtaaaagtggataaagcaccattccgtgccgcagttcagcctctgtttgacgacttcaaaaaagatccaaaacaagctgctttgttagagaagttcgacaacgctgctcaataa

SEQ ID NO: 483809 - DNA, 1137 bp, Shigella sonnei
atggttaaattaccgccgctgagtctctacattcacatcccgtggtgcgtgcagaaatgcccgtactgcgatttcaactctcacgcgttgaaaggagaagtgccgcacgacgattatgttcagcatctgctttgcgatctggacaatgatgtggcttacgctcagggccgtgaagtaaagacaatctttattggcggtggtacgccgagcctgctttccggcccggcgatgcaaacgctgctggacggcgtgcgtgcgcgtttgccgctggcagcggatgcagaaattactatggaagcgaaccctggaacggtagaagccgatcgctttgtcgattatcagcgtgctggtgtgaaccgcatctctattggtgtgcagagttttagcgaagaaaagctgaaacgacttgggcgtattcatggcccgcaagaagcgaaacgcgcggcaaagctggcgagcgggctggggctgcgtagctttaacctcgatttgatgcatggactaccggatcaatcactggaagaggcgcttggcgatctacgccaggccattgaactgaatccgccgcatctttcctggtatcaactgaccatcgaacccaatacgctgtttggttcgcgaccaccggtgctgccggacgatgacgcgctgtgggatattttcgaacaggggcatcagttattaaccgcagcgggttatcagcaatatgaaacttccgcttacgccaaacccggttatcagtgccagcacaatctcaactactggcgatttggtgactacatcggtattggctgcggcgcgcacggcaaagtcaccttcccggatgggcgcattctgcgtaccactaaaacgcgtcatcctcgtggttttatgcaaggaaggtatctggaaagccagcgtgatgtcgaagccgcagataagccgtttgagttctttatgaatcgcttccgtctgctggaggccgcgccgcgcgtggagtttattgcgtataccgggctttgcgaagatgtgattcgcccacagttagacgaggcgattgcccagggttatctcaccgaatgtgcggattactggcagataaccgagcacggtaaattattcttaaactcacttcttgaattattcctcgctgagtaa

SEQ ID NO: 483810 - DNA, 594 bp, Shigella sonnei
atgcaaaaagttgtcctcgcaaccggcaatgccggtaaagtgcgtgagctggcgtcgctgcttagcgacttcggtcttgatatcgtggcccaaacagacctcggcgtagattccgctgaagaaaccggcctgacctttatcgaaaacgcgattctgaaagcgcgctatgcggcaaaagtgaccggtttaccggcaattgccgacgactctggtctggcggtagatgcgctgggtggcgcgccgggtatttactccgcgcgttattccggtgaagacgcgaccgatcaaaagaatctgcaaaaactgttggaaacactgaaagacgtaccggacgaccaacgtcaggcgcgtttccactgcgtgctggtatatctgcgtcacgcggaagatccgactccgctggtatgccacggcagctggccgggcgtgattactcgcgaaccagcgggcactggtggctttggttatgatccaatcttcttcgtaccttccgaagggaaaaccgccgccgaactgacccgcgaagaaaagagcgccatttcccaccgtggtcaggcgttgaaactgctgctggacgctttacgtaatggttaa

SEQ ID NO: 483811 - DNA, 291 bp, Shigella sonnei
atgagtgccgtaacagttaatgatgacggtctggttttacggctctatattcagccgaaagccagccgtgattctattgtcggtttacatggcgacgaagttaaagtcgccattaccgcgccgccggttgacggccagggcaacagtcatctggtgaagtttctcggtaagcaattccgggttgccaaaagccaggtggtgattgaaaaaggcgaacttggccgccacaaacaaattaaaatcattaatccgcaacaaatcccgccagaaatcgcggcgttaattaattag

SEQ ID NO: 483812 - DNA, 567 bp, Shigella sonnei
atgaatacgttgactttcctgctttcaacggtcattgagctgtataccatggtgctgttattacgcatctggatgcagtgggctcattgtgatttttacaaccccttctcacagtttgtagtgaaggtaacgcagccaattatcgggccactgcgccgcgttattccggcaatgggccccattgacagcgcctcgctgctggttgcctatattctcagttttatcaaagccatcgtgctgtttaaagtggtgaccttcctgccaatcatctggattgctggtttactgattctgctgaaaaccatcggcctgctgattttctgggtcctgctggtgatggcgattatgagctgggtaagccagggtcgtagtccgattgaatacgtgctgattcagctggccgatccgctgctgcgcccgattcgccgcctgctaccggcaatgggtgggattgatttctcgccgatgatcctcgttctgctgctgtatgtcatcaatatgggtgtcgcagaagtattacaggcaaccggaaacatgctgctgccggggctgtggatggcgttatga

SEQ ID NO: 483813 - DNA, 705 bp, Shigella sonnei
atgaacgatattgcgcataacctggcacaggtccgggacaaaatctcagcggctgcaacgcgttgcggccgttctccagaagaaattacgctgcttgcagtcagtaaaacaaaacctgcgagcgccatcgcagaagccattgatgccgggcagcgtcaatttggtgaaaactacgttcaggaaggggtagataaaattcgccactttcaggaactgggcgtaacaggattagaatggcattttattggcccgttgcagtctaataaaagccgcctggtggcagagcatttcgactggtgtcataccatcgaccgtttgcgcattgctacccgcctcaacgatcagcgcccggcagaacttccccctcttaacgtactgattcaaattaatattagtgatgaaaacagtaagtccgggattcaactggcagaactggacgagctggcagcggcggtcgctgaactaccgcgtttacgtctgcgcgggctgatggcaatccctgcgcctgagtcagaatatgtaaggcagtttgaagttgcacgccaaatggctgtagcatttgccggactgaaaacgcgctacccgcatatcgacacgctctctctgggaatgtcggacgatatggaagccgccattgcggcaggtagcacgatggttcgtatcggcactgcaatttttggtgcgcgtgattactctaaaaaataa

SEQ ID NO: 483814 - DNA, 981 bp, Shigella sonnei
atgaatatggaagaaattgtggcccttagtgtaaagcataacgtctcggatctacacctgtgcagcgcctggcccgcacgatggcgcattcgcgggctaatggaagctgcgccgtttgaggcgccggacgtcgaagagctactgcgggagtggctggatgacgatcagcgggcaatattgctggaaaatggccagctggattttgccgtgtcgctggcggaaaaccagcgattgcgtggcagcgcatttgcgcaacggcatggcatttcgctggcgttacggctgttaccttcgcactgcccgcagctcgaacagcttggcgcaccaacggtattgccggaattactcaagagtgagaatggcctgattctggtgacgggggcgacggggagcagcaaatctaccacgctggcggcgatggttggctatctcaatcaacatgccgatgcgcatattctgacgctggaagatcctgttgaatatatctatgccagccagcgatgtttgatccagaagcgggaaattggtttgcactgtatgacgttcgcatcgggattgcgggccgcattgcgggaagatcctgatgtgattttgctcggagagctgcgtgacagcgagacaatccgtctggcactgacggcggcagaaaccgggcatttggtgctggcaacattacatacgcgtggtgccgcgcaggcagttgagcgactggtggattcatttccggcgcaggaaaaagatcccgtacgtaatcaactggcaggtagtttacgggccgtgttgtcacaaaagctggaagtggataaacaggaaggacgcgtggcgctgtttgaattattgattaacactcccgcggtggggaatttgattcgcgaagggaaaacccaccagttaccgcatgttattcaaaccgggcagcaggtggggatgataacgtttcagcagagttttcagcagcgagtgggggaagggcgtttgtga

SEQ ID NO: 483815 - DNA, 417 bp, Shigella sonnei
atgagtggaaccttactcgccttcgacttcggcaccaaaagcattggcgtagcggtcggccaacgcattaccggcactgctcgccctttgcctgcaattaaagcacaggacggtacgccggactggaacctcatcgaacgtttactgaaagagtggcagccggacgaaatcatcgtcggtttgccgctgaatatggacggcaccgagcaaccattgactgccagagcgcgtaaatttgccaaccgtattcatggtcgtttcggtgttgaagtaaagctccatgacgaacgtcttagcaccgtggaagcccgttccggtctgtttgaacagggcggctatcgggcgctcaacaaaggcaaagtcgactctgcctctgcggttattattctcgaaagctatttcgagcagggatattaa

SEQ ID NO: 483816 - DNA, 636 bp, Shigella sonnei
gtgacagcgcccttctttccacgcatactgggcgctgttgcttttttgaaccaggaaacagaacctctgacaatgaatttacagcatcactttcttattgccatgcctgctctccaggatccgattttccgtcgttccgtggtctacatttgcgaacataataccaatggtgcaatggggatcatcgtcaacaagccgctggaaaatctcaaaattgaagggattctggaaaagctgaagatcacgccggagccgcgtgatgaatcaatccgtctggataaaccggttatgctcggcggtccgctggctgaagatcgcgggtttattttgcatactccgccctccaattttgcttccagcattcgcatttcagacaacacagtgatgaccacttcccgcgatgtgctggaaacgctcggcaccgataaacaaccgtctgacgtattggtggctctaggttatgcctcctgggaaaaaggtcaactggaacaagaaattctcgataacgcgtggctaacggccccggcggatctgaatattctgttcaaaacgccgattgccgaccgctggcgcgaggcggcaaaactgattggtgtggatattctcaccatgcctggtgtggcagggcacgcctga

SEQ ID NO: 483817 - DNA, 951 bp, Shigella sonnei
atgatcaagctcggcatcgtgatggaccccatcgcaaacatcaacatcaagaaagattccagtttcgctatgttgctggaagcacagcgtcgtggttacgaacttcactatatggagatgggcgatctgtatctgatcaatggcgaagcccgcgcccatacccgcacgctgaacgtgaagcagaactacgaagagtggttttcgttcgtcggtgaacaggatctgccgctggccgatctcgatgtgatcctgatgcgtaaagacccgccgtttgataccgagtttatctacgcgacctatattctggaacgtgccgaagagaaagggacgctgatcgttaacaagccgcagagcctgcgcgactgtaacgagaaactgtttaccgcctggttctctgacttaacgccagaaacgctggttacgcgcaataaagcgcagctaaaagcgttctgggagaaacacagcgacatcattcttaagccgctggacggtatgggcggcgcgtcgattttccgcgtgaaagaaggcgatccaaacctcggcgtgattgccgaaaccctgactgagaatggcactcgctactgcatggcacaaaattacctgccagccattaaagatggcgacaaacgcgtgctggtggtggatggcgagccggtaccgtactgcctggcgcgtattccgcaggggggcgaaacccgtggcaatctggctgccggtggtcgcggtgaacctcgtccgctgacggaaagtgactggaaaatcgcccgtcagatcgggccgacgctgaaagaaaaagggctgatttttgttggtctggatatcatcggcgaccgtctgactgaaattaacgtcaccagcccaacctgtattcgtgagattgaagcagagtttccggtgtcgatcaccggaatgttaatggatgccatcgaagcacgtttacagcagcagtaa

SEQ ID NO: 483818 - DNA, 732 bp, Shigella sonnei; identical to SEQ ID NO: 458447

SEQ ID NO: 483819 - DNA, 708 bp, Shigella sonnei
atgtaccgttatttgtctattgctgcggtggtactgagcgcagcattttccggcccggcgttggccgaaggtatcaatagtttttctcaggcgaaagccgcggcggtaaaagtccacgctgacgcgcccggtacgttttattgcggatgtaaaattaactggcagggcaaaaaaggcgttgttgatctgcaatcgtgcggctatcaggtgcgcaaaaatgaaaaccgagccagccgcgtagagtgggaacacgtcgttcccgcctggcagttcggtcaccagcgccagtgctggcaggacggtggacgtaaaaactgcgctaaagatccggtctatcgcaagatggaaagcgatatgtataacctgcagccgtcagtcggtgaggtgaatggcgatcgcggcaactttatgtacagccagtggaatggcggcgaaggccagtacggtcaatgcgccatgaaggtcgatttcaaagaaaaagctgccgaaccaccagcgcgtgcacgcggtgccattgcgcgcacctacttctatatgcgcgaccaatacaacctgacactctctcgccagcaaacgcagctgttcaacgcatggaacaagatgtatccggttaccgactgggagtgcgagcgcgatgaacgcatcgcgaaggtgcaaggcaatcataacccgtatgtgcaacgcgcttgccaggcgcgaaagagctaa

SEQ ID NO: 483820 - DNA, 456 bp, Shigella sonnei
atgcgcggcctgcgggaaaaactcgcccaggccaacctgaagctagggcgtaactacccggagccaaaactctcttacacccagcgcggaacctccgccggaacagcctggctggaaagctatgaaatccgcctcaatcccgttttgctgttggaaaacagtgaagcttttattgaagaagtggtaccgcacgaactggcacatttgctggtatggaaacatttcggccgcgtagcgccacatggcaaagagtggaagtggatgatggaaagcgtgctgggtgttcccgcccgtcgtacgcatcagttcgaactgcaatccgtgcgtcgcaacaccttcccctaccgctgcaagtgccaggagcatcagcttaccgtacgccgccataatcgcgtagttcgtggcgaggccgtctatcgctgtgttcactgcggtgaacagctggttgcgaaataa

SEQ ID NO: 483821 - DNA, 1395 bp, Shigella sonnei
atgcctgacgctaaaaaacaggggcggtcaaacaaggcaatgacgtttttcgtctgcttccttgccgctctggcgggattactctttggcctggatatcggtgtaattgctggcgcactgccgtttattgcagatgaattccagattacttcgcacacgcaagaatgggtcgtaagctccatgatgttcggtgcggcagtcggtgcggtgggcagcggctggctctcctttaaactcgggcgcaaaaagagcctgatgatcggcgcaattttgtttgttgccggttcgctgttctctgcggctgcgccaaacgttgaagtactgattctttcccgcgttctactggggctggcggtgggtgtggcctcttataccgcaccgctgtacctctctgaaattgcgccggaaaaaattcgtggcagtatgatctcgatgtatcagttgatgatcactatcgggatcctcggtgcttatctttctgataccgccttcagctacaccggtgcatggcgctggatgctgggtgtgattatcatcccggcaattttgctgctgattggtgtcttcttcctgccagacagcccacgttggtttgccgccaaacgccgttttgttgatgccgaacgcgtgctgctacgcctgcgtgacaccagcgcggaagcgaaacgcgaactggatgaaatccgtgaaagtttgcaggttaaacagagtggctgggcgctgtttaaagagaacagcaacttccgccgcgcggtgttccttggcgtactgttgcaggtaatgcagcaattcaccgggatgaacgtcatcatgtattacgcgccgaaaatcttcgaactggcgggttataccaacaccacagagcaaatgtgggggacagtgattgtcggcctgaccaacgtacttgccacctttatcgcaatcggccttgttgaccgctggggacgaaaaccaacgctaacgctgggcttcctggtgatggctgctggcatgggcgtactcggtacaatgatgcatatcggtatccactctccgtcggcgcagtatttcgccatcgccatgctgctgatgtttattgtcggttttgccatgagtgccggtccgctgatttgggtactgtgctccgaaattcagccgctgaaaggccgcgattttggcatcacctgctccactgccaccaactggattgccaacatgatcgttggcgcaacgttcctgaccatgctcaacacgctgggtaacgccaacaccttctgggtgtatgcggctctgaacgtactgtttatcctgctgacattgtggctggtaccggaaaccaaacacgtttcgctggaacatattgaacgtaacctgatgaaaggtcgtaaactgcgcgaaatcggcgctcacgattaa

SEQ ID NO: 483822 - DNA, 1155 bp, Shigella sonnei
atggcaaaacacctttttacgtccgagtccgtctctgaagggcatcctgacaaaattgctgaccaaatctctgatgccgttttagacgcgatcctcgaacaggatccgaaagcacgcgttgcttgcgaaacctacgtaaaaaccggcatggttttagttggcggcgaaatcaccaccagcgcctgggtagacatcgaagagatcacccgtaacaccgttcgcgaaattggctatgtgcattccgacatgggctttgacgctaactcctgtgcggttctgagcgctatcggcaaacagtctcctgacatcaaccagggcgttgaccgtgccgatccgctggaacagggcgcgggtgaccagggtctgatgtttggctacgcaactaatgaaaccgacgtgctgatgccagcacctatcacctatgcacaccgtctggtacagcgtcaggctgaagtgcgtaaaaacggcactctgccgtggctgcgcccggacgcgaaaagccaggtgactttccagtatgacgacggcaaaatcgttggtatcgatgctgtcgtgctttccactcagcactctgaagagatcgaccagaaatcgctgcaagaagcggtaatggaagagatcatcaagccgattctgcccgctgaatggctgacttctgccaccaaattcttcatcaacccgaccggtcgttttgttatcggtggcccgatgggtgactgcggtctgactggtcgtaaaattatcgttgatacctacggcggcatggcacgtcacggtggcggagcattctctggtaaagatccatcaaaagtggaccgttccgcagcctacgcagcacgttatgtcgcgaaaaacatcgttgctgctggcctggccgatcgttgtgaaattcaggtttcctacgcaatcggcgtggctgaaccgacctccattatggtagaaactttcggtactgagaaagtgccttctgaacaactgactctgctggtacgtgagttcttcgacctgcgcccatacggtctgattcagatgctggatctgctgcacccgatctacaaagaaaccgcagcatacggtcactttggtcgtgaacatttcccgtgggaaaaaaccgacaaagcgcagctgctgcgcgatgctgccggtctgaagtaa

SEQ ID NO: 483823 - DNA, 252 bp, Shigella sonnei; identical to SEQ ID NO: 473215

SEQ ID NO: 483824 - DNA, 1977 bp, Shigella sonnei
atgtctgacgacatgtctatgggtttgccttcgtcagcgggcgaacacggtgtactacgctccatgcaggaggttgcaatgagctcccaggaagccagcaagatgctgcgtacttacaatattgcctggtggggcaataactactatgacgttaacgagctgggccacatcagcgtgtgcccggacccggacgtcccggaagctcgcgtcgatctcgcgcagttagtgaaaactcgtgaagcacagggtcagcgtctgcctgcactgttctgtttcccacagatcctgcagcaccgtttgcgttccattaacgccgcgttcaaacgtgcgagggaatcctacggctataacggcgattacttccttgtttatccgatcaaagttaaccagcaccgccgcgtgattgagtccctgattcattcgggcgaaccgctgggtctggaagccggttccaaagccgagttgatggcagtactggcacatgctggcatgacccgtagcgtcatcgtctgcaacggttataaagaccgcgaatatatccgcctggcattaattggcgagaagatggggcacaaggtctatctggtcattgagaagatgtcagaaatcgccattgtgctggatgaagcagaacgtctgaatgtcgttcctcgtctgggcgtgcgtgcacgtctggcttcgcagggctcgggtaaatggcagtcctccggcggggaaaaatcgaagttcggcctggctgcgactcaggtactgcaactggttgaaaccctgcgtgaagccgggcgtctcgacagcctgcaactactgcacttccacctcggttcgcagatggcgaatattcgcgatatcgccacgggcgttcgtgaatccgcgcgtttctatgtggaactgcacaagctgggcgtcaatattcagtgcttcgacgtcggcggcggtctgggcgtggactatgaaggcacccgttcgcagtctgactgctccgtaaactatggcctcaatgaatacgccaacaacatcatctgggcgattggcgatgcgtgtgaagaaaatggtctgccgcatccgacggtaatcaccgaatcgggccgtgcggtgactgcgcaccataccgtgctggtgtcgaatatcatcggcgtggaacgtaacgaatatacggtgccgaccgcgcccgcagaagatgcgccgcgcgcgctgcaaagcatgtgggaaacctggcaggaaatgcacgaaccgggaactcgccgttctttgcgtgaatggttacacgacagccagatggatctgcacgacattcatatcggctactcttccggcacctttagcctgcaagaacgtgcatgggcagaacaactctatctgagcatgtgccatgaagtgcagaagcaactggatccgcaaaaccgtgcgcatcgtccgataatcgacgaactgcaggaacgtatggcagacaaaatgtacgtcaatttctcgctgttccagtcaatgccggacgcatgggggatcgaccagttgttcccggttctgccgctggaagggctggatcaagtgccggaacgtcgcgctgtgctgctggatattacctgtgactctgacggtgctatcgaccactatattgatggtgatggtattgccacgacaatgccaatgccggagtacgatccagagaatccgccgatgctcggtttctttatggtcggcgcatatcaggagatccttggcaatatgcacaacctgttcggtgataccgaagcggttgacgtgttcgtgttccctgacggtagcgtagaagtagaactgtctgacgaaggcgataccgtggcggacatgctgcaatatgtacagctcgatccgaaaacgctgttaacccagttccgcgatcaagtgaagaaaaccgatcttgatgctgaactgcaacaacagttccttgaagagttcgaggcaggtttgtacggttatacttatcttgaagatgagtaa

SEQ ID NO: 483825 - DNA, 921 bp, Shigella sonnei
atgagcaccttaggtcatcaatacgataactcactggtttccaatgcctttggttttttacgcctgccgatgaacttccagccgtatgacagcgatgcagactgggtgattactggcgtgccgttcgatatggccacttctggtcgtgcgggtggtcgccacggtccggcagcgatccgtcaggtttcgacgaatctggcctgggaacacaaccgcttcccgtggaatttcgacatgcgtgagcgtctgaacgtcgtggactgcggcgatctggtatatgcctttggcgatgcccgtgagatgagcgaaaagctgcaggcgcacgccgagaagctgctggctgccggtaagcgtatgctcaccttcggtggtgaccactttgttacgctgccgctgctgcgtgctcatgcgaagcatttcggcaaaatggcgctggtacactttgacgcccacaccgatacctatgcgaacggttgtgaatttgaccacggcactatgttctataccgcgccgaaagaaggtctgatcgacccgaatcattccgtgcagattggtattcgtaccgagtttgataaagacaacggctttaccgtgctggacgcctgccaggtgaacgatcgcagcgtggatgacgttatcgcccaagtgaaacagattgtgggtgatatgccggtttacctgacttttgatatcgactgcctggatcctgcttttgcaccaggcaccggtacgccagtgattggcggcctgacctccgatcgcgctattaaactggtacgcggcctgaaagatctcaacattgttgggatggacgtagtggaagtggctccggcatacgatcagtcggaaatcaccgctctggctgcggcgacgctggcgctggagatgctgtatatccaagcggcgaaaaagggcgagtaa

SEQ ID NO: 483826 - DNA, 759 bp, Shigella sonnei
atgaaaattcgcgccttattggtagcaatgagcgtggcaacggtactgactggttgccagaatatggactccaacggactgctctcatcaggagcggaagcttttcaggcttacagtttgagtgatgcgcaggtgaaaaccctgagcgatcaggcatgtcaggagatggacagcaaggcgacgattgcgccagccaatagcgaatacgctaaacgtctgacaactattgccaatgcgctaggcaacaatatcaacggtcagccggtgaattacaaagtgtatatggcgaaggatgtgaacgcctttgcaatggctaacggctgtatccgcgtctatagcgggctgatggatatgatgacagataacgaagtcgaagcggtgatcggtcacgagatggggcacgtggcgttaggccatgtgaagaaagggatgcaggtggcgcttggtacaaatgccgtgcgagtagctgcggcctctgcgggcgggattgtcggcagtttatctcaatcacaacttggtgatctgggcgagaaattagtcaattcgcaattctcccagcgccaggaagcagaagccgatgattattcttacgatcttctgcgccaacgcggcatcagcccggcaggtcttgccaccagctttgaaaaactggcgaaactggaagaaggccgccaaagctcaatgtttgacgaccatccggcatccgccgaacgcgcccagcatattcgcgatcgcatgagcgcggatgggattaagtaa

SEQ ID NO: 483827 - DNA, 1992 bp, Shigella sonnei
atgtcctcacgtaaagagcttgccaatgctattcgtgcgctgagcatggacgcagtacagaaagccaaatccggtcacccgggtgcccctatgggtatggctgacattgccgaagtcctgtggcgtgatttcctgaaacacaacccgcagaatccgtcctgggctgaccgtgaccgcttcgtgctgtccaacggccacggctccatgctgatctacagcctgctgcacctcaccggttacgatctgccgatggaagaactgaaaaacttccgtcagctgcactctaaaactccgggccacccggaagtaggttataccgctggtgtggaaaccaccaccggtccgctgggtcagggtattgccaacgcagtcggtatggcgattgcagaaaaaacgctggcggcgcagtttaaccgtccgggccacgacattgtcgaccactacacctacgccttcatgggcgacggctgcatgatggaaggcatctcccacgaagtttgctctctggcgggtacgctgaagctgggtaaactgattgcgttctacgatgacaacggtatctctattgatggtcacgttgaaggctggttcaccgacgacaccgcaatgcgtttcgaagcttacggctggcacgttattcgcgacatcgacggtcatgacgcagcatccatcaaacgcgcagtagaagaagcgcgcgcagtgactgacaaaccgtccctgctgatgtgcaaaaccatcatcggtttcggttccccgaacaaagccggtactcacgactcccacggtgcgccgctgggtgatgcagaaatcgctctgacccgcgaacagctgggctggaaatacgcaccgttcgaaatcccgtctgaaatctatgcgcagtgggatgcgaaagaagcaggccaggcgaaagaatctgcatggaatgagaagtttgcggcttacgcgaaagcttatccgcaggaagcggctgaatttacccgccgtatgaaaggcgaaatgccgtctgacttcgacgccaaagcgaaagagtttatcgctaaactgcaggctaatccggcgaaaatcgccagccgtaaagcgtctcagaatgctattgaagcgttcggcccgctgttgccggaattcctcggcggctccgctgacctggcaccgtctaacctgaccctgtggtctggttctaaagcaatcaacgaagatgctgcgggtaactacatccactacggtgttcgcgagttcggtatgaccgcgattgctaacggtatctccctgcacggtggcttcctgccgtacacctccaccttcctgatgtttgtcgaatacgcacgtaacgctgtacgtatggctgcgctgatgaaacagcgtcaggtgatggtttacacccacgactccatcggtctgggcgaagacggcccgactcaccagccggttgagcaggtcgcttctctgcgcgtgaccccgaacatgtctacatggcgtccgtgtgaccaggttgaatccgcggtcgcgtggaaatacggtgttgagcgtcaggacggtccgaccgcgcttatcctctcccgtcagaatctggcgcagcaggaacgtactgaagagcaactggcaaacatcgcgcgcggtggttatgtgctgaaagactgtgctggtcagccggaactgatcttcatcgcgaccggttcggaagttgaactggctgttgccgcctacgaaaaactgactgccgaaggcgtgaaggcgcgcgtggtttccatgccgtctaccgatgcattcgacaagcaggatgcggcttaccgtgaatccgtactgccgaaagcggttactgcacgcgttgcggtagaagcgggtattgctgactactggtacaagtatgttggcctgaatggcgctatcatcggtatgaccaccttcggtgagtcagctccggcagagttgctgttcgaagagttcggcttcaccgtcgacaacgtcgttgcgaaagcaaaagaactgctgtaa

SEQ ID NO: 483828 - DNA, 444 bp, Shigella sonnei
atgcggcttagtgactattttccagaatcatcaatctcagttatacattcagcaaaagattggcaggaagctatcgatttctcgatggtatcattgctggataaaaactatatcagcgagaattacattcaggcaattaaagattccaccattaacaatggcccttattatattctcgcaccaggcgtggcaatgcctcatgcgcgaccggaatgtggggcgcttaaaaccgggatgtctttgacattacttgaacaaggtgtttattttccggggaatgacgaaccaataaaattactcatcggcctttctgctgccgatgccgattcgcacattggcgctattcaggcgttaagtgaattactgtgcgaagaagaaatactcgaacaactcttaacagcagcatcagaaaaacaattagcggacataatcagccgcggataa

SEQ ID NO: 483829 - DNA, 1014 bp, Shigella sonnei
atggaaaacaagtctgctcgtgcaaaggtccaggcttttgggggctttttgacggcaatggtcatccccaatattggtgcttttattgcctggggttttattactgcgttatttattcccaccggttggctgcctaacgaacatttcgccaaaattgtcggcccgatgattacctatttattgcccgtgatgattggttctaccggtggtcatctggtcggcggtaaacgcggcgcggtcatgggcggaataggtactattggtgtgatcgtcggcgcagagatcccgatgttccttggctcaatgattatggggccgctcggtgggctggtcataaaatatgttgataaggcactggaaaaacgcatacctgccggttttgagatggttatcaataacttctcattaggtatcgcggggatgctcctttgtctgctgggttttgaagttatcggcccggcggtgttaattgccaatactctcgtcaaagagtgtattgaggcgctggtacatgcgggttatctgcctctgctgtcagtcatcaatgaaccggcgaaagtgcttttcctcaataatgcgatcgatcagggcgtctattatccgctgggaatgcaacaggcttcggttaacggtaaatccatcttctttatggtggcgtccaatcctgggcctggcttagggctgctgctggcgtttaccttgtttggtaaagggatgagtaaacgttctgcgcccggggcgatgattattcacttcctcggtgggatccacgaactgtatttcccgtatgtgctgatgaagccgctgaccattattgccatgattgcgggcggtatgtctggcacctgggtgtttaacttactggacggtggtctggtggctggcccaagtccggggtctatctttgcttacctggcactgacgccgaaaggctcgttcctggcgacaattgccggtgttacggtagctaccctggtgtcctttgctatcacggtaatgactccaacttattga

SEQ ID NO: 483830 - DNA, 1143 bp, Shigella sonnei
atggcaatgagtgaacaaccccagcctgtggcgggcgcggctgcgtcaacgaccaaggcccgaacatcgtttggtattttaggtgctatcagcctctcacatctgctgaacgacatgatccaatcgctgattctggcgatttatccgctgcttcagtcagaattttctctgacatttatgcagattggcatgataaccctcaccttccagctcgcctcttcgctactgcaaccagtggtcggctactggaccgataaatatccgatgccgtggtcgttgccaattggcatgtgctttaccttaagtggtctggtgctgcttgcgctggcgggcagttttggcgcagttctgctggcggcggcgctggtcggtaccggttcatcggtctttcatccggaatcttctcgcgtagcccgtatggcttccggcgggcggcatggcctggcgcaatctatctttcaggtcggcggcaactttggcagttccctgggacccttgctggcggcggtgattatcgcgccttatggcaaaggcaacgttgcctggtttgtgcttgcggcactgctggcgatcgtggtgttggcgcaaattagccgttggtactcggcacagcaccgaatgaataaaggaaaacccaaagcgacgataatcaatccactgccgcgcaacaaagtggtactggcagtcagcattctgttaatcctcattttctcgaaatatttctatatggcgagcatcagcagctattacaccttttatctgatgcaaaaattcggattatctatccagaatgcccagcttcatctgtttgccttcctgtttgccgttgcggcaggtacggtgatcggcgggcctgtaggggataaaattggacggaaatatgtgatttggggctctatcctcggcgttgcgccgtttacgctgattttaccctacgccagcctgcactggacgggggttttaacggtgattattggatttatcctcgcttcggcattctctgccattctggtctacgctcaggagctacttccgggacgtatcggtatggtttctggactctttttcggttttgcttttggcatgggaggtctgggagcggcagttctggggcttatcgccgatcacactgaggtagcctga

SEQ ID NO: 483831 - DNA, 1653 bp, Shigella sonnei
atgaaattattgcagcggggcgtggcgttagcgctgttaaccacatttacactggcgagtgaaactgctctggcgtatgagcaggataaaacctacaaaattacagttctgcataccaatgatcatcatgggcatttttggcgcaatgaatatggcgaatatggtctggcggcgcaaaaaacgctggtggatggtatccgcaaagaggttgcggctgaaggcggtagcgtgctgctactttccggtggcgacattaacactggcgtgcccgagtctgacttacaggatgccgaacctgattttcgcggtatgaatctggtgggctatgacgcgatggcgatcggtaatcatgaatttgataatccgctcaccgtattacgccagcaggaaaagtgggccaagttcccgttgctttccgcgaatatctaccagaaaagtactggcgagcgcctgtttaaaccgtgggcgctgtttaagcgtcaggatctgaaaattgccgttattgggctgacaaccgatgacacagcaaaaattggtaacccggaatacttcactgatatcgaatttcgtaagcccgccgatgaagcgaagctggtgattcaggagctgcaacagacagaaaagccagacattattatcgcggcgacccatatggggcattacgataatggtgagcacggctctaacgcaccgggcgatgtggagatggcacgcgcgctgcctgccggatcgctggcgatgatcgtcggtggtcactcgcaagatccggtctgcatggcggcagaaaacaaaaaacaggtcgattacgtgccgggtacgccatgcaaaccagatcaacaaaacggcatctggattgtgcaggcgcatgagtggggcaaatacgtgggacgggctgattttgagtttcgtaatggcgaaatgaaaatggttaactaccagctgattccggtgaacctgaagaagaaagtgaccagggaagacgggaaaagcgagcgcgtgctgtacacccctgaaatcgctgaaaaccagcaaatgatctcgctgttatcgccgttccagaacaaaggcaaagcgcagttggaagtgaaaataggcgaaaccaatggtcgtctggaaggcgatcgtgacaaagtgcgttttgtacagaccaatatggggcggttgattctggcagcccaaatggatcgcactggtgccgactttgcggtgatgagtggaggaggaattcgtgattctatcgaagcaggcgatatcagctataaaaacgtactgaaagtgcagccattcggcaatgtggtggtgtatgccgacatgatcggtaaagaggtgattgattacctgaccgccgtcgcacaaatgaagccagattcaggtgcctacccgcaatttgccaacgttagctttgtggcgaaagacggcaaactcaacgacctgaaaatcaaaggcgaaccggtcgatccggcgaaaacttaccgtatggcgacattaaacttcaatgccaccggcggtgatggctatccgcgccttgataacaaaccgggctatgtgaataccggctttattgatgccgaagtgctgaaagcgtatatccagaaaagctcgccgctggatgtgagtgtttatgaaccgaaaggtgaggtgagctggcagtaa

SEQ ID NO: 483832 - DNA, 480 bp, Shigella sonnei
atgacacccgcagttaaattactcgaaaaaaacaagatttcgtttcaaatccatacctacgagcacgatccggctgaaaccaattttggcgatgaagtcgtcaaaaaattaggtttgaatccggatcaagtctacaaaacgctactggtggcagtgaacggtgatatgaaacatctggcagtggccgttacgccggtcgcaggtcaactggatcttaaaaaagtagcaaaagcgctgggtgccaagaaagttgagatggccgatccgatggccgcgcagcgttcgacgggatacctggttggggggattagcccattggggcagaaaaaacgtctgccgacgattatcgacgcccccgcacaagaatttgccactatttatgtttctggcggcaagcgcggactggatatcgaactggcggcaggcgatctggcgaagatcctcgatgccaaatttgctgatatcgcccgccgcgattaa

SEQ ID NO: 483833 - DNA, 795 bp, Shigella sonnei
atggatctgttgtaccgggtaaaaacgctttgggccgcgctgcgcggtaatcattacacctggcctgccatcgatatcacccttcccggcaatcgccattttcatctgattggcagtattcatatgggtagccacgatatggctcccctgcccacccgtttgctcaaaaagctcaaaaacgccgatgcgctgatcgtcgaggcggatgtttccaccagcgatacgccttttgctaatttgcctacttgcgaggcgctggaagagcgcattaacgaggagcaactccaaaatctgcagcacattagccaggagatgggcatttctccgtcgctcttttctactcaaccgctgtggcaaatcgcgatggttcttcaggcgacgcaggcacaaaaactggggctgcgggcagaatacggtatcgattaccagttattgcaggcggcgaagcaacaacataaacccgtgattgaactggaaggggctgaaaaccagattaccatgttgctccagctccctgacaaaggactggcgctgctggacgatacgctgacccactggcataccaacgcacggttgctgcaacaaatgatgagctggtggctgaatgcacctccgcaaaataatgatataacgctgcccaatacgttcagtcagtcgctgtacgatgtgctgatgcatcagcgaaatctcgcctggcgggataaattacgcgccatgccgccggggcgatatgtggtcgcggtcggtgcactacacctgtatggagaagggaatttgccgcaaatgttgcgctaa

SEQ ID NO: 483834 - DNA, 396 bp, Shigella sonnei
atgattcagtatgttcttgcatcgctattcacagggaagcaacagttaaaaaccatgaaacaggcaacaagaaaaccgacgacacccggagatattcttctctatgaatatctggaaccgctcgatttgaaaatcaatgagttagcagagttgctgcatgttcatcgtaatagcgtcagtgcactgatcaataacaatcgtaaactcaccactgagatggcattccgtctggcgaaagtttttgataccacagtcgattttaggctaaacctccaggcggcagttgatctttgggaagttgaaaacaacatgcgcacccaggaagaattgggacggattgaaacagtggctgaatatttggcacgccgtgaagagcgtgcaaaaaaggtcgcgtaa

SEQ ID NO: 483835 - DNA, 2505 bp, Shigella sonnei
atgtcacaaactatcgacctgaccctggacggcctgtcctgcggtcactgcgttaaacgcgtgaaagaaagtcttgaacagcgcccggatgttgagcaggcggatgtgtctatcactgaagcgcacgttaccgggactgccagtgcagaacagctgatcgaaaccatcaaacaagcgggttatgacgcatctgtaagccacccaaaggctaaaccgctggcggagtcatcaatcccgtcggaagcactgacagcggtttctgaggcgcttccggcagcgaccgccgatgacgatgacagccagcagttgctgctgagcggcatgagctgcgccagctgtgtcacccgcgtacaaaatgcgctgcaaagcgtaccgggcgtcactcaggcacgggtaaacctggcggagcgtactgcgctggtgatgggcagtgcctccccacaagatttagtgcaggcggtggaaaaagcgggctacggtgcggaagcgattgaagatgacgctaaacgccgcgagcgccagcaagaaaccgccgtagctacgatgaagcgcttccgctggcaggcaattgttgcactggctgtgggtatcccggtaatggtctgggggatgatcggcgataacatgatggtcaccgctgacaaccgcagcttgtggttagttatcggcctgataaccctggcagtgatggttttcgccggcggccatttttaccgcagtgcatggaaaagcctgctgaacggtgcagcgacgatggatacgctggtggcgctgggaacgggtgtggcgtggctctattcgatgagcgtcaacctgtggccgcagtggttcccgatggaagcgcggcatctttactatgaagccagtgcgatgattatcggtctgattaatctcggccatatgctggaagcgcgcgcacgtcagcgttcttctaaggcgctggagaaattactcgatttaaccccaccgacggcgcgagtggtcaccgcagatggtgaaaaaagcgtgccgctggcggaagttcagccagggatgttactgcgcctgacgaccggcgatcgcgtgccggtagatggcgagattacccagggcgaagcatggctggatgaagcgatgctgacgggcgaaccaatcccacagcaaaaaggcgaaggcgaaagcgtccatgccgggacagtggtacaggacggcagtgtgctgtttcgtgccagtgcggttggcagccataccacgctgtcacggatcattcgcatggtgcgccaggcccagagcagcaagccagaaatcggtcagctggcggataaaatctcagccgtatttgtacctgtggtggtggtgattgcgctggtcagtgcggcaatctggtacttctttggtccggcaccgcaaattgtttataccctggtgattgccaccacggtactgattatcgcctgtccgtgtgcgctggggctggcgacgccgatgtcgattatttccggcgtcgggcgggcggctgagtttggcgtgctggtgcgggacgccgacgcgctgcaacgcgccagtacactcgataccatcgtgttcgataaaaccgggacgctgaccgaagggaagccgcaggttgtcgcagtgaaaacgtttgctgatgttgatgaagcgcaggcattgcgtctggcggcggcactggagcaaggttccagccatccgctggcacgggcgatcctcgataaagcaggtgatatgcagctgccgcaggtcaacggtttccgcacattgcgcgggctgggcgtgagcggtgaagctgaaggtcatgcgttattgctgggcaatcaggcgctgttaaatgagcaacaggttggtaccaaagctatcgaagcggagattactgctcaggcatcgcaaggagcaacgcctgtgctgctggcgattgacgggaaagcagtagccctgctggctgtacgcgatccgttgcgtagtgatagcgtggcggcgctgcaacgcctgcataaaacgggatatcgtctggtgatgttgaccggggataacccaaccaccgccaatgcgatcgccaaagaagctggaattgatgaagtgattgccggagtgctgccggacggtaaagccgaagcgatcaaacgtctgcaaagtgaaggacgtcaggtggcaatggtgggcgacggcattaacgacgcgccagcgctggcccaggcggatgtcggcattgcgatgggtggcggcagtgatgttgccattgaaaccgcggcgattaccctgatgcgccatagcctgatgggcgttgcggatgcgctcgcgatttcccgcgcaacgctgcgcaacatgaagcagaacctgctcggtgcctttatctacaacagcatcggtattccggtcgccgccggtattttgtggccgtttacgggaacactgcttaacccggtagttgccggagcggcaatggcgctctcgtcgattaccgtagtgagtaacgccaaccggttgctgcggtttaaaccgaaggaataa

SEQ ID NO: 483836 - DNA, 933 bp, Shigella sonnei
atgttagatgcaaacaaattacagcaggcagtggatcaggcttacacccaatttcactcacttaacggcggacaaaatgccgattacattccctttctggcgaatgtaccaggtcaactggcggcagtggctatcgtgacctgcgatggcaacgtctatagtgcgggtgacagtgattaccgctttgcactggaatccatctctaaagtctgtacgttagcccttgcgttagaagatgtcggcccgcaggcggtacaggacaaaattggcgctgacccgaccggattgccctttaactcagttatcgccttagagttgcatggcggcaaaccgctgtcgccactggtaaatgctggcgctattgccaccaccagcctgattaacgctgaaaatgttgaacaacgctggcagcgaattttacatatccaacagcaactggctggtgagcaggtagcgctctctgacgaagtcaaccagtcggaacaaacaaccaacttccataaccgggccattgcctggctgctgtactccgccggatatctctattgtgatgcaatggaagcctgtgacgtgtacacccgtcagtgctctacgctcatcaatactgttgaactggcaacgcttggcgcgacgctggcggcgggtggtgtgaatccgttgacgcataaacgcgttcttcaggccgacaacgtgccgtacattctggccgaaatgatgatggaagggctgtatggtcgctccggtgactgggcgtatcgcgttggtttaccgggcaaaagcggtgtaggtggcggtattctggcggtcgtccctggcgtgatgggaattgccgcgttctcaccaccgctggacgaagaaggcaacagtgttcgcggtcaaaaaatggtggcatcggtcgctaagcaactcggctataacgtgtttaagggctga

SEQ ID NO: 483837 - DNA, 1293 bp, Shigella sonnei
atgatgaacacggaaggtaataacggtaacaaacccctcggtctatggaacgtcgtttccatcggtattggggcaatggtgggggcggggatcttcgcgctgctggggcaggctgcgttgctaatggaagcctcgacctgggtcgcctttgcttttggcggtattgtggcgatgttttccggttatgcctatgcgcgtctgggggcgagctatcccagcaatggcggtattatcgacttttttcgtcgcggattaggcaacggcgtcttttcgctagcgctctcgttgctgtacctgttgacgctggcggtgagcatcgccatggttgcccgtgcttttggcgcttatgccgtgcagtttttgcatgaaggcagccaggaggagcaccttattttgctctacgcgttggggatcattgcggtgatgacgctttttaactccttaagcaaccatgcggtagggcggctggaagtgatcctcgtcggcattaaaatgatgatcctgttattgctgattattgccggtgtctggtcgctgcaaccggcgcatatttccgtctctgcgccccccagctccggtgcgttcttctcctgtattgggataaccttccttgcctatgcgggctttggcatgatggcgaacgcggcggataaagtgaaagatccgcaggtcattatgccacgggcgtttctggtggcgattggcgttaccacgttgctttatatctcgctggcgctggttttgcttagcgatgtatcggcattagagttagaaaaatatgctgataccgccgtagcgcaggctgcttctccgctgctcgggcatgtgggttatgtgatcgtcgtcatcggcgctttactggcgacggcttcagccattaacgcgaacctgttcgccgtgtttaacatcatggacaacatgggcagcgaacgcgaactgccgaagctaatgaataaatccctgtggcggcagagtacctggggcaacattattgtcgtggtgttgattatgctgatgacggcggcgctaaatttaggctcactcgccagtgttgccagcgccacctttttgatttgctacctggcggtgtttgtggtggcgatccgcctgcgtcatgatattcacgcctcgttgccgattcttatcgttggtacgttggtgatgttgttggtgatcgttggctttatctacagtctgtggtcccagggtagccgtgcgttgatatggattattggctcactcttactcagccttattgtggcaatggtcatgaagcgcaataaaaccgtataa

SEQ ID NO: 483838 - DNA, 408 bp, Shigella sonnei; identical to SEQ ID NO: 471183

SEQ ID NO: 483839 - DNA, 459 bp, Shigella sonnei
atgatggagttaatggtcgttcatccacatattttctggctcagtctcggcggtttgctgctggcagccgagatgctgggcggaaatggttatttgttgtggagcggcgtggcagcggtgattaccggcctggtggtctggctggtgccgctgggttgggagtggcaaggggtaatgtttgccatcctgacgctgctcgccgcctggctgtggtggaaatggttgtcgcggcgggtgcgcgaacaaaagcacagcgatagtcatttaaaccagcgcgggcagcagctgattggccgacgttttgtgctggaatctccgctggtcaacgggcgcggtcatatgcgcgtcggtgacagttcatggcctgtcagcgccagcgaggatctcggtgcaggtacgcatgttgaagtcattgcgatagaagggataaccctacatatccgagccgtctcgtcttaa

SEQ ID NO: 483840 - DNA, 918 bp, Shigella sonnei
atgcttatctttatcccgattctcatttttgtcgcgctggtcattgtcggcgcgggcgtcaaaatcgtgccgcagggctatcaatggacggtagaacgttttggtcgctataccaaaacgttacagccggggctcagtctggtggtgccgtttatggatcgcattggtcgcaagatcaatatgatggagcaagtgctcgatatcccttcccaggaagttatctcgaaagataacgccaacgttaccatcgacgcagtctgttttattcaggtgattgacgcgccgcgcgcggcttatgaagtcagcaatctggagctggcgatcatcaacctgaccatgactaacatccgtaccgtgttgggttcaatggaacttgacgaaatgctctctcagcgcgacagcatcaactcacgcctgctgcgtattgtcgatgaagccaccaacccgtgggggattaaagtcacccgtattgaaattcgcgacgtgcgcccaccggcagagcttatctcttcaatgaacgcgcagatgaaagcggaacgtaccaaacgcgcttacattcttgaagcggaagggatccgtcaggcggaaatcctcaaagccgaaggtgaaaaacagtcgcaaatcctgaaagcggaaggcgaacgtcagtcggcgtttttacaggctgaagcgcgtgaacgttccgccgaagcagaagcccgcgccaccaaaatggtgtctgaagctatcgcctccggtgatattcaggcggtgaactacttcgtagcgcagaaatacaccgaagcgttacagcagatcggtacctccagtaacagcaaagtagtgatgatgccattagaggccagcagcctgatggggtcgattgccgggattgccgagctggtgaaagacagcgccaacaaacggactcagccatga

SEQ ID NO: 483841 - DNA, 678 bp, Shigella sonnei
atgcaggaaaatagtcctttgcttcagctacaaaacgtaggatatctggcgggtgatgcgaagattcttaataacatcaatttttcgctgcgtgctggcgaatttaagttaattaccggtccttctggttgtggcaaaagtacgctgctaaaaatagttgcttcattgatcagcccaaccagcggaacgttactgtttgaaggtgaggatgtcagcacactaaagccagaaatctaccgccaacaagtctcttactgcgcccagacaccgacgctgtttggcgatacggtatacgataatctgatctttccctggcagatccgtaaccggcagcctgacccagccatttttctcgattttctcgaacgcttcgccttgccggacagcattttgacgaaaaatatcgccgagctatctggtggtgaaaaacaacgcatctcactgattcgtaacctgcaatttatgccgaaggttttattgctggatgaaatcaccagtgcgctggatgaaagtaataaacataacgttaatgagatgatccatcgttatgtgcgcgagcaaaatattgccgtgctgtgggtgacacacgataaagacgaaattaatcatgcggataaagtgattacactgcaaccgcatgccggagaaatgcaggaagcacgctatgaactcgcataa

SEQ ID NO: 483842 - DNA, 780 bp, Shigella sonnei
atgaactcgcataatattactaacgaatcattagcactggcattaatgctggtggtggtggcaatcttaattagccataaagaaaaactggcgctggagaaagatattctctggagcgtcggacgagcgataattcagctgattattgtcggctatgtgctgaagtatattttcagcgtggatgatgccagcctgacattattgatggtgttatttatctgctttaatgcggcgtggaacgcgcaaaaacgcagtaaatatattgctaaagcttttatctcatcgtttattgccattacggtcggggcgggaattaccctggcggtgctgattctctcagggtcgattgaatttatcccgatgcaggtgatccctatcgccgggatgattgccggtaacgccatggtagcggtggggttgtgttacaacaatttagggcaacgggtcattagcgaacagcaacagattcaggagaaactgagtcttggtgcgacgccgaagcaggcttcagcgatattgattcgcgacagtattcgcgcggctttaattccgacggtcgattcagcaaaaacggttggcttagtgagtttaccaggaatgatgtccgggctgatatttgccgggattgatccggtgaaggcgattaaatatcagattatggtgacctttatgctgctctcaaccgccagcttgtcgaccattattgcctgctatttaacctatcgtaagttttataattcgcgccaccagttggtggtgacgcaattgaagaagaaatga

SEQ ID NO: 483843 - DNA, 855 bp, Shigella sonnei
atgtccgtagaaaatattgtcaacattaacgaatctaacctgcaacaggttcttgaacagtcgatgaccactccggtgctgttctatttttggtctgaacgtagccagcactgtttgcagttaaccccaattctggaaagccttgcggcgcagtacaacgggcaatttattctggcgaagctggactgcgatgcggagcagatgattgccgcccagtttggtctgcgcgcgattccgacggtgtatctgttccagaacgggcaaccggtagatggcttccaggggccgcaaccggaagaggcgatccgcgccctgctggataaagtgctgccgcgcgaagaagagctgaaagcgcagcaggcgatgcaactgatgcaggaaggcaatttcaccgatgccctgccattgctgaaagacgcctggcagttgtcgaatcagaacggggagatcggcctgctgttggcagaaacgctgattgcgctgaaccgttctgaagatgcagaagcggtgctgaaaaccattccgttacaggatcaggacacccgctaccaggggatggtggcgcaaatcgaactgctgaagcaggcggctgatacgccggaaattcaacagttgcaacagcaggtggcggagaatccagaagatgccgcactggcgacgcaactggcgctgcaactgcatcaggttgggcgcaatgaagaggcgctggagttgctgttcgggcatctgcgtaaagatctcaccgccgcagacggtcagacgcgtaaaacgttccaggagatcctcgctgcgctgggtacgggtgatgcactggcgtcgaagtatcgccgccagctgtatgcattgttgtattga

SEQ ID NO: 483844 - DNA, 771 bp, Shigella sonnei
atgcaaaaatcggtcttaattaccggatgttccagtggaattggcctggaaagcgcgctcgaattaaaacgccagggttttcatgtgctggcaggttgccggaaaccggatgatgttgagcgtatgaacagcatgggatttaccggcgtgttgatcgatctggattcgccagaaagtgttgatcgcgcagccgacgaagtgatcgccctgaccgataattgtctgtatgggatctttaacaatgccggattcggcatgtatggccccctttccaccatcagccgcgcgcagatggaacagcagttttccgccaactttttcggcgcacaccagctcaccatgcgcctgttacccgcgatgttaccgcacggtgaagggcgtattgtgatgacatcatcggtgatgggattaatctccacaccgggtcgtggcgcttacgcggccagtaaatatgcgctggaggcatggtcagacgcgctgcgcatggagctacgccacagcggaattaaagtcagcctgatcgaacccggtcccattcgtactcgcttcaccgacaacgtcaaccagacgcaaagtgataaaccagtcgaaaatcccggcatcgccgcccgctttacgttgggaccggaagcggtggtggacaaagtacgccatgcttttattagcgagaagccgaagatgcgctatccggtaacgctggtgacttgggcagtaatggtgcttaagcgcctgctgccggggcgcgtgatggacaaaatattgcaggggtga

SEQ ID NO: 483845 - DNA, 594 bp, Shigella sonnei
ttgcccttcctgttcctggccctgttaaccttccgtgccgccgcagcggacacgttattgattctgggtgatagcctgagcgccgggtatcgaatgtctgccagcgcggcctggcctgccttgttgaatgataagtggcagagtaaaacgtcggtagttaatgccagcatcagcggcgacacctcgcaacaaggactggcgcgccttccggctctgctgaaacagcatcagccgcgttgggtgctggttgaactgggcggcaatgacggtttgcgtggttttcagccacagcaaaccgagcaaacgctgcgccagattttgcaggatgtcaaagccgccaacgctgaaccattgttaatgcaaatacgtctgcctgcaaactatggtcgccgttataatgaagcctttagcgccatttaccccaaactcgccaaagagtttgatgttccgctgctgcccttttttatggaagaggtctacctcaagccacaatggatgcaggatgacggtattcatcccaaccgcgacgcccagccgtttattgccgactggatggcgaagcagttgcagcctttagtaaatcatgactcataa

SEQ ID NO: 483846 - DNA, 687 bp, Shigella sonnei; identical to SEQ ID NO: 11195

SEQ ID NO: 483847 - DNA, 2415 bp, Shigella sonnei
atgattgcacgttggttctggcgcgaatggcgttcgccgtcgctattaattgtctggctggcgctaagcctggcggtggcctgcgtgctggcgctgggcaatatcagcgatcgcatggagaagggcttaagccagcaaagccgtgagtttatggcgggcgatcgggcgttgcgcagttcacgcgaagtgccgcaagcgtggctggaggaagcgcaaaagcgcggcctgaaagtcggcaagcagctgactttcgccacaatgacctttgcaggcgacacaccgcagctggcgaacgtcaaagcggtggatgatatctacccgatgtatggcgatctgcaaactaatccccctggcctgaaaccgcaggcgggcagcgtattgctggccccacgcctgatggcactgcttaacctgaaaacgggcgacaccattgacgtgggcgatgccaccttgcggattgccggagaagtgattcaggaaccggattccggttttaaccccttccagatggctccgcgtctgatgatgaatctggcggatgtcgataaaaccggagccgtgcagccggggagtcgggtcacctggcgttataaattcggcggcaacgagaaccagctcgacggctatgataaatggttgttacctcagcttaaacccgaacaacgctggtacggtctggaacaggacgaaggcgcgctggggcgatcgatggaacgctcgcaacagttcctgctgctttcggcgcttctgaccttgctgctggcagtggcagcggtggcggtagcgatgaatcattactgtcgcagtcgctacgatctggtggcgatcctcaaaacgctgggggcagggcgagcgcaactgcgtaagctaatcgtcggtcagtggttgatggtgctgacgctttcagccgttaccggtggggccataggcctgttgttcgaaaacgtgttgatggtgctgctcaagcccgttctgcctgctgcactaccgccagccagcctctggccgtggctgtgggcgcttggcaccatgacggtcatctcgctgctggtggggctacgaccataccgcttgttgctggcaacgcagcctttacgcgtattacgtaatgatgtggtagcgaacgtctggccgctgaagttttatctgccgattgtcagtgtggtggttgtgctgctgctcgccggattaatgggtggcagcatgctgctttgggcggtgctggcgggcgcggtagtactggctttgctgtgcggtgtgctgggctggatgcagctgaatgtacttcgccgcatgacgctgaaatcgctacctctgcgcctggcggttagccgcctgttacgtcagccgtggtcaacgttaagccagctttcggcattttcgctctcctttatgctgctggcgctgttgctggtattgcgtggcgatctgctcgaccgctggcagcagcagctaccgccagaaagcccgaactactttttaattaacatcgccacagaacaggtagcaccgctaaaagcgttcctcgcggaacatcatatagtcccggaatcattttatccggtagtgcgggcgcggctgacggcgattaacgataagccgacagaaggtaatgaagatgaggcgcttaatcgcgaactcaatcttacctggcaaaatacgcggcccgatcataatccgattgtcgccggtaactggccgccaaaagccgatgaagtgtcgatggaagaggggctggcgaaacgcttaaacgttgccctcggtgataccgtgacttttatgggcgatacccaggagttccgcgctaaagtgaccagcctgcgcaaagtggactgggaaagtctgcggcctaatttctattttattttcccggaaggggcattagacgggcaaccgcagagctggcttaccagtttccgctgggagaatggcaacggcatgttgacgcaactcaaccgccagttcccgaccattagcctgttagatattggcgcgattttaaaacaggtcggtcaggtgctggagcaggtaagtcgggcgctggaggtgatggtggtgctggtcaccgcctgcggtatgttgctgttgctggcacaggtgcaggtgggaatgcgtcagcgtcatcaggagctggtggtgtggcgcacactcggtgcggggaaaaaactgctgcgtaccacgttgtggtgtgagttcgccatgcttgggtttgtttctggcctggtagccgcaattggtgcggaaacggcgctggcagtgttgcaggcgaaagtgtttgatttcccgtgggagccagactggcgattgtggattgttctgccgtgcagcggtgcactgctgctgtcgcttttcggcggctggctgggtgcgcgactggttaagggtaaggcgctgttcaggcagtttgcggggtga

SEQ ID NO: 483848 - DNA, 1095 bp, Shigella sonnei
atgcaagagagacacacggaacaggactatcgtgccctgctgattgctgatacgcccattattgatgttcgcgcccctatcgagtttgagcaaggcgcaatgcccgccgctatcaacctgccgttaatgaataacgatgaacgcgccgccgttggcacttgttataaacagcaaggctcagacgcggcgctggcgctggggcataaactggtggcgggtgaaattcgtcagcagcgcatggacgcctggcgggcagcgtgcctgcaaaatccgcaaggtattctctgctgcgcccgtggcggtcagcgctcacatattgtgcaaagctggttgtatgcagcggggattgattatccgctggtggaaggcggttataaggcactgcgccaagccgcgattcaggcgactattgaactggcacaaaaaccgatagtgctgattggcggttgtaccggcagcggtaaaacgctgttagtgcagcaacagccgaacggtgttgatctggaagggttagcgcgtcatcgcggttcggcgtttggtcgcaccttacaaccacaacttagccaggcgagttttgaaaacctgctggctgccgaaatgctaaaaaccgacgcccgtcaggatttgcgcctgtgggtgctggaagacgaaagccggatgatcggttcgaatcacctgccggaatgcctgcgcgagcgaatgactcaggcggcgattgcggtggtagaagatccgtttgagatccgtcttgagcgcctgaacgaagagtatttcttgcgtatgcatcatgattttacccacgcgtacggcgacgaacagggctggcaggaatattgcgaatacctgcatcacggactttcggctattaagcgtcggctggggttacagcgctataacgaactcgctgcccagctggatacggcgctgacaacgcaactcaccaccgacagcaccgacggtcatctggcctggctggtgccgttacttaaagaatattacgacccgatgtatcgctatcagcttgagaaaaaagcggaaaaagttgtctttcgcggtgagtgggcggaagtggcggaatgggttaagacgcagtga

SEQ ID NO: 483849 - DNA, 648 bp, Shigella sonnei
gtgaatattgtcatcaacaacctgctctataacccccaggccgtcgcccagttgctggcgtggctgaatgagcgttacccctttacccagtttcacatctcccgacaaatctatatgggcgtctgggactcgctattgtacgaaggtttttcgctggctatcggggtcacgggaactgaggcgctggcaaatacctttagtcttgatcccttaggatcggtgcaatggcgctttgtcatggcggcggatcatccgctggcgaacgttgaagagccgctaacagaagcgcagttgcggcgctttccggcggtcaatattgaagacagcgcccgaaccttaaccaaacgcgtcgcctggcgattgccggggcaaaaagagattattgttcccgatatggaaacgaaaatcgccgcccatctggcgggtgttggcattggttttttgccaaaatcactttgccagtcaatgatcgataatcaacaactggtcagccgggtaatcccaacgatgcgccctccttcgccattgagtctggcatggcgcaaatttggcagcggcaaagcggtagaagatattgtgaccttgtttacccagcgcaggccggaaatcagcggatttttagaaattttcggcaacccacgcagttaa

SEQ ID NO: 483850 - DNA, 279 bp, Shigella sonnei
atgttcgatccagaaaccttgcggactttcattgcggttgctgaaacaggaagtttttcaaaagcggcagaacgattatgtaaaaccacggcgacgatcagttatcgcattaaacttctggaagagaataccggagtggcgctgtttttccgcacgactcgcagcgtgacgttgacagcggctggcgagcatctactttcccaggccagagactggctgagctggctggaaagtatgcccagcgagctgcaacaggtgaatgatggcgtggaacgctag

SEQ ID NO: 483851 - DNA, 411 bp, Shigella sonnei
atggctcaggttgccatttttaaacaaatattcgataaagtgcgaaataatttaaactatcactggttttattctgaactaaaacgtcacaatgtctcacattacatttactatttagccacagagaatattcatcttgttcttgaaaacgataatacggttttaataaaaggacagggtaaggttgtaaatgtaagattttcaaaaaataaatgccttatagaagccaccttaaaaggattcaaatcaggagagttatcattttacgaatacaggaaaaatcttgctacagcaggggttttcagatggattacaaatatccacgaaaacaaaaggtattactatacctttgataattcattactctttactgagaacatacagaacactacacaaatatttccgcactaa

SEQ ID NO: 483852 - DNA, 546 bp, Shigella sonnei
atggaagtcaacaaaaagcagctggctgacattttcggtgcgagtatccgtaccattcagaactggcaggaacagggaatgcccgttctgcgaggcggtggcaagggtaatgaggtgctttatgactctgccgccgttataagatggtatgccgaaagggatgctgaaattgagaacgaaaagctgcgccgggaagttgaagaactgcggcaggccagcgagacagatctccagccagggactattgagtacgaacgccatcgacttacgcgtgcgcaggccgacgcacaggagctgaaaaatgccagagactccgctgaagtggtggaaaccgcattctgtactttcgtgctgtcgcggatcgcaggtgaaattgccagtattctcgacgggatccccctgtcggtgcagcggcgttttccggaactggaaaaccgacatgttgatttcctgaaacgggatatcatcaaagccatgaacaaagcagccgcgctggatgaactgataccggggttgctgagtgaatatatcgaacagtcaggttaa

SEQ ID NO: 483853 - DNA, 1926 bp, Shigella sonnei
gtgaatatatcgaacagtcaggttaacaggctgcggcattttgtccgcgccgggcttcgctcactgttcaggccggagccacagaccgccgttgaatgggcggatgctaattactatctcccgaaagaatccgcataccaggaagggcgctgggaaacactgccctttcagcgggccatcatgaatgcgatgggcagcgactacatccgtgaggtgaatgtggtgaagtctgcccgtgtcggttattccaaaatgctgctgggtgtttatgcctactttatagagcataagcagcgcaacacacttatctggttgccgacggatggtgatgccgagaactttatgaaaacccacgttgagccgaccatccgcgatattccgtcgctgctggcgctggctccgtggtatggcaaaaagcaccgggataacacgctcactatgaagcgtttttccaatggtcgtggcttctggtgcctgggcggtaaagcggcaaaaaactaccgtgaaaagtcggtggatgtggcgggttatgatgaacttgctgcctttgatgaggatattgaacaggaaggctctccgacgttccttggcgacaaacgtattgaaggctcggtctggccaaagtccatccgtggctccacgcccaaagtgagaggcacctgccagattgagcgtgcagccagtgaatccccgcattttatgcgttttcatgttgcctgcccgcactgcggggaggagcagtatcttaaatttggcgacaaagagacgccgtttggcctcaaatggacgccggatgacccctccagcgtgttttatctctgcgagcataatgcctgcgtcatccgccagcaggagctggactttactgatgcccgttatatctgcgaaaagaccgggatctggacccgtgatggcattctctggttttcgtcatccggtgaagagattgagccacctgacagtgtgacctttcacatctggacagcgtacagcccgttcaccacctgggtgcagattgtcaaagactggatgaaaacgaaaggggatacgggaaaacgtaaaaccttcgtaaacaccacgctcggtgagacgtgggaggcgaaaattggcgaacgtccggatgctgaagtgatggcagagcggaaagagcattattcagcgcccgttcctgaccgtgtggcttacctgaccgccggtatcgactcccagctggatcgctacgaaatgcgcgtatggggatgggggccgggtgaggaaagctggctgattgatcggcagattattatgggccgccacgacgatgaacagacgctgctgcgtgtggatgaggccatcaataaaacctatacccgccggaatggtgcagaaatgtcgatatcccgtatctgctgggatattggcgggattgacccgaccattgtgtatgaacgctcgaaaaagcatgggctgttccgggtgatccccattaaaggggcatccgtctacggtaagccggtggccagcatgcctcgtaagcgaaacaaaaacggggtttaccttaccgaaatcggtacggataccgcgaaagagcagatttataaccgcttcacactgacgccggaaggggatgaaccgcttcccggtgccgttcacttcccgaataacccggatatttttgatctgaccgaagcgcagcagctgactgctgaagagcaggtcgaaaaatgggtggatggcaggaaaaaaatactgtgggacagcaaaaagcgacgcaatgaggcgctcgactgcttcgtttatgcgctggcggcgctgcgcatcagtatttcccgctggcagctggatctcagtgcactgctggcgagcctgcaggaagaggatggtgcagcaaccaacaagaaaacactggcagattacgcccgtgccttatccggagaggatgaatga

SEQ ID NO: 483854 - DNA, 207 bp, Shigella sonnei
atgacgcgacaggaagaacttgccgctgcccgtgcggcactgcatgacctgatgacaggtaaacgggtggcaacggtacagaaagacggacggcgagtggagtttacggccacttccgtgtctgacctgaaaaaatacattgcggagctggaggtgcagaccggcatgacacagcgacgcaggggacctgcaggattttatgtatga

SEQ ID NO: 483855 - DNA, 1602 bp, Shigella sonnei
atgaaaacgcccaccattcccacccttctgggaccggacggcatgacatcgctgcgtgaatatgccggttatcacggcggtggcagcggatttggtgggcagttgcgggcgtggaacccaccgggtgaaagtgtggatgcagccctgctgcccaactttacccgtggcaatgcccgcgcagacgatctggtacgcaataacggctatgctgccaacgccatccagctgcatcaggatcatatcgtcgggtcttttttccggctcagtcatcgcccaagctggcgctatctgggcatcggggaggaagacgcccgtgccttttcccgcgaggttgaagcggcatggaaagagtttgccgaggatgactgctgctgcattgacgttgagcgaaaacgcacgtttaccatgatgattcgggaaggtgtggccatgcacgcctttaacggtgaactgttcgttcaggccacctgggataccagttcgtcgcggcttttccggacacagttccggatggtcagcccgaagcgcatcagcaacccgaacaataccggcgacagccggaactgccgtgccggtgtgcagattaatgacagcggtgcggcgctgggatattacgtcagcgaggacggctatcctggctggatgccgcagaaatggacatggataccccgtgagttacccggcgggcgcgcctcgttcattcacgtttttgaacccgtggaggacgggcagacccgcggtgcaaatgtgttttacagcgtaatggagcagatgaagatgctcgacacgctgcagaacacgcagctgcagagcgccattgtgaaggcgatgtatgccgccaccattgaaagtgagctggatacgcagtcagcgatggattttattctgggcgcgaacagtaaggagcagcgggaaaggctgacgggctggattggtgaaattgccgcgtattacgccgcagcaccggtccgtctgggaggcgcaaaagtgccgcacctgatgccgggggactcactgaacctgcagacggctcaggacacggataacggctactccgtgtttgagcagtcactgttgcggtatatcgctgccgggctgggtgtctcgtatgagcaactttcccggaattacgcccagatgagctactccacggcacgggccagtgcgaacgagtcgtgggcgtactttatggggcggcgaaaattcgtcgcatcccgtcaggcgagccagatgtttctgtgctggctggaagaggccatcgttcgccgcgtggtgacgttaccttcaaaagcgcgcttcagctttcaggaagcccgcagtgcctgggggaactgcgactggataggctccggtcgtatggccatcgatggtctgaaagaagttcaggaagcggtgatgctgatagaagccggactgagcacctacgagaaagagtgcgcgaaacgcggtgacgactatcaggaaatttttgcccagcaggtccgtgaaacgatggagcgccgcgcagctggtcttaaaccgcccgcctgggcggctgcggcatttgaatccgggctgcgacaatcaacagaggaggagaagagtgacagcagagctgcgtaa

SEQ ID NO: 483856 - DNA, 1320 bp, Shigella sonnei
gtgacagcagagctgcgtaatctcccgcatattgccagcatggcttttaatgagccgctgatgcttgaacccgcctatgcgcgggttttcttttgtgcgcttgcaggccagcttgggatcagctgcctgacggatgcagtatccggcgacagcctgactgccggagaggcacccgcggcgctggcgttatccggtgatgatgacggaccacgacaggcccgcagttatcaggtaatgaacggcatcgccgtgctgccggtgtccggcacgctggtcagccggacgcgggcgctgcagccgtactcggggatgaccggttacaacggcattatcgcccgtctgcaacaggctgccagcgacccgatggtggacggcattctgctcgatatggacacaccgggcggaatggtggcgggagcatttgactgcgctgacatcatcgcccgtgtgcgtgacataaagccggtatgggcgctggccaatgacatgaactgcagcgcaggtcagctgcttgccagtgccgcctcccggcgtctggtcacgcagaccgcccggacaggctccatcggcgtcatgatggctcacagtaattacggcgctgcactggagaaacagggcgtggaaatcacgctgatttacagcggcagccataaggtggatggcaacccctacagccatctaccggatgatgtccgggaaacattgcagtcccggatggatgcaacccgccggatgtttgcacagaaggtgtcggcatataccggcctgtccgtgcaggctgtgctggataccgaggctgcagtgtacagcggtcaggaggccattgatgccggactggctgatgaacttgttaacagtaccgatgcgatcaccgtcatgcgtgatgcactggatgcacgtaaatcccgtctctcaggagggcgaatgaccaaagagactcaatcaacaactgtttcagccactgcttcgcaggctgacgttactggcgtggtgcaagcgacggagggcgagaacgccagcgcggcgcagccggacgtgaacgcgcagatcaccgcagcggttgcggcagaaaacagtcgcattatggggatcctcaactgtgaggaggctcacggacgcgaagaacaggcacgcgtgctggccgaaacccccggtatgaccgtggaaacggcccgccgtattctggccgcagcaccacagagtgcacagacgcgcagtgacactgcgctggatcgtctgatgcagggggcaccggcaccgctggctgcaggtaacccggcatctgatgccgttaacgatttgctgaacacaccagtgtaa

SEQ ID NO: 483857 - DNA, 333 bp, Shigella sonnei
atgacgagcaaagaaacctttacccattaccagccgctgggcaatagtgacccggctcataccgcaaccgcgcccggcggattgagtgcgaaagcgcctgcaatgaccccgctgatgctggacacctccacccgtaagctggttgcgtgggatggcaccaccgacggtgctgccgttggcattcttgcggttgctgctgaccagaccagcaccacactgacgttctacaagtccggcacgttccgttatgaggatgtgctctggccggaggctgccagcgacgagacgaaaaaacggaccgtgtttgccggaacggcaatcagcatcgtttaa

SEQ ID NO: 483858 - DNA, 1026 bp, Shigella sonnei
atgtcgatgtacacaaccgcccagctgctggcggcaaatgagcagaaatttaagtttgatccgctgtttctgcgtctctttttccgtgagagctatcccttcactacggagaaagtctatctctcacaaattccgggactggtaaacatggcgctgtacgtttcgccgattgtttccggtgaggttatccgttcccgtggcggctccacctctgaatttacgccgggatatgtcaaacccaagcatgaggtgaatccgcagatgaccctgcgtcgcctgccggatgaagatccgcagaatctggcggacccggcttaccgccgccgtcgcatcatcatgcagaacatgcgtgacgaagagctggccattgctcaggtcgaagagatgcaggcagtttctgccgtgctcaagggcaaatacaccatgaccggtgaagccttcgatccggttgaggtggatatgggccgcagtgcggcgaacaacatcacacagtccggcgtcacggagtggagcaagcgtgacaagtccacgtatgacccgaccgacgatatcgaagcctacgcgctgaacgccagcggtgtggtgaatatcatcgtgtttgacccgaaaggctgggcgctgttccgttccttcaaagccgtcaaggagaagctggatacccgtcgcggctctcattccgagctggagacagcggtaaaagacctgggcaaagcggtgtcctataagggaatgtatggcgatgtggccatcgtcgtgtattccggacagtacgtggaaaacggcgtcaaaaagaacttcctgccggacaacacgatggtgctggggaacactcaggctcgcggtctgcgcacctatggctgcattcaggatgcggacgcacagcgcgaaggcattaacgcttctgcccgttacccgaaaaactgggtgaccaccggcgatccggcgcgtgagttcaccatgattcagtcagcaccgctgatgctgctggctgatcctgatgagttcgtgtccgttcaactggcgtaa

SEQ ID NO: 483859 - DNA, 399 bp, Shigella sonnei
atgacgaaagatgaactgattgcccgtcttcaggagctgggtgagcaattgaaccgcgatgtcagtttgacgggaacgaaagaagaactggcgcttcgtgtggcagagctggaagaagagcttgatgacacggatgaaactgccggtcaggacacccctctcagccgggaaaatgtgctgaccgggcatgaaaatgaggtggtatcagcgcagccggataccgtgattcaggatacggctgaactggtcacggtcgtggcactggtgacgctgcatactgatgcacttcacgccacgcgggataaacctgtggcatttgtgctgccgggaacggcgtttcgtgtctctgccggtgtggcagccgaaatgacagagcgcggcctggccagaatgcaataa

SEQ ID NO: 483860 - DNA, 354 bp, Shigella sonnei
gtggctgatttcgataacctgttcgatgctgccattgcccgcgccgatgaaacgatacgcgggtacatgggaacgtcagccaccatgacatccggtgagcagtcaggtgcggtgatacgtggtgtttttgatgaccctgaaaatatcagctatgccggacagggcgtgcgcgttgaaggctccagcccgtccctgtttgtccggactgatgaggtgcggcagctgcggcgtggagacacgctgaccatcggtgaggaaaatttctgggtagatcgggtttcgccggatgatggcggaagttgtcatctctggcttggacggggcgtaccgcctgccgttaaccgtcgccgctga

SEQ ID NO: 483861 - DNA, 579 bp, Shigella sonnei
atggccataaaaggtcttgagcaggccgttgaaaacctcagccgtatcagcaaaacggcggtgcccggtgccgccgcaatggccattaaccgcgttgcttcatccgcgatatcgcagtctgcgtcacaggttgcccgtgagacaaaggtacgccggaaactggtaaaggaaagggccaggctgaaaagggccacggtcaaaaatccgcaggccagaatcaaagttaaccggggggatttgcccgtaatcaagctgggtaatgcgcgggttgtcctgtcccgccgcaggcgtcataaaaaggggcagcgttcatccctgaaaggtggcggcagcgtgcttgtggtgggtaaccgtcgtattcccggcgcgtttattcagcaactgaaaaacggccggtggcatgttatgcagcgtgtggccgggaaaaaccgttaccccattgatgtggtgaaaatcccgatggcggtgccgctgaccacggcgtttaaacagaatattgaacggatacggcgtgaacgtcttccgaaagagctgggctatgcgctgcagcatcaactgagaatggtaataaagcgatga

SEQ ID NO: 483862 - DNA, 396 bp, Shigella sonnei
atgaaacatactgaactccgtgcagccgtactggatgcactggagaagcatgacaccggggcgacgctttttgatggtcgccccgctgtttttgatgaggaagattttccggcaattgccgtttatctcaccggcgctgaatacacgggcgaagagctggacagcgatacctggcaggcggagctgcatattgaagttttcctgcctgctcaggtgccggattcagagctggattcgtggatggagtcccggatttatccggtgatgagcgatatcccggcactgtcagatttgatcaccagtatggtggccagcggctatgactaccggcgcgacgatgatgcgggcctgtggagttcagccgatctgacttatgtcattatctatgaaatgtga

SEQ ID NO: 483863 - DNA, 741 bp, Shigella sonnei
atgcctgtaccaaatcctacaatgccggtgaaaggtgccgggaccaccctgtgggtttataaggggagcggtgacccttatgcgaacccgctttcagacgttgactggtcgcgtctggcaaaagttaaagacctgacgcccggcgaactgaccgctgagtcctatgacgacagctatctcgatgatgaagatgcagactggactgcgaccgggcaggggcagaaatctgccggagataccagcttcacgctggcgtggatgcccggagagcaggggcagcaggcgctgctggcgtggtttaatgaaggtgatacccgtgcctataaaatccgcttcccgaacggcacggtcgatgtgttccgtggctgggtcagcagtatcggtaaggcggtgacggcgaaggaggtgattacccgcacggtgaaggtcaccaatgtgggacgtccgtcgatggcagaagatcgcagcacggtgacggcgacgaccggcatgacggtgacacccgccagtgcttccgtagtgaaagggcagagcaccacgctgaccgtggcattccagccggatggcgcaaccgacaagagcttccgtgcggtgtctgcggataaaacaaaagccaccgtgtcggtcagtggtatgaccatcaccgtgaaaggtgttgctgcaggcaaggtcaacattccggtcgtatctggtaatggtgagtttgctgcggttgcagaaatcaacgtcaccgccagttaa

SEQ ID NO: 483864 - DNA, 423 bp, Shigella sonnei
atgttcctgaaaaccgaatcatttgaacataacggtgtgaccgtcacgctttctgaactgtcagccctgcagcgtattgagcatctcgacctgatgaaacggcaggcagaacaggcggagtcagacagcaaccggaagtttactgtggaagacgccatcagaaccggcgcttttgtggttgcgatgtccctgtggcataaccatccgaagaagacgcagatgccgtccatgaatgaagccgttaaacagattgagcaggaagtgcttaccacctggcccacagaggcaatttctcatgctgaaaacgtggtgtaccggctgtccggtatgtatgagtttgtggtgaatgatgctcctgaacaggcagaggacgccgggcctgcagagcctgtttctgcgggaaagtgttcgacggtgagctga

SEQ ID NO: 483865 - DNA, 435 bp, Shigella sonnei
gtgttcgacggtgagctgagttttgccctgaaactggcgcgtgagatggggcgacccgactggcgcgccatgcttgccgggatgtcatccacggagtatgccgactggcaccgcttttacagtacccattattttcatgatgttctgctggatatgcacttttccgggctgacgtacaccgtgctcagcctgtttttcagcgatccggagatgcatccgctggatttcagtctgctgaaccggcgcgaggctgacgaagagcctgaagatgatgtgctgatgcagaaagcggcagggcttgccggaggtgtccgctttggcccggacgggaatgaagttatccccgcttccccggatgtggcggacatgacggaggatgacgtaatgctgatgacagtatcagaagggatcgcaggaggagtccggtatggctga

SEQ ID NO: 483866 - DNA, 2562 bp, Shigella sonnei
atggctgaaccggtaggcgatctggtcgttgatttgagtctggatgcggccagatttgacgagcagatggccagagtcaggcgtcatttttccggtacggaaagtgatgcgaaaaaaacagcggcagtcgttgaacagtcgctgagccgacaggcgctggctgcacagaaagcggggatttccgtcgggcagtataaagccgccatgcgtatgctgcctgcacagttcaccgacgtggccacgcagcttgcaggggggcagaatccctggctgatcctgctgcaacagggtggtcaggttaaggactccttcggcgggatgatccccatgttcagggggcttgccggcgcgatcaccctgccgatggtgggggccacctcgctggcggtggcgaccggtgcgctggcgtatgcctggtatcagggcaactcaaccctgtccgatttcaacaaaacgctggtcctttccggtaatcaggcgggactgacggcagatcgtatgctggtcctgtccagagccgggcaggcggcagggctgacgtttaaccagaccagcgagtcactcagcgcactggttaaggcgggggtaagcggtgaggctcagattgcgtccatcagccagagtgtggcgcgtttctcctatgcatccggcgtggaggtggacaaggtcgctgaagccttcgggaagctgaccacagacccgacgtcggggctgacggcgatggcacgccagttccataacgtgacggcggagcagattgcgtatgttgctcagttgcagcgttccggcgatgaagccggggcattgcaggcggcgaacgaggccgcaacgaaagggtttgatgaccagacccgccgcctgaaagagaacatgggcacgctggagacctgggcagacaggactgcacgtgcattcaaatccatgtgggatgcggtgctggatattggtcgtcctgataccgcgcaggagatgctgattaaggcagaggctgcgtttaagaaagcagacgacatctggaatctgcgcaaggatgattatttcgttaacgatgaagcacgggcgcgttactgggatgatcgtgaaaaaaaacgcctggagcgggatgcagcccaaaagagggtagatcaacagcgtcaacaggacaaaaatgcgcagcagcagagcgataccgaagcgtcacggctgaaatataccgaagaggcgcagaaggcttacgaacggctgcagacgccgctggagaaatataccgcccgtcaggaagaactgaacaaggcactgaaagacggaaaaatcctgcaggcagattacaacacgctgatggcggcggcgaaaaaggattatgaagcgacgctgaaaaagccgaaacagtccggcgtgaaggtgtatgcgggcgatcgtcaggaagacagtgctcatgcggccctgctgacgcttcaggcagaactccggacgctggagaagcatgccggagcgaatgagaaaatcagccagcagcgccgggatttgtggaaggcagaaagtcagttcgcggtactggaggaggcggcacaacgtcgccagctgtccgcacaggagaaatccctgctggcgcataaagacgagacgctggagtacaaacgccagctggctgcacttggtgacaaggttacgtatcaggagcacctgaatgcgctggcgcagcaggcggataaattcgcacagcagcaacgggcaaaacgggcagccattgatgcgaaaaaccgggggctgactgaccggcaggcagcgcgggaagccacggaacagcgcctgaaggaacagtatggcgataatcctctggcgctgaataacgtcatgtcagagcagaaaaagacctgggcggctgaagaccagcttcgcgggagctggatggcaggcctgaagtccggctggagtgagtgggaagagagcgccacggacagtatgtcacaggttaaaagtgcagccacgcagacctttgatggtattgcacagaatatggcggcgatgctgaccggcagtgaacagaactggcgcagcttcacccgctccgtgctgtccatgatgacagaaattctgcttaagcaggcaatggtggggattgtcgggagtatcggcagcgccattggcggggctgttggtggcggcgcatccgcgtcaggtggtacagccattcaggccgctgcggtgaaattccattttgcaaccgggggatttacgggaaccggcggcaaatatgagccagcggggattgttcaccgtggtgaatttgtcttcacgaaggaggcaaccagccggattggcgtggggaatctctaccggctgatgcgcggctatgcggaaggtggttatgtgggcggtgccggaagtccggcgcagatgcggcgggctgaaggcattaattttaatcagaacaatcacgtggtgattcagaacgacggtacgaatggtctgccaggtccacagatgatgaaggccgtgtatgacatggcccgcaagggtgcccgtgatgaaattcagacacagatgcgtgatggtggcctgttctccggaggtggacgatga

SEQ ID NO: 483867 - DNA, 330 bp, Shigella sonnei
atgaaaaccttccgctggaaagtgaaacccggtatggatgtggcttcggccccttctgtaagaaaggtgcgctttggtgatggctattcccagcgagcgcctgccgggctgaatgccaacctgaaaacgtacagcgtgacgctttctgtcccccgtgaggaggccatggtactggagtcgtttctggaagagcacgggggctggaaagcctttctgtggacgccgccttatgagtggcggcagataaaggtgacctgcgcaaaatggtcgtcgcgggtcagtatgctgcgtgttgagttcagcgcagagtttgaacaggtggtgaactga

SEQ ID NO: 483868 - DNA, 699 bp, Shigella sonnei
atgcaggatatccggcaggaaacactgaatgaatgcacccgtgcggagcagtcggccagcgtggtgctctgggaaatcgatctgacagaggtcggtggagaacgttattttttctgtaatgagcagaacgaaaaaggtgagccggtcacctggcaggggcgacagtatcagccgtatcccattcaggggagtggttttgaactgaatggcaaaggcaccagtacgcgccccacgctgatggtttctaacctgtacggtatggtcaccgggatggcggaagatctacagagtctggtcggcggaacggtggtccggcgtaaggtttacgcccgttttctggatgcggtgaacttcgtcaacggaaacagtgacgccgatccggagcaggaggtgatcagccgctggcgcattgagcagtgcagcgaactgagcgcggtgagtgcctcttttgtactgtccacgccgacggaaacagatggcgctgtttttccgggacgtatcatgctggccaacacctgcacctggacctatcgcggcgatgagtgcggttatcacggtccggcggtcgcggatgaatatgaccagccaacgtccgacatcacgaaggataaatgcagcaaatgcctgagtggctgtaagtttcgcaataacgtcggcaactttggcggcttcctttccattaacaaactttcgcagtaa

SEQ ID NO: 483869 - DNA, 744 bp, Shigella sonnei
atgacagagacagaatcagcgattctggcgcacgcccggcgatgtgctccagcggagtcgtgcggcttcgtggtaagaacgccggagggggaaagatatttcccctgcgtgaatatctccggtgagccggaggcgtatttccgtatgtcgccggaagactggctgcaggcagagatgcagggtgagattgtggcactggtccacagccaccccggtggtctgccctggctgagtgaggccgaccggcggctgcaggtgcagagtgatttgccgtggtggctggtctgccggggggcgattcacaagttccgctgtgtgccacatcttaccgggcggcgctttgagcacggggtgacggactgttacacgctgttccgggatgcttaccatctggcggggattgagatgccggattttcatcgtgaggatgactggtggcgtcacggtcagaatctctatctggataatctggaggccacagggctgtatcaggtgccgttgtcagcggcgcagccgggcgatgtgctgctgtgctgttttggttcatcggtgccgaatcatgccgccatttactgtggtgacggcgagctgctgcaccatattcctgaacaactgagcaaacgagagaggtataccgacaaatggcagcgacgcacacactccctctggcgtcaccgggcatggcacgcatctgcctttacggggatttgcaacgatttggccgccgcatcgaccttcgtgtga

SEQ ID NO: 483870 - DNA, 573 bp, Shigella sonnei
gtgaaaacgggtgccgaagccatccgggcgatggccacacagctccctgcgtttcgtcagaagctgagcgacggctggtatcaggtgcgtattgccgggcaggatgttagcacgtccggattaacggcacagttacatgaggctctgcctgacggcgctgtgattcatattgttcccagagtcgccggggccaagtcaggtggtgtattccagattgtcctgggagcagccgccattgccggatcattctttaccgccggagccacccttgcagcatggggggctgccattggtgccggtggtatgaccggcattctgttttctctcggtgccagtatggtgctcggcggtgtggctcagatgctggcaccgaaagccagaactccccgcacacagacaacggataacggtaagcagaacacctatttctcctcactggataacatggttgcccagggcaatgttatgcctgttctgtatggtgaaatgcgcgtggggtcacgtgtggtatctcaggagatcagcacggcagacgaaggggacggtggtcaggttgtggtgattggtcgctga

SEQ ID NO: 483871 - DNA, 3498 bp, Shigella sonnei
atgggtaaaggcagcagtaaggggcataccccgcgcgaagcgaaggacaacctgaagtccacgcagctgctgagtgtgatcgatgccatcagcgaagggccggttgaaggtccggtggatggattaaaaagcgtgctgctgaacagtacgccggtgctggacagtgaggggaataccaacatctccggcgtcacggtggtgttccgggcaggtgagcaggagcagtcaccgccggagggatttgaatcctccggctccgagacggtgctgggtacggaagtgaaatatgacacgccgatcacccggaccatcacgtcggcaaacattgaccgactgcgttttaccttcggtgtacaggcactggtggaaaccacctcaaagggagacaggaatccgtctgaagttcgcctgctggttcagatacagcgtaacggtggctgggtgacggaaaaagacatcaccattaagggcaaaaccacctcgcagtatctggcctcggtggtggtggataacctgccgccgcgcccgtttaatatccggatgcgcagaatgacgccggacagcaccacagaccagctgcagaacaaaacgctctggtcgtcatacaccgaaatcatcgatgtgaaacagtgctacccgaacacggcactggtcggcgtacaggtggattcggagcagttcggcagccagcaggtgagccgtaattatcatcttcgcgggcgcattctgcaggtgccgtcgaactataatccgcagacgcggcaatacagcggtatctgggacggaacgttaaaaccggcatacagcaacaacatggcctggtgtctgtgggatatgctgacccatccgcgctatggcatggggaaacgtcttggtgcggcagatgtggataaatgggcgctgtatgtcatcggccagtactgtgaccagtcggtgccggacggctttggcagcacggagccgcgcatcacctgtaatgcctggctgaccacacagcgcaaggcgtgggatgtgctcagtgatttctgctcggcgatgcgctgtatgccggtatggaacgggcagacgctgacgttcgtgcaggaccgacagtcggataaggtgtgggcctataaccgcagtaatgtggtgatgccggatgatggcgcgccgttccgctacagtttcagcgccctgaaagaccgccataatgccgttgaggtgaactggattgacccggataacggctgggagacggcgacagagcttgtggaggatacgcaggccattgtccgttacggtcgtaacgtcacgaagatggatgcctttggctgtaccagccgggggcaggcacaccgcgccgggctgtggctgattaaaacggaactgctggagacgcagaccgtggatttcagcgtgggtgctgaagggcttcgtcatgtaccgggcgatgtcattgaaatctgcgatgatgactatgccggtatccgcaccggcgggcgcgtgctggcggtgaacagccagacccggacgctgacgctcgaccgtgaaatcacgctgccatcctccggcaccacgctgataagcctggttgacgggcaggggaatccggtcagcgtggaggtccagtccgtcaccgacggcgtgaaggtaaaagtgagccgtgttcctgacggtgttgctgaatacagcgtgtgggggctgaagctgccgacgctgcaccagcgattgttccgctgcgtgagtatccgtgagaacgacgacggcacgtatgccatcaccgccgtgcagcatgtgccggaaaaagaagccatcgtggataacggggcgcactttgacggcgaccagagcggcacggtgaatggtgtcacgccgccagcggtgcagcacctgactgccgaagtcaccgcagacagcggggaatatcaggtgctggcgcgctgggacacgccgaaggtggtgaagggcgtgagcttcctgctccgtctgaccgtaacagcggatgacggcagtgagcggctggtcagcacggcccggacgacggaaaccacttaccgcttcacacaactggcgctggggaactacaggctgacagtccgggcagtaaatgcgtgggggcagcagggcgatccggcgtcggtatcgttccggattgccgcaccggcagcgctgtcgcggattgagctgacgccgggctattttcagataaccgccacgccgcatcttgcggtttatgatccgacggtacagtttgagttctggttctcggaaaagcggattgcggatatcaggcaggttgaaaccacagcacgctatcttggcacggcgctgtactggatagccgccagtatcaatatcaaaccgggccatgattattacttttatatccgcagtgtgaacaccgttggcaaatcggcattcgtggaggctgttggtcagccgagtgatgatgcatccggttatctggattttttcaaaggcgagatagggaaaacccatctggctcaggagctgtggacgcagattgataacggtcagcttgcgcctgacctggctgaaatcaggacgtccattacggatgtcagcaatgaaatcacgcagaccgtcaataagaaactggaagaccagagtgcggcaattcagcagatacagaaggttcaggttgatacaaataataacctgaacagcatgtgggctgtgaagctgcagcagatgcaggacggacgcctttatatcgcgggtattggtgccggtattgagaacacccctgacggcatgcagagtcaggtgctgctggcggcggacaggattgcgatggttaatcctgcgaatggcaacacaaaaccgatgtttgttggtcagggcgatcagatattcatgaacgacgtgttcctgaaacgcctgacggcccccaccattaccagcggtggaaatccatcggcattttccctgactccggacggaaagctgaccgctaaaaatgcggatatcagtggcagtgtgaatgcgaacgccgggacgctcaacaatgtcacggtaaatgaaaactgtacgattaagggcatgctggaggcgactcaggtcagaggtgacttcgttaaagctgtatccaaatcatttccgaaacaggctggtacgtggggtaacacggaaacaccaaacgggacggttacagtcaccataagcgatgatcataactttgaccgccagattattattccgcccattatttttaacggtatagcgtatgacgatccggggagcggaaataacccaggaggcacgcgatacacgggttatggttttgaagttcgcaaaaacggcgtattaatcgcatccagagaaactaaaggtgccattcccggtagttacagtgcagttattgatatgcctagtggtggtggtagcgtcactctggagtttaagattttccagaaaggcaatcagggggcaggcaatatcaccgactgtacggtgattgtgaccaaaaaagcggcttccggcatcagtattcgttga

SEQ ID NO: 483872 - DNA, 483 bp, Shigella sonnei
atgcgtaaagtttgtgcagccattttgtccgcagccatttgcctggccgtatccggtgcgcctgcatgggcgtctgaacatcagtccacgctgagcgcggggtatcttcatgcccggaccaacgttcccggcagtgatgatctgaacgggattaacgtgaaataccgttatgagtttacggatacgctggggctggtgacgtcattcagctatgcaggagacaagaatcgccagctgacccgttacagcgatacccgctggcatgaagattccgtgcgtaaccgctggttcagcgtgatggcggggccgtctgtgcgcgtgaatgaatggttcagcgcgtatgcgatggcgggtgtggcttacagccgtgtgtcgactttttccggggattatatccgcgtaactgacaataaggggaaaacgcacgatgtgctgaccggaagtgatgacggtcgccacagcaacacgtctctggcgcactga

SEQ ID NO: 483873 - DNA, 465 bp, Shigella sonnei
gtggcactggctgaggcctgcccggcacttgttgacgcggcgctggcagacgacgcagccgctgtttttgagcctgccgcagctgaggcactctgtcccgctgccgtttcagaagacctggcgttcgtctcggacgttttggccgccttcgcagaatttgcagccgccgtcgccgaggaagctgcgctactggcgcttgatgatgcgttcgtttctgatgattttgccgcctcttttgaagccgacgcatcccgggctgaggtggcagcttctgacgctttcgtggtcgcggtggatgcagaagtggctgctgattgttgtgacgctgccgcattcgtttctaacgttttcgccgcaccggcactggtagccgccgcgctttttgaggactctgcagcggcagcactttttgaggcttcagtggcctttgttgatgccgttcctgcgctggaagacgctgactga

SEQ ID NO: 483874 - DNA, 198 bp, Shigella sonnei
gtgaaaaacaatgcacagctgttgatgccgcgcgaaaaaatgctgaagtttggtattagcgccttaacggatgtcgagctgctggcgctatttctgcgtaccggaacgcgcggtaaagatgtattaaccctggcaaaagagatgctggagaatttcggctctctttatggcttgttggtgatgctgccaacttactga

SEQ ID NO: 483875 - DNA, 1221 bp, Shigella sonnei
atgagcctggccggtaaaaaaatcgttctcggcgttagcggcggtattgctgcctataaaacccctgaactggtgcgtcgtttgcgcgatcgcggggccgacgtccgcgtagccatgaccgaagcggcaaaagcctttatcaccccacttagcttgcaggcggtttctggttatcccgtttccgacagtctgctggacccggcagccgaagccgctatgggccatattgagctgggtaaatgggctgatttagtgattctcgcccctgccacggcagatttgattgcccgtgttgctgccggaatggcgaatgacctggtatcgacgatttgtctggctacacctgcgcctgtagccgtgctccccgccatgaaccagcagatgtaccgtgccgctgccacgcagcataatttagaggtgcttgcttcccgtggtttgctcatctgggggccagacagtggcagtcaggcttgtggtgatatcggtcctgggcgaatgctcgatccgttaaccattgtggatatggcggtagcgcatttttcgcccgtcaacgacctgaaacatctgaacattatgattaccgccggcccgacgcgtgaaccgctcgatccggtgcgttatatctctaatcacagctccggcaagatgggttttgctatcgccgccgccgctgcccgtcgtggcgcgaacgtcacgctggtatcaggcccggtttcgctaccgacgccaccgtttgttaaacgtgttgatgtgatgaccgcgctggaaatggaagtcgccgtgaatgcttctgtacagcagcaaaatatttttatcggctgcgccgccgtggcggattatcgcgcagctaccgtggccccagagaaaatcaaaaagcaggccacgcagggtgatgaattaacaataaaaatggttaaaaaccccgatatcgtcgcaggcgttgccgcactaaaagaccatcgaccctacgtcgttggatttgccgccgaaacaaataatgtggaagaatacgcccggcaaaaacgtatccgtaaaaaccttgatctgatctgcgcgaacgatgtttcccagccaactcaaggatttaacagcgacaacaacgcattacaccttttctggcaggacggagataaagtcttaccgcttgagcgcaaagagctccttggccaattattactcgacgagatcgtgacccgttatgatgaaaaaaatcgacgttaa

SEQ ID NO: 483876 - DNA, 459 bp, Shigella sonnei
atgatgaaaaaaatcgacgttaagattctggacccgcgcgttgggaaggaatttccgctcccgacttatgccacctctggctctgccggacttgacctgcgtgcctgtctcgacgacgccgtagaactggctccgggtgactctacgctggttccgaccgggctggcgattcatattgccgatccttcactggcggcaatgatgctgccgcgctccggattgggacataagcacggtatcgtgcttggtaacctggtaggattgatcgattctgactatcagggccagttgatgatttccgtgtggaaccgtggtcaggacagcttcaccattcaacctggcgaacgcatcgcccagatgatttttgttccggtagtacaggctgaatttaatctggtggaagatttcgacgccaccgaccgcggtgaaggcggctttggtcactctggtcgtcagtaa

SEQ ID NO: 483877 - DNA, 597 bp, Shigella sonnei
atggcagaaaaacaaactgcgaaaaggaaccgtcgcgaggaaatacttcagtctctggcgctgatgctggaatccagcgatggaagccaacgtatcacgacggcaaaactggccgcctctgtcggcgtttccgaagcggcactgtatcgccacttccccagtaagacccgcatgttcgatagtctgattgagtttatcgaagatagcctgattactcgcatcaacctgattctgaaagatgagaaagacaccacagcgcgcctgcgtctgattgtgttgctgcttctcggttttggtgagcgtaatcctggcctgacccgcatcctcactggtcatgcgctaatgtttgaacaggatcgcctgcaagggcgcatcaaccagctgttcgagcgtattgaagcgcagctgcgccaggtattgcgtgaaaagagaatgcgtgagggtgaaggttacaccaccgatgaaaccctgctggcaagccagatcctggccttctgtgaaggtatgctgtcacgttttgtccgcagcgaatttaaataccgcccgacggatgattttgacgcccgctggccgctaattgccgcgcagttgcagtaa

SEQ ID NO: 483878 - DNA, 642 bp, Shigella sonnei
atgaaaccatatcagcgccagtttattgaatttgcgcttagcaagcaggtgttaaagtttggcgagtttacgctgaaatccgggcgtaaaagcccctatttcttcaacgccgggctgtttaataccgggcgcgacctggcactgttaggccgtttttacgctgaagcattggtggattccggcattgagttcgatctgctgtttggccctgcttacaaagggatcccgattgccaccacaaccgccgtggcgctggcggagcatcatgacctggacctgccgtactgctttaaccgcaaagaggcaaaaaaccacggtgaaggcggcaatctggttggtagcgcgttacaaggacgcgtaatgctggtagatgatgtgatcaccgccggaacggcgattcgtgagtcgatggaaattattcaggccaatggcgcgacgcttgctggcgtgttgatttcgctcgatcgtcaggaacgggggcgcagcgagatttcggcgattcaggaagttgagcgtgattacaactgcaaagtgatctctatcatcaccctgaaagacctgattgcttacctggaagagaagccggaaatggcggaacatctggcggcggttaaggcctatcgcgaagagtttggcgtttaa

SEQ ID NO: 483879 - DNA, 717 bp, Shigella sonnei
atgcgtccagcaggccgtagcaataatcaggtgcgtcccgttaccctgactcgtaactatacaaaacatgcagaaggctcggtgctggtcgaatttggcgataccaaagtgttgtgtaccgcctctattgaagaaggcgtgccgcgcttcctgaaaggtcagggccagggctggatcaccgcagagtacggtatgctgccgcgttctacccacacccgtaacgctcgtgaagcggcgaaaggtaagcagggtggacgcacaatggaaatccagcgtctgatcgcccgtgcgcttcgcgcggcagtagatttgaaagcgctgggtgagttcaccattacgctggactgcgacgtgcttcaggctgatggtggcactcgtaccgcttcgattacgggtgcctgcgtggcgctggcagatgcgctacagaagctggtggaaaacggtaagctgaaaaccaatccgatgaaagggatggtagccgcggtttctgtcgggattgtgaacggcgaagcggtttgcgatctggaatacgttgaagactctgccgcagagaccgacatgaacgtagtgatgaccgaagacgggcgcatcattgaagtgcaggggacggcagaaggcgaaccgttcacccacgaagaattactcaccttgttggctctggcccgagggggaatcgaatccattgtagcgacgcagaaggcggcgctggcaaactga

SEQ ID NO: 483880 - DNA, 864 bp, Shigella sonnei
atgatccgcagtatgaccgcctacgcccggcgtgaaatcaagggtgaatgggggagcgcaacctgggaaatgcgctcggtaaaccagcgttatctggaaacttactttcgtctgccggagcagttccgtagccttgaacctgtcgttcgcgagcgtattcgttctcgcctgacgcgcggtaaagtggaatgtaccctgcgctatgagccagatgttagcgcgcaaggtgagctgatcctcaacgaaaaactggctaaacagctggtaactgccgcgaactgggtaaaaatgcagagtgacgaaggggaaatcaacccggttgatattctgcgctggccgggcgtaatggcagcccaggagcaggatctcgacgcgattgccgctgaaattctcgcggcgttggatggtaccctggacgactttatcgtcgcacgtgaaaccgaaggtcaggcgctgaaagcgttgatcgagcagcgtctggaaggcgtcaccgccgaagtggtcaaagtccgcgcccatatgccggaaatcctgcaatggcagcgtgagcgtctggtcgcgaagctggaagatgctcaagtgcaactggaaaacaaccgcctggagcaggagttggttctgctggcacaacgaattgatgttgccgaagaactggaccgcctggaagcgcatgtcaaagagacctacaacattctgaagaaaaaagaagccgttggtcgtcgtctggactttatgatgcaagagttcaaccgcgagtcgaacactcttgcgtcgaaatctatcaatgccgaagtgacgaattctgccatcgagctgaaagtgttgattgagcagatgcgcgagcagattcagaatattgagtaa

SEQ ID NO: 483881 - DNA, 825 bp, Shigella sonnei
atgaacgaacatcatcaaccttttgaagaaatacggcattatggcactgaagggcaagaattttggtcagcgagagaattggcaccgttactggattatcgggactggcgcaattttcaaaaggtactggcccgcgcgactcaagcgtgcgaagccagcaatcaagctgcatctgaccatttcgttgaaaccaccaaaatggttgtattaggttcaggggctcaacgagaacttgaagatgttcatctctctcgctatgcctgttacctggtagtacaaaacggcgaccctgcgaaaccggttattgcggcagggcaaacttattttgctatccagacccgacggcaggagctggctgacgatgaagctttcaggcaacttcgtgaagacgaaaagcgtctttttctgagaaatgagttgaaagaacataacaaacaattagttgaggcagcgcagcaagctggggtagcgacagctatcgatttcgccatatttcagaatcatggttaccgggggctgtatggtggattagatcagaaagccatccatcagcggaaggggctgaaaaagagtcagaagatcctggatcatatgggttcaacagaactggcggctaatctctttcgagctacccaaacagaagaaaaactcaagcgggatggcgtaaattcaaaacagcaagctaataccacacactttgacgtgggtagcaaggtgaggcaaaccattcaggaacttggcggaaccatgcctgaggagttgccgaccccgcaggtcagcatcaatcagttggaaaacagtgtaaaaattacagagaagaaatag

SEQ ID NO: 483882 - DNA, 618 bp, Shigella sonnei
atgctgttacacattttgtatttggttggcattactgccgaagccatgacgggggcgctggcggccggacgacggcgcatggatacatttggcgtaattattattgcgaccgccaccgcaattggcggagggtcagtgcgcgatattctgctgggccactatccgctcggttgggtcaaacacccggaatatgtgattatcgtcgctaccgccgcagtactcaccactatcgttgctcctgtaatgccttacctgcgcaaagtgtttctggtgctcgatgcgctcggactggtggtcttttctatcatcggcgcacaggttgcactggatatggggcacggcccaattattgccgttgtcgcggcggtaaccaccggcgtgtttggcggcgttttgcgcgatatgttctgtaaacgcatcccactggtattccagaaagagttgtatgccggtgtctcatttgcctccgccgtgctgtacatcgcgctgcaacactatgtttctaaccatgatgtggtgattatctccaccctggtattcggcttttttgcccgcttactggcgctacgtcttaagctgggattaccggtcttttactacagccacgaaggtcactaa

SEQ ID NO: 483883 - DNA, 1683 bp, Shigella sonnei
atgaaagtatggatggcgatattaataagtatcttgtgctggcaatcatctgtgtgggcggtctgtccggcctggtcgccagccagagcacaggaagaaatttcccgcctgcaacagcaaataaaacagtgggacgatgactactggaaggaagggaaaagtgaggtggaagacggtgtttacgatcagttaagcgcccgtcttacgcagtggcaacgctgctttgggagcgagccccgcgacgtgatgatgccgcctttaaatggtgcggttatgcatccggttgcccatacgggtgtacgcaaaatggtggataaaaacgcattaagtctgtggatgcgagaacgtagcgatctttgggtgcagccaaaagttgatggcgttgcggtaaccctggtttatcgggacgggaaactgaacaaagcaatcagtcgcggtaatggcctgaaaggcgaggactggacgcagaaagttagcttaatttccgctgtgccgcaaaccgttagcgggcctttagccaacagtacgcttcagggggaaatatttctccagcgcgaggggcatatccaacaacaaatggggggaataaatgcccgcgcaaaagttgctggcctgatgatgcgccaggggaatagcgacacgctaaactcactggctgtttttgtctgggcatggccggatggaccgcagttaatgaccgatcgtttaaaggagctggctaccgcaggttttactctaacgcagaggtatacccgtgcggttaaaaatgctgatgaaattgcgcgcgtacgcaatgagtggtggaaagcgaaattacccttcgtcaccgatggcgtggttgtgcgagcggctaaggaacccgaatcccgccattggctaccaggccaggcagaatggttggtggcctggaaatatcaacctgtagctcaggttgccgaagtgaaggcgattcagtttgcggtgggtaagagcggtaaaatatcggtggttgcgtcactcgcacctgtcatgctggatgataaaaaagtccagcgggtgaatattggttccgtcaggcgctggcaggagtgggatattgcgcctggtgatcagatcctcgtcagccttgccggtcagggtattcctcgcattgatgatgtggtctggcgcggtgcagaacgtacaaaaccgacaccaccagaaaaccgctttaactcgttgacctgctactttgcttctgatgtttgtcaggaacagttcatttcacgcttagtctggctggggtcaaaacaggttcttgggctggatggcattggtgaggccggctggcgcgcgctgcatcagactcatcgctttgagcatatcttttcctggcttttattaacgccagagcaattacagaacacgccggggatcgcgaaaagtaaaagtgcgcagttatggcatcagtttaatctggctcgtaagcagccttttactcgctgggtgatggcaatgggaataccgttaacccgggcggcgcttaatgccagtgatgaacggtcctggtcgcaacttttatttagcacggagcagttctggcagcggctgccggggactggatctgggcgcgccagacaggttattgaatggaaggaaaatgcgcaaatcaagaagctgggcagttggctggctgcccagcagatcacaggttttgaaccttag

SEQ ID NO: 483884 - DNA, 624 bp, Shigella sonnei
atggctcaaggcacgctttatattgtttctgcccccagtggtgcgggtaaatccagcctgattcaggctttattaaaaacccaaccgttgtatgacacccaggtttctgtttcacacaccacacgccaaccgcgtcctggtgaagtccacggtgaacattatttctttgttaatcatgatgaatttaaagaaatgattagcagagatgcgttcctcgaacacgcagaagtttttggtaattactatggcacttcgcgtgaggccattgagcaagtactggcgaccggtgtcgatgtttttctcgatatcgactggcagggcgcgcagcaaattcgccagaagatgccgcacgcgcggagtatctttattttaccgccgtccaaaattgaactggaccgccgtctacgcggtcgcggtcaggacagcgaagaggtcattgcaaagcgtatggcgcaagctgttgcagaaatgagccattacgccgaatatgattatctgattgtgaatgatgacttcgataccgcgttgaccgatttgaagaccattattcgcgccgaacgtctgcgcatgagccgccaaaagcagcgtcatgacgctttaatcagcaaattgttggcagactga

SEQ ID NO: 483885 - DNA, 276 bp, Shigella sonnei; identical to SEQ ID NO: 1759

SEQ ID NO: 483886 - DNA, 2109 bp, Shigella sonnei
ttgtatctgtttgaaagcctgaatcaactgattcaaacctacctgccggaagaccaaatcaagcgtctgcggcaggcgtatctcgttgcacgtgatgctcacgaggggcaaacacgttcaagcggtgaaccctacatcacgcacccggtagcggttgcctgcattctggccgagatgaaactcgactatgaaacgctgatggcggcgctgctgcatgacgtgattgaagatacacccgccacctaccaggatatggaacagctttttggtaaaagcgtcgccgagctggtagagggggtatcgaaacttgataaactcaagttccgcgataagaaagaggcgcaggccgaaaactttcgcaagatgattatggcgatggtgcaggatatccgcgtcatcctcatcaaacttgccgaccgtacccacaacatgcgcacgctgggctcacttcgcccggacaaacgtcgccgcatcgcccgtgaaactctcgaaatttacagcccgctggcgcaccgtttaggtatccaccacattaaaaccgaactcgaagagctgggttttgaggcgctgtatcccaaccgttatcgcgtaatcaaagaagtggtgaaagccgcgcgcggcaaccgtaaagagatgatccagaagattctttctgaaatcgaagggcgtttgcaggaagcgggaataccgtgccgcgtcagtggtcgcgaaaagcatctttattcgatttactgcaaaatggtgctcaaagagcagcgttttcactcaatcatggacatctacgctttccgcgtgatcgtcaatgattccgacacctgttatcgcgtgctcgggcaaatgcatagcctgtacaagccgcgtccgggtcgcgtgaaagactacatcgccattccaaaagcgaacggctatcagtctttgcacacctcgatgatcggcccgcacggtgtgccggttgaggtccagatccgtactgaagatatggatcagatggcggagatgggtgttgccgcgcactgggcttataaagagcacggcgaaaccagcaccaccgcgcaaatccgcgcccagcgctggatgcaaagcctgctggagctgcaacagagcgccggtagttcgtttgaatttatcgagagcgttaaatccgatctcttcccggatgagatttacgttttcacaccggaagggcgaattgtcgagctgcctgccggtgcaacgcccgtcgacttcgcttatgcagtgcataccgatatcggtcatgcctgcgtgggcgcacgcgttgaccgccagccttacccgctgtcgcagccgcttaccagcggtcaaaccgttgaaatcattaccgcaccgggcgctcgcccgaatgccgcgtggctgaactttgtcgttagctcaaaagcgcgcgccaaaattcgtcagttgctgaaaaacctcaagcgtgatgattctgtaagcctgggccgtcgtctgctcaaccatgctttgggtggtagccgtaagctgaatgaaatcccgcaggaaaatattcagcgcgagctggatcgcatgaagctggcaacgcttgacgatctgctggcagaaatcggacttggtaacgcaatgagcgtggtggtcgcgaaaaatctgcaacatggggacgcctccattccaccggcaacccaaagccacggacatctgcccattaaaggtgccgatggcgtgctgatcacctttgcgaaatgctgccgccctattcctggcgacccgattatcgcccacgtcagccccggtaaaggtctggtgatccaccatgaatcctgccgtaatatccgtggctaccagaaagagccagagaagtttatggctgtggaatgggataaagagacggcgcaggagttcatcaccgaaatcaaggtggagatgttcaatcatcagggcgcgctggcaaacctgacggcggcaattaacaccacgacttcgaatattcaaagtttgaatacggaagagaaagatggtcgcgtctacagcgcctttattcgtctgaccgcccgtgaccgtgtgcatctggcgaatatcatgcgcaaaatccgcgtgatgccagacgtgattaaagtcacccgaaaccgaaattaa

SEQ ID NO: 483887 - DNA, 690 bp, Shigella sonnei
atgaacccaacacgttatgcacgcatctgcgaaatgctcgccaggcggcagcctgatctgaccgtctgcatggagcaggtccacaaacctcataacgtttctgcgattattcgtaccgcagatgccgttggcgtacatgaagttcacgccgtctggcctggtagccgcatgcgcaccatggcttcggcagcggcgggtagtaacagctgggtacaggtgaaaacacaccgcaccattggcgatgccgtcgctcatctgaaaggccagggtatgcagattctggcaacccatctttctgataacgctgtcgatttccgcgaaattgattacactcgcccgacctgcattttgatgggacaggagaaaacgggcatcacgcaggaagcattggccctggcggatcaggacatcatcattccgatgatcggcatggtgcagtcgctgaatgtttccgttgcctcagccctcattctttacgaagcccagcgtcagcggcaaaatgcaggcatgtacctgcgtgaaaacagcatgttgccggaagcagagcaacaacgcctgttgtttgaaggcggctatccggtgctggcgaaagtcgcaaaacgcaaaggcctgccttatccccacgtcaatcagcaaggcgagatcgaagctgatgccgactggtgggctactatgcaggctgcagggtaa

SEQ ID NO: 483888 - DNA, 2082 bp, Shigella sonnei
atgaaaggtcgcctgttagatgctgtcccactcagttccctaacgggcgttggcgcagcacttagtaacaaactggcgaaaatcaacctgcataccgtgcaggatctactcttacaccttcccctgcgctacgaagatcgcacccatctctaccccatcggagaactactgccgggcgtttatgccacggtggaaggcgaagtgctgaactgcaatatctccttcggcggtcggcggatgatgacctgccagatcagcgacggttccggcatcctcaccatgcgctttttcaatttcagcgcggcaatgaaaaatagcctggcgacgggccgccgtgtactggcttatggcgaagcaaagcgcggtaaatatggtgcggagatgatccacccggaataccgcgtgcagggcgatctcagcacgccagaattacaggaaacgctcacgccggtttatccaacaacggaaggcgtaaagcaggccacgctgcgtaaattaaccgaccaggcgctggatctgctcgacacctgcgccattgaagaactcctgccgccggaactgtcacaaggaatgatgacgctaccggaagcgttgcgcactttgcaccgcccgccaccgacgctacagcttagcgatctggaaaccgggcagcatccggcgcaacgtcgtctgattctggaagaactgctggcgcacaacctcagcatgttagccttacgtgccggagcacagcgttttcatgcccagccgctgagcgccaatgatgcgctgaaaaataaactcctcgcagccttaccgttcaagccaacgggcgcacaggcacgcgtagtggcggagatcgagcgcgatatggcgctggatgtgccgatgatgcgcctggtacagggcgatgtaggttccggtaaaacgctggtcgccgccctcgccgcgctgcgtgcgattgcccacggcaaacaggtggcattgatggcaccaaccgaattactcgccgaacagcacgccaataacttccgcaactggtttgaaccgctcggtatcgaagtgggctggctcgccggtaagcagaaaggcaaagcgcgactgtctcagcaggaagccatcgccagcggtcaggtgcagatgattgttggtacgcacgccatcttccaggaacaggtgcagtttaacggtctggcgctggtgattatcgacgaacaacatcgctttggcgtgcatcagcgtctggcgttatgggagaaaggccagcagcaaggcttccatccgcatcagttgatcatgaccgccacgccgatcccccgcacgctggcaatgacggcgtatgccgatctcgatacctcggtgatagatgaactgccgccaggccgcacgccagtgactacggtcgctattcctgatactcgccgtaccgacatcattgaccgcgtgcgccacgcctgcatgactgaaggtcgtcaggcgtactgggtttgtacgttgattgaagagtcagagttactggaagcgcaggcggcggaagctacctgggaagagttgaaactggcgctaccagaattgaatgttggcctggtacacgggcggatgaaaccagccgagaaacaggcggtgatggcgtcgtttaaacaaggtgagctacatctgctggttgccactaccgttattgaagtcggtgttgatgtgcctaacgccagcctgatgattatcgaaaaccctgagcgtctgggtctggcgcagttacaccagctgcgcgggcgcgtaggtcgtggcgcggtggcttctcactgcgtgctactctacaaaacgccgctttctaaaacggcgcaaattcgcctgcaagtgctgcgcgacagtaacgacggttttgtgattgcgcaaaaagatctggagattcgcggccctggcgaattgttaggcacgcgtcagacgggtaatgctgaatttaaagtggcggatttactgcgcgatcaggcgatgatcccggaagttcagcgcctggcacgccatattcacgaacgttacccacaacaggcaaaagccctgatagaacgctggatgccggagacggaacgttactcgaatgcgtaa

SEQ ID NO: 483889 - DNA, 1206 bp, Shigella sonnei
atgtttcatctcgatactttagcaacgcttgttgccgcaacgctgacgttgctgctcgggcgtaagttggtccattccgtctcctttttgaagaaatacaccataccggaacctgttgcgggtggtttgttggtggcgctggcgctactagtactgaaaaaaagcatgggctgggaagtcaactttgatatgtccctgcgcgatccgttaatgctggctttcttcgccaccattggcctgaacgccaacattgccagtttgcgtgccggtgggcgtgtggttggcatcttcttgattgtggttgttggtctgttggtgatgcaaaatgccattggcattggtatggctagcctgttagggcttgatccgctgatggggctgctggccggttctattacgctttccggcggtcacggtacgggcgctgcgtggagtaaattgttcattgaacgttatggcttcaccaatgcgacggaagtggcgatggcctgtgcaacgttcggtctggtgctgggcggcttgattggcggtccggtggcgcgctatctggtgaaacactccaccacgccgaacggtattccggatgaccaggaagtcccgacggcgtttgaaaagccggatgtgggacgcatgatcacctcgttggtgctgattgaaactatcgcgctgattgctatctgcctgacggtggggaaaattgttgcgcaacttttggctggcactgcttttgaactgccgaccttcgtctgtgtactgtttgttggcgtgattctgagcaacggtctgtcaataatgggcttttaccgcgtctttgagcgtgcggtatccgtgctgggtaacgtaagcttgtcgttgttcctggcgatggcgttgatggggctgaaactgtgggagctggcttcgctggcgctgccgatgctggcgattctggtggtacagaccatcttcatggcgttgtatgccatcttcgttacctggcgcatgatgggcaaaaactacgatgcggcagtgctggctgcaggtcactgtggttttggcctcggtgcaacgccaacggcaatcgccaacatgcaggcgattactgaacgctttggcccgtcgcacatggcgtttttggtggtgccgatggtcggtgcgttctttatcgatatcgtcaatgcgctggtaattaagttgtatttgatgttgccgatttttgccggttaa

SEQ ID NO: 483890 - DNA, 1392 bp, Shigella sonnei
atgtctgtttccaccctcgagtcagaaaatgcgcaaccggttgcgcagactcaaaacagcgaactgatttaccgtcttgaagatcgtccgccgcttcctcaaaccctgtttgccgcctgtcagcatctgctggcgatgttcgttgcggtgatcacgccagcgctattaatctgccaggcgctgggtttaccggcacaagacacgcaacacattattagtatgtcgctgtttgcctccggtgtggcatcgattattcaaattaaggcctggggtccggttggctccgggctgttgtctattcagggcaccagcttcaactttgttgccccgctgattatgggcggtaccgcgctgaaaaccggtggtgctgatgttcctaccatgatggcggctttgttcggcacgttgatgctggcaagttgcaccgagatggtgatctcccgcgttctgcatctggcgcgccgcattattacgccgctggtttctggcgttgtggtgatgattatcggcctgtcgctaattcaggtggggctgacctccattggcggcggttacgcagccatgagcgataacaccttcggcgcaccgaaaaatctgctgctggcaggcgtggttttagccttaattatcctgcttaaccgtcaacgtaacccttacttacgcgtggcctcactggtaattgcgatggcggccggatatgcgctggcgtggtttatgggcatgttgccagaaagcaacgaaccgatgacgcaagaactgattatggtgccaacgccgctctattacggtcttggcattgaatggagtctgctgctgccgctgatgctggtctttatgatcacttcgctggaaaccattggcgatatcacggcgacctctgacgtttccgaacagccagtgtccggtccgctgtacatgaaacgcctgaaaggcggcgtgctggcaaacggcctgaactcgtttgtttcggcggtgtttaacaccttcccgaactcctgcttcgggcaaaacaacggagtgatccagttgaccggtgttgccagccgctatgtcggttttgtcgtcgcgctgatgttgatcgtgctgggtctgttcccggcagtgagcggttttgtacaacacattccagaaccggttctgggcggcgcaacgcttgtaatgtttggcaccatcgccgcctccggtgtgcgtatcgtttctcgtgagccgctgaaccgtcgggcgattctgattatcgcgctgtcgctggcggttggtctgggcgtgtctcagcagccgctgattttgcagtttgcccctgaatggctgaaaaacctgctctcctccgggatcgccgcgggcggtattactgccatcgtgctgaatctgattttcccaccagaaaaacagtaa

SEQ ID NO: 483891 - DNA, 1710 bp, Shigella sonnei
atgaaatttattgggaagctgcttctctacattctcatcgctctgttagtggcgatcgctggcctctattttcttctgcaaacccgctggggagcagaacatatcagcgcatgggtttccgagaatagcgactatcatctggccttcggggcgatggttcaccgtttttccgcgccatctcatatcgtgctggagaatgtcacgtttggtcgtgatggccagcccgcgaccctggtggccaaaagtgtcgacattgcgctaagtagtcggcaactgaccgaaccacgccatgtcgataccatcctgctggaaaacgggacgctgaatctcaccgaccagaccgcgccgctaccgttcaaagccgatcgtctgcaactgcgtgatatggcgtttaatagcccgaatagcgaatggaaactgagcgcgcagcgggtaaatggcggcgtggttccgtggtcaccagaagccggtaaagtgctgggtacgaaggcgcagattcagtttagtgccggatcgctttcgctcaatgatgttcctgccaccaatgtactgattgaaggcagtattgataacgatcgcgttacgctgactaacctgggtgccgacatcgcgcgcgggacattaaccggaaacgcgcagcgtaacgccgacggcagctggcaagtggaaaacctgcgcatggcggatatccgtctacaaagcgaaaaatcgctaaccgacttctttgcgccattacgctctgtcccgtcgttgcagattggtcgcctggaagtgatcgatgctcgtttgcaaggtccggactgggcggtgaccgacctcgatctcagcttgcgcaacatgaccttcagtaaagatgactggcagacacaagaaggcaaactgtcgatgaacgctagcgagttcatttatggttcgctgcatttatttgacccgattataaacgcggaattttctccgcagggcgtagcgctgcgccagttcaccagccgctgggaagggggtatggtcagaacgtcagggaactggctgcgtgacgggaaaacgttgatccttgatgatgcggcaattgccggactggaatataccttgccgaaaaactggcaacagttgtggatggaaacgacacccggttggttaaacagcctgcaactgaagagatttagcgccagccgcaatctgatcattgatatcgaccctgacttcccgtggcagctcaccgcgctcgatggttacggtgccaacctgacgctggttaccgatcataaatggggcgtctggagtggctcggcgaatctgaatgccgccgccgcgacgtttaatcgtgttgatgtccgtcgtccgtcgctggcgctaaccgccaacagcagcacggtgaatatcagcgaactgagtgcatttactgaaaaaggcattctggaagccaccgccagtgtttcacaaacgccacaacgtcagacacatatcagcctgaatggacgcggtgtgccggtgaatattttgcaacagtggggatggcctgaattaccgttgactggcgacggcaatattcagcttaccgccagtggcgatattcaggccaatgtcccgttgaaacctacggttagcgggcaattgcatgccgtgaacgccgcaaagcagcaagtgactcaaaccatgaatgcgggcgtcgtttccagcggtgaagttacatcggcagagctggtgcagtaa

SEQ ID NO: 483892 - DNA, 1098 bp, Shigella sonnei
atgggcgttgattgctttaagaccgactttggcgaacgtatcccaactgatgttcagtggtttgacggttccgatccgcagaaaatgcataaccattatgcgtacatctacaacgaactggtgtggaacgtgctcaaggacaccgttggtgaggaagaagctgtcttgtttgcccgctcggcctccgtcggtgcgcagaaattcccggtacactggggtggcgattgttacgctaactacgaatcaatggcggaaagcctgcgcggtggtttgtctattggcctttcaggttttggcttctggagccacgatatcggcggctttgaaaataccgcgccggcacacgtttacaaacgctggtgcgcgtttggtttgctctccagccatagtcgtttacatggcagcaaatcttatcgtgtgccgtgggcctacgatgatgagtcctgtgatgtggtgcgcttcttcacgcaactgaaatgccgcatgatgccgtatctgtatcgtgaagctgcgcgtgcgaaagcgcggggtacgccgatgatgcgggccatgatgatggagttcccggacgatccggcttgtgattaccttgaccgtcaatacatgctaggcgacaacgtgatggttgctccggtgttcactgaggcgggcgaggtgcagttctacttgccggaaggtcgctggacacacctgtggcacaacaatgagctcgacggtagtcgctggcataaacagcagcacggcttcctgagtctgcccgtttatgtgcgtgataacaccctattggcgctgggcaacaacgatcaacgtcccgattacgcgtggcacgaaggcacggcattccatctctttaatctgcaagacgggcatgaagctgtatgtgaagtgcccgctgctgacggttcggtgatctttactctaaaagcaacacgtactggtaacacgattactgtgactggtgcgggcgaggcgaggaactggacactgtgcttgcgcaatattgtgaaagtaaatggtctgcaaggcggttcgcaggctgaaagtgagcaggggctggtggttacgcctcaagggaatgcgctgacaattacgttgtaa

SEQ ID NO: 483893 - DNA, 303 bp, Shigella sonnei
atgattccagagtgcatagcctgcgtcaccatcaggttgtcctgtttcccaaccaagattacagtaacgctgatattcccgacactcatgagtatagaagttaagatctacttgttctggggggatttttcctttctcaatgtctttcagtctattgatcatcacttcatttacaggatcatgaccaaatctggctatatgtttttcaacaatagcgataccttccctgttgattgttacgccatctgtcgtcaggttttctattggaccaccggcaagctcgggattaaatggtcttcctga

SEQ ID NO: 483894 - DNA, 231 bp, Shigella sonnei
ttgcatggccttagtttctgtaaattgattgacaaaagctccccgttacttattaacgctattaacaataacgagcagttgttcatggagtttgacttctatcggatcaataggtttggtcgatgggagaaatattacaacattcaactccgcggcgcgctcttatcagcaatcaatcacctgtttactgagaacaatctggatacagaagccatcactgtcagttattaa

SEQ ID NO: 483895 - DNA, 168 bp, Shigella sonnei
atgagtgatattatttacctgaccataaccggagaacaacaaggatgtatttcctctcgttgtggaacgagcgcatcaataggtaatcgctggcagattggccatgatgatgaaatcttcgcgttctcgctctctaatagtattacgaatacaggcaaagggtcataa

SEQ ID NO: 483896 - DNA, 813 bp, Shigella sonnei
atggcaacaacacaacaatctggatttgcacctgctgcatcgcctctcgcttcgaccatcgttcagaccctggacgacgcgattgtggcgggcttcacctctatcccttcacaaggggataacatgcctgcttaccatgccagaccaaagcaaagcgatggcccactgccagtggtcattgtagtgcaggaaatttttggcgtgcatgaacatatccgcgacatttgtcgccgtctggcgctggaggggtatctggctatcgcacctgaactttacttccgcgaaggcgatccgaatgattttgccgatatccccacgttgcttagcggtctggtagcaaaagtgcctgactcgcaggtgctggccgatctcgatcatgccgccagttgggcttcccgcaacggcggcgatgttcatcgtttaatgatcaccggattctgctggggtggacgtatcacctggctgtatgccgcgcataatccacagctaaaagctgcagtggcgtggtacggcaaactgacgggcgacaagtcgctgaattcaccgaaacaacctgttgatatcgcaaccgatcttaacgcgccgattctcggcttatatggcggtcaggataacagcattccgcaggagagcgttgaaaccatgcgccaggcgctgcgggctgctaatgcgaaagcagagattatcgtgtacccggatgccgggcatgcattcaacgctgattatcgcccgagctatcatgccgaatctgcgaaagatggctggcagcgtatgctggaatggtttaagcagtatggagagaagcggagttag

SEQ ID NO: 483897 - DNA, 762 bp, Shigella sonnei
atgtccaagtctgatgtttttcatctcggcctcactaaaaacgatttacaaggggctacgcttgccatcgtccctggcgacccggatcgtgtggaaaagatcgccgcgctgatggataagccggttaagctggcatctcaccgcgaattcactacctggcgtgcagagctggatggtaaacctgttatcgtctgctctaccggtatcggcggcccgtctacctctattgctgttgaagagctggcacagctgggcattcgcaccttcctgcgtatcggtacaacgggcgctattcagccgcatattaatgtgggtgatgtcctggttaccacggcgtctgtccgtctggatggcgcgagcctgcacttcgcaccgctggaattcccggctgtcgctgatttcgaatgtacgactgcgctggttgaagctgcgaaatccattggcgcgacaactcacgttggcgtgacagcttcttctgataccttctacccaggtcaggaacgttacgatacttactctggtcgcgtagttcgtcactttaaaggttctatggaagagtggcaggcgatgggcataatgaactatgaaatggaatctgcaaccctgctgaccatgtgtgcaagtcagggcctgcgtgccggtatggtagcgggtgttatcgttaaccgcacccagcaagagatcccgaatgctgagacgatgaaacaaactgaaagccaagcggtgaaaatcgtggtggaagcggcgcgtcgtctgctgtaa

SEQ ID NO: 483898 - DNA, 1428 bp, Shigella sonnei
gtggatttctcaatcatggtttacgcagttattgcgttggtgggtgtggcaattggctggctgtttgccagttatcaacatgcgcagcaaaaagccgagcaattagctgaacgtgaagagatggtcgcggagttaagcgcggcaaaacaacaaattacccaaagcgagcactggcgtgcagagtgcgagttactcaataacgaagtgcgcagcctgcaaagtattaacacctctctggaggccgatctgcgtgaagtaaccacgcggatggaagccgcacagcaacatgctgacgataaaattcgccagatgattaacagcgagcagcgcctcagtgagcagtttgaaaacctcgccaaccgtatttttgagcacagcaatcgccgggttgatgagcaaaaccgtcagagtctgaacagcctgttgtcgccgctacgtgaacaactggacggtttccgccgtcaggttcaggacagcttcggtaaagaagcacaagaacgccataccctgacccacgaaattcgcaatctccagcaactcaacgcgcaaatggcccaggaagcgatcaacctgacgcgcgcgctgaaaggcgacaataaaacccagggcaactggggcgaggtagtattgacgcgggtgctggaggcttccggtctgcgtgaagggtatgaatatgaaacccaggtcagcatcgaaaatgacgcccgctcgcggatgcagccggatgtcatcgtgcggctgccgcagggaaaagatgtggtgatcgacgccaaaatgacgctggtcgcctatgaacgctattttaacgccgaagacgactacacccgcgaaagcgcgctacaggaacatatcgcgtcggtgcgtaaccatatccgtttgctgggacgcaaagattatcaacagctgccggggctgcgaactctggattacgtgctgatgtttattcccgttgaacccgcttttttactggcgcttgaccgccagccggagctgatcaccgaagcgttgaaaaacaatatcatgctggttagcccgactacgctgctggtggcgttgcgtactattgccaacctgtggcgttatgagcatcaaagccgcaacgcccagcaaatcgccgatcgtgccagcaagctgtacgacaagatgcgtttgttcatcgatgacatgtccgcgattggtcaaagtctcgacaaagcgcaggataactaccgccaggcaatgaaaaaactctcttcaggtcgcggaaatgtgctggcgcaggcagaagcgtttcgcggtttaggagtagaaattaaacgcgagattaatccggatttggctgaacaggcggtgagccagaatgaagagtatcgacttcggtcggttccggagcagccgaatgatgaagcttatcaacgcgatgatgaatataatcagcagtcgcgctag

SEQ ID NO: 483899 - DNA, 756 bp, Shigella sonnei; identical to SEQ ID NO: 459126

SEQ ID NO: 483900 - DNA, 606 bp, Shigella sonnei; identical to SEQ ID NO: 459127

SEQ ID NO: 483901 - DNA, 1641 bp, Shigella sonnei
atgacgccaggtgaagtacggcgcctatatttcatcattcgcacttttttaagctacggacttgatgaactgatccccaaaatgcgtatcaccctgccgctacggctatggcgatactcattattctggatgccaaatcggcataaagacaaacttttaggtgagcgactacgactggccctgcaagaactggggccggtttggatcaagttcgggcaaatgttatcaacccgccgcgatctttttccaccgcatattgccgatcagctggcgttattgcaggacaaagttgctccgtttgatggcaagctggcgaagcagcagattgaagctgcaatgggcggcttgccggtagaagcgtggtttgacgattttgaaatcaagccactggcttctgcttctatcgcccaggttcataccgcgcgattgaaatcgaatggtaaagaggtggtgattaaagtcatccgcccggatattttgccggttattaaagcggatctgaaacttatctaccgtctggctcgctgggtgccgcgtttgctgccggatggtcgccgtctgcgcccaaccgaagtggtgcgcgagtacgaaaagaccttgattgatgaactgaatttgctgcgggaatctgccaacgccattcagcttcggcgaaattttgaagacagcccgatgctctacatcccggaagtttaccctgactattgtagtgaagggatgatggtgatggagcgcatttacggcattccggtgtctgatgttgcgacgctggagaaaaatggcaccaacatgaaattgctggcggaacgtggcgtgcaggtgttcttcactcaggtctttcgcgacagctttttccatgccgatatgcaccctggcaacattttcgtaagctatgaacacccggaaaacccgaaatatatcggcattgattgcgggattgttggctcgctaaacaaagaagataaacgctatctggcagaaaactttatcgccttctttaatcgcgactatcgcaaagtggcagagctacacgtcgattctggctgggtgccaccagataccaacgttgaagagttcgaatttgccattcgtacggtctgtgaacctatctttgagaaaccgctggccgaaatttcgtttggacatgtactgttaaatctgtttaatacggcgcgtcgcttcaatatggaagtgcagccgcaactggtgttactccagaaaaccctgctctatgtcgaaggggtaggacgccagctttatccgcagctcgatttatggaaaacagcgaagcctttcctggagtcgtggattaaagatcaggtcggtattcctgccctggtgagagcatttaaagaaaaagcgccgttctgggtcgaaaaaatgccagaactgcctgaattggtttacgacagtttgcgccagggcaagtatttacagcacagtgttgataagattgcccgcgagcttcagtcaaatcatgtacgtcagggacaatcgcgttattttctcggaattggcgctacgttagtattaagtggcacattcttgttggtcagccgacctgaatgggggctgatgcccggctggttaatggcaggtggtctgatcgcctggtttgtcggttggcgcaaaacacgctga

SEQ ID NO: 483902 - DNA, 270 bp, Shigella sonnei; identical to SEQ ID NO: 262597

SEQ ID NO: 483903 - DNA, 516 bp, Shigella sonnei; identical to SEQ ID NO: 471997

SEQ ID NO: 483904 - DNA, 777 bp, Shigella sonnei; identical to SEQ ID NO: 459131

SEQ ID NO: 483905 - DNA, 783 bp, Shigella sonnei
atgtttgatatcggcgttaatttgaccagttcgcaatttgcgaaagaccgtgatgatgttgtagcgcgcgcttttgacgcgggagttaatgggctactcatcaccggcactaacctgcgtgaaagccagcaggcgcaaaagctggcgcgtcagtattcgtcctgttggtcaacggcgggcgtacatcctcacgacagcagccagtggcaagctgcgactgaagaagcgattattgagctggccgcgcagccagaagtggtggcgattggtgaatgtggtctcgactttaaccgcaacttttcgacgccggaagagcaggaacgcgcttttgttgcccagctacgcattgccgcagatttaaacatgccggtatttatgcactgtcgcgatgcccacgagcggtttatgacattgctggagccgtggctggataaactgcctggtgcggttcttcattgctttaccggcacacgcgaagagatgcaggcgtgcgtggcgcatggaatttatatcggcattaccggttgggtttacgatgaacgacgcggactggagctgcgggaacttttgccgttgattccggcggaaaaattactgatcgaaactgatgcgccgtatctgctccctcgcgatctcacgccaaagccatcatcccggcgcaacgagccagcccatctgccccatattttgcaacgtattgcgcactggcgtggagaagatgccgcatggctggctgccaccacggatgctaatgtcaaaacacggtttgggattgcgttttag

SEQ ID NO: 483906 - DNA, 489 bp, Shigella sonnei
atgcaatcttggtatttactgtactgcaagcgcgggcaacttcaacgtgcccaggaacaccttgagagacaggctgtgaattgcctggcaccgatgatcaccctggaaaaaatcgtgcgtggaaaacgtactgcagtcagtgagccattgtttcccaactacctgtttgtcgaatttgatccagaagtgattcataccacgactatcaacgcgacccgcggtgtcagccacttcgtgcgctttggcgcgtcgctagcgatagtcccatcggcggtgattcatcagctatcggtatataaaccgaaagacattgtcgatccggcaaccccttatccgggagataaggtgattattaccgaaggcgcgttcgaaggctttcaggccattttcaccgaacccgatggtgaggctcgctccatgctattgcttaatcttattaataaagagattaagcacagtgtgaagaacaccgagttccgcaaactctaa

SEQ ID NO: 483907 - DNA, 1494 bp, Shigella sonnei
atggacgccatgaaatataacgatttacgcgacttcttgacgctgcttgaacagcagggtgagctaaaacgtatcacgctcccggtggatccgcatctggaaatcactgaaattgctgaccgcactttgcgtgccggtgggcctgcgctgttgttcgaaaaccctaaaggctactcaatgccggtgctgtgcaacctgttcggtacgccaaagcgcgtggcgatgggcatggggcaggaagatgtttcggcgctgcgtgaagttggtaaattattggcgtttctgaaagagcccgagccgccaaaaggtttccgcgacctgtttgataaactgccgcagtttaagcaagtattgaacatgccgacaaagcggctgcgtggtgcgccctgccaacaaaaaatcgtctctggcgatgacgtcgatctcaatcgcattcccattatgacctgctggccggaagatgccgcgccgctgattacctgggggctgaccgtaacgcgcggcccgcataaagagcggcagaatctgggcatttatcgccagcagctgattggtaaaaacaaactgattatgcgctggctgtcgcatcgcggcggcgcgctggattatcaggagtggtgtgcggcgcatccgggcgaacgtttcccggtttctgtggcgctgggtgccgatcccgccacgattctcggtgcagtcacccccgttccggatacactttcagagtatgcgtttgccggattgctgcgcggtaccaagaccgaagtggtgaagtgtatctccaatgaccttgaagtgcccgccagtgcggagattgtgctggaagggtatatcgaacaaggcgaaactgcgccggaagggccgtatggcgaccacaccggttactataacgaagtcgatagtttcccggtatttaccgtgacgcatattacccagcgtgaagatgcgatttaccactccacctatactggtcgtccgccggatgaacccgcggtgctgggtgtcgcactgaacgaagtgtttgtgccgattctgcaaaaacagttcccggaaattgtcgatttttacctgccaccggaaggctgttcttatcgtctggcggtagtgacaatcaaaaaacagtacgccggacacgcgaagcgcgtcatgatgggcgtctggtcgttcttacgccagtttatgtacactaaatttgtgatcgtttgcgatgatgacgtcaacgcacgcgactggaacgatgtgatttgggcgattaccacccgtatggacccggcgcgggatactgttctggtagaaaatacgcctattgattatctggattttgcctcgcctgtctccgggctgggttcaaaaatggggctggatgccacgaataaatggccgggggaaacccagcgtgaatggggacgtcccatcaaaaaagatcctgatgtcgtcgcgcatattgacgccatctgggatgaactggctatttttaacaacggtaaaagcgcctga

SEQ ID NO: 483908 - DNA, 702 bp, Shigella sonnei
atgacaaccttaagctgtaaagtgacctcggtagaagctatcacggatactgtataccgtgtccgaatcgtaccagacgcggccttttcttttcgtgctggtcagtatttgatggtagtgatggatgagcgcgacaaacgtccgttttcaatggcttcgacgccggatgaaaaagggtttatcgagctgcatattggcgcttctgaaatcaacctttacgcgaaagcagtcatggaccgcatcctcaaagatcatcaaatcgtggtcgatattccccacggagaagcgtggctgcgcgatgatgaagagcgtccgatgattttgattgcgggcggcaccgggttctcctatgcgcgctcgattttattgacggcgttggcgcgtaatcccaatcgcgatatcaccatttactggggtgggcgtgaagagcaacatctgtatgatctctgcgagcttgaggcgctttcgctgaagcatcctggtctgcaagtggtgccggtggttgaacaaccggaagcgggctggcgtgggcgtactggcaccgtgttaacggcggtcttgcaggatcatggtacgctggcagagcatgatatctatattgccggacgttttgagatggcgaaaattgctcgtgacctgttttgcagtgagcgtaatgcgcgggaagatcgtctgtttggcgatgcgtttgcatttatctga

SEQ ID NO: 483909 - DNA, 1164 bp, Shigella sonnei
atggaacaggttgtcattgtcgatgcaattcgcaccccgatgggccgttcgaagggcggtgcttttcgtaacgtgcgtgcagaagatctctccgctcatttaatgcgtagcctgctggcgcgtaacccggcgctggaagcggcggccctcgacgatatttactggggttgtgtgcagcagacgctggagcagggttttaatatcgcccgtaacgcggcgctgctggcagaagtgccgcactctgtcccggcggttaccgtcaatcgcttgtgtggttcatccatgcaggcactgcatgacgcagcacgaatgatcatgactggcgatgcgcaggcaggtctggttggcggcgtggagcatatgggccatgtgccgatgagtcacggcgtcgattttcaccccggcctgagccgcaatgtcgccaaagcggcgggcatgatgggcttaacggcagaaatgctggcgcgtatgcacggtatcagccgtgaaatgcaggatgcctttgccgcgcggtcacacgcccgcgcctgggccgccacgcagtcgggcgcatttaaaaatgaaatcatcccgaccggtggtcacgatgccgacggcgtcctgaagcagtttaattacgacgaagtgattcgcccggaaaccaccgtggaagccctcgccacgctgcgtccggcgtttgatccagtaagcggtacggtaacggcgggtacatcttctgcactttctgatggtgccgcggccatgctggtgatgagtgaaagccgcgcccgtgaattaggtcttaagccgcgcgcccgtgtgcgttcgatggcggtcgttggttgtgatccgtcgattatgggttacggcccggttcctgcctcgaagctggcgctgaaaaaagcggggctttctgccagcgatatcggcgtgtttgagatgaacgaagcctttgccgcgcagatcctgccgtgcattaaagatctcgggctaatggagcagattgacgagaagatcaacctcaatggtggtgcgatcgcgctgggtcatccgctgggttgttccggtgcgcgtatcagcaccacgttgctgaatctgatggaacacaaagacgttcagtttggtctggcgacgatgtgtatcggtctgggtcagggtattgcgacggtgtttgagcgggtttaa

SEQ ID NO: 483910 - DNA, 2190 bp, Shigella sonnei
atgctttacaaaggcgacaccctgtaccttgactggctggaagatggcattgccgaactggtatttgatgccccaggttcagttaataaactcgacactgcgaccgtcgccagcctcggcgaggccatcggcgtgctggaacagcaatcagatctaaaagggctgctgctgcgttcgaacaaagcagcctttatcgtcggtgctgatatcaccgaatttttgtccctgttcctcgttcctgaagaacagttaagtcagtggctgcactttgccaatagcgtgtttaatcgcctggaagatctgccggtgccgaccattgctgccgtcaacggctatgcgctgggtggtggctgcgaatgcgtgctggcgaccgattatcgtctggcgacgccggatctgcgcatcggtctgccggaaaccaaactgggcatcatgccgggctttggcggttctgtacgtatgccacgtatgctgggcgctgacagtgcgctggaaatcattgccgccggtaaagatgtcggcgcggatcaggcgctgaaaatcggtctggtggatggggtagtcaaagcagaaaaactggttgaaggcgcaaaggcggttttacgccaggccattaacggcgacctcgactggaaagcgaaacgccagccgaagctggaaccgctaaaactgagcaagattgaagccaccatgagcttcaccatcgctaaaggaatggtcgcgcaaacggcggggaaacattatccggcccccatcaccgcagtaaaaaccattgaagctgcggcccgttttggtcgtgaagaagccttaaatctggaaaacaaaagttttgtcccgctggcgcataccaacgaagctcgcgcactggtcggcattttccttaacgatcaatatgtaaaaggcaaagcgaagaaactcaccaaagacgttgaaaccccgaaacaggctgctgtgctgggcgcaggcatcatgggtggcggtatcgcttaccagtccgcgtggaaaggcgtgccggttgtcatgaaagatatcaacgacaagtcgttaaccctcggcatgaccgaagccgcgaaactgctgaacaagcagcttgagcgcggcaagatcgatggtctgaaactggctggcgtgatctccacgatccacccaacgctcgactacgccggatttgaccgcgtggatattgtggtagaagcggttgttgaaaacccgaaagtgaaaaaagccgtactggcagaaaccgaacaaaaagtacgccaggataccgtgctggcgtctaacacttcaaccattcctatcagcgaactggccaacgcgctggaacgcccggaaaacttctgcgggatgcacttctttaacccggtccaccgaatgccgttggtagaaattattcgcggcgagaaaagctccgacgaaaccatcgcgaaagttgtcgcctgggcgagcaagatgggcaagacgccgattgtggttaacgactgccccggcttctttgttaaccgcgtgctgttcccgtatttcgccggtttcagccagctgctgcgcgacggcgcggatttccgcaagatcgacaaagtgatggaaaaacagtttggctggccgatgggcccggcatatctgctggacgttgtgggcattgataccgcgcatcacgctcaggctgtcatggcagcaggcttcccgcagcggatgcaaaaagattaccgcgatgccatcgacgcgctgtttgatgccaaccgctttggtcagaagaacggcctcggtttctggcgttataaagaagacagcaaaggtaagccgaagaaagaagaagacgccgccgttgaagacctgctggcagaagtgagccagccgaagcgcgatttcagcgaagaagagattatcgcccgcatgatgatcccgatggtcaacgaagtggtgcgctgtctggaagagggcattatcgccactccggcggaagcggatatggcgctggtctacggcctgggcttccctccgttccacggcggcgcgttccgctggctggacaccctcggtagcgcaaaatacctcgatatggcacagcaatatcagcacctcggcccgctgtatgaagtgccggaaggtctgcgtaataaagcgcgtcataacgaaccgtactatcctccggttgagccagcccgtccggttggcgacctgaaaacggcttaa

SEQ ID NO: 483911 - DNA, 1332 bp, Shigella sonnei
atggaatcactggcctcgctctataaaaatcatatagctaccttacaagaacggactcgcgatgcgctggcgcgcttcaagctggatgcattacttattcactccggcgagctgttcaacgtttttctcgacgatcatccctatccgtttaaagtgaacccgcaattcaaagcgtgggtgccggtaactcaggtgccaaactgctggttgctggtggatggcgtgaacaagccgaaactgtggttctatctgccggttgattactggcacaacgtcgaaccgctgccgacctccttctggactgaagatgtggaagtgatcgcactgccgaaagccgatggcattggtagcctgctgcccgctgcgcgcggcaatatcggttatatcggtccggtgccggaacgtgcgctgcaactgggtattgaggccagcaacatcaacccgaaaggggtgatcgactacctgcattactaccgctccttcaaaaccgagtacgaactggcctgtatgcgtgaagcgcagaaaatggcggtcaacggtcatcgtgcggcagaagaagcgttccgttctggcatgagcgagttcgatatcaacatcgcctatctgaccgcgaccggtcatcgtgataccgacgtaccttacagcaacattgtggcgcttaacgaacacgcttcggtgctgcattacaccaaactggatcatcaggcaccggaagagatgcgcagcttcctgctggatgccggggccgaatataacggctatgcggctgacctgactcgtacctggtcggcaaaaagcgacaacgactacgcacagctggtgaaagacgtaaatgatgaacaactggcgctgatcgccaccatgaaagcaggcgttagctatgtggattaccacatccagttccatcagcgcatcgccaaactgctgcgtaaacatcaaatcatcaccgatatgagtgaagaagcgatggtcgaaaacgatctcaccggaccgtttatgccgcatggtatcggtcatccgctgggcctgcaggtgcatgacgtagccggttttatgcaggatgatagcggtacacacctcgcggcaccggcaaaatatccgtacctgcgctgcacccgtattctccagccgggtatggtgttaaccatcgaaccgggtatctacttcattgaatcgctactggcaccgtggcgtgaagggcagttcagcaagcacttcaactggcagaaaattgaagcactgaaaccgttcggcggcattcgtatcgaagacaacgtggtgatccacgaaaacaacgtggaaaacatgacccgggatctgaaactggcgtga

SEQ ID NO: 483912 - DNA, 615 bp, Shigella sonnei
atggaaagctggttaattcctgcggcaccggtcacggtcgttgaagagatcaaaaaaagccgcttcataacgatgttggcgcataccgatggcgttgaggcggcgaaagcgtttgttgaatcggtgcgggcagaacaccccgatgcccgccaccattgcgtggcgtgggtggcgggtgcgccggatgattctcaacagctgggtttctctgacgacggggagccggcaggaacggcaggtaaaccgatgctcgcccagctaatgggcagcggcgtcggggaaattacctctgtggtagtgcgctactacggcggcatattgcttggcaccggtgggttagtgaaagcgtatggcggcggcgtgaatcaggcgctgcgccagctaacgacccaacgcaagacgccattaaccgaatatactttgcaatgtgaatatcatcagttaaccggcattgaagcgttgctggggcagtgtgacggcaaaattatcaacagtgattatcaggcattcgttctgctgcgggtggcgcttccggcggcgaaagtggctgaattttccgcaaagctggcggattttagccgtggttcattgcaattgttagcgattgaagaataa

SEQ ID NO: 483913 - DNA, 1452 bp, Shigella sonnei
atgcattttcgcgccattacccgaatcgttggactactggtcatcttattttcagggaccatgattatccctgggctggtagcactcatctaccgggatggagcgggccgcgcttttacccagaccttttttgtcgccctcgccattggttctatgctgtggtggccgaaccgtaaagagaagggcgaactgaaatcccgtgaggggtttctgatagtggtgctgttctggaccgtgctgggtagtgtcggtgcgctcccttttatcttctcggaaagcccgaacctcacgattaccgatgcgttttttgaatctttctctggcctgaccaccaccggggccactacgctggtggggctggattcgctccctcatgccatcctcttttatcgccagatgctgcaatggtttggcgggatggggatcatcgtgttagcggttgcgatactgcctatcctcggcgtgggtgggatgcagctctatcgcgcagaaatgcccggcccgctgaaagataacaaaatgcgcccgcgaattgcggaaacggcgaaaaccctgtggttgatttatgtcttgctgaccgtcgcctgtgcgctggcgttgtggtttgccggaatggatgcctttgatgccatcggccatagctttgcgactatcgctattggcggcttctcgacacatgatgccagtatcggttatttcgacagcccgactattaacactatcattgctatcttcctgctgatctccggctgtaactacggtctgcacttttcactgttaagtgggcgtagtctgaaggtttattggcgcgatccggaatttcgcatgtttatcggcgtacagtttacgctggtggttatttgtacactcgtactgtggtttcataatgtctacagttcggcgctgatgacaattaaccaggcgtttttccaggtggtatcgatggcgacaaccgccgggtttacgactgacagcattgcccgctggccgctctttttgccggtactgcttttatgttcagcttttatcggcggttgcgccgggtcaacgggcggtggcctgaaagtgatccgcatcctgctgctgtttaagcaggggaaccgtgagctgaaacgactggtgcatccgaacgccgtctatagcattaagctggggaatcgcgcactgccggaacgtatcctcgaagccgtttggggatttttctccgcctatgcattggtgtttattgtcagtatgctggcgattatcgccacgggcgtggatgacttttctgcctttgcttcagttgttgcgacattgaataacctggggccagggcttggcgtggttgctgataactttaccagtatgaacccggtggctaaatggatcctgattgccaacatgctgtttggtcgtctcgaggtctttacattgctggtgctctttaccccgactttctggcgtgaatga

SEQ ID NO: 483914 - DNA, 546 bp, Shigella sonnei
gtgaaaacattaattcttttctcaacaagggacggacaaacgcgcgagattgcctcctacctggcttcggaactgaaagaactggggatccagacggatgtcgccaatgtgcaccgcattgaagaaccacaatgggaaaattatgaccgtgtggtcattggtgcttctattcgctatggtcactaccactctgcgttccaggaatttgtcaaaaaacatgcgacgcgactgaattcgatgccgagcgccttttattccgtaaacctggtggcgcgcaaaccggagaagcgtactccacagaccaacagctacgcgcggaagtttctgatgaactcgcaatggcgtcccgatcgctgcgcggtcattgccggggcgctgcgttacccacgttatcgctggtacgatcgttttatgatcaagctaattatgaagatgtcaggcggtgaaacggatacgcgcaaagaagttgtctataccgattgggagcaggtggcgaatttcgcccgagaaatcgcccagttaaccaacaaaccgacgctgaaataa

SEQ ID NO: 483915 - DNA, 4461 bp, Shigella sonnei
atgattgaacgcggtaaatttcgctcactgacgctgattaactggaacggcttttttgcccgaacttttgaccttgacgagctggtcacgacgctttctggcggtaacggggcgggtaaatccaccaccatggcggcgttcgttacggcgctgatccccgacctgaccctgctgcatttccgtaacactacggaagccggggccaccagcggttcgcgcgataaaggtctgcacggtaagctgaaagcgggtgtctgttattcgatgctcgacaccattaactcgcgccaccagcgcgtggtggtcggtgtgcgtctgcaacaggttgccggacgcgatcgtaaagtggatatcaaaccatttgccattcagggactgccgatgtcggtgcagccgacacagctggtgaccgaaaccctgaacgaacgccaggcgcgcgtgctgccgcttaacgagctgaaagacaagctcgaggcgatggaaggcgtgcagtttaaacagttcaactccattaccgattaccactcgctgatgttcgatctgggcatcatcgcgcgtcgtctgcgctccgcatctgaccgtagcaaattctatcgtctgatcgaagcttcgctgtatggcgggatctccagtgccattacccgttctctgcgcgactacctgttgccggaaaacagcggcgtgcgtaaagcgttccaggacatggaagcggcgctgcgtgaaaaccgcatgacgctggaagcgattcgtgtcacccagtcggaccgtgacctgtttaagcatctgatcagcgaagctaccaactacgtggcggcggactacatgcgtcacgccaacgagcgccgtgtccatctcgacaaagccctggagtttcgtcgcgagttacatacttcgcgtcagcaactggcggctgagcagtacaaacacgtcgatatggcgcgtgagctggcagagcacaacggtgccgaaggcgatctggaagcggattatcaggcggccagcgatcacctgaacctggtgcaaaccgcacagcgtcagcaggagaagatcgaacgctacgaagcggatctcgatgagctgcagatccgtctggaagagcaaaacgaagtggtggcagaagccatcgaacgccaggaagagaacgaggctcgcgcggaagctgccgaactggaagtggacgagctgaaaagccagcttgctgactaccagcaggcgctggacgtccagcaaacgcgcgcgatccagtataaccaggcgattgctgcgcttaatcgcgccaaagaactgtgccatctgccggacttaaccgccgacagcgccgccgaatggctggaaaccttccaggcgaaagagcaggaagcgactgaaaaaatgctctctcttgagcagaaaatgagcatggcgcaaaccgcgcacagccagtttgagcaggcttatcagctggtggtggcaatcaacggcccgctggcgcgtaacgaggcttgggatgtcgcccgcgaactgctgcgcgaaggggtcgatcagcgtcacctggcagagcaggttcaaccgttgcggatgcgcttaagtgaactggaacagcgtctgcgcgagcagcaagaagccgaacgcctgctggcagacttctgcaaacgtcagggcaagaattttgatattgatgaactggaagctctgcatcaggagctggaagcgcgcattgcctctctttccgatagcgtgtctaacgcccgtgaagagcgcatggcactgcgccaggaacaggaacagctgcagtctcgcattcagagtttgatgcagcgtgcgccggtttggctggcagcgcaaaacagtctcaaccagttgagcgagcagtgcggtgaagagtttacctccagccaggacgtcaccgaatatctgcaacagttgctggagcgtgagcgagaggcgattgttgaacgcgatgaagtgggcgcgcgcaaaaacgctgtcgatgaagagatcgaacgtttaagccagcctggcggctctgaagatcagcgtctgaacgcgctggcggagcgttttggcggcgtgctgctgtcagaaatttatgacgacgttagcctggaagatgcgccgtacttctcagcgctgtatggcccgtcacgccacgccatcgtggtgccagatctgtcacaggtaactgaacacctggaaggcttgaccgattgcccggaagatctctatttgatcgaaggggatccgcagtcattcgatgacagcgtgttcagcgttgatgagctggaaaaagcggtagtggtgaaaatcgccgatcgtcagtggcgttattcacgtttcccggaagtgccgctgtttggtcgtgctgcgcgtgaaagccgtattgaaagcctccatgccgagcgtgaagtgctttccgaacgcttcgccacgctctcctttgatgtacagaaaacccagcgtctgcatcaggcgttcagccgctttatcggcagtcatctggcggtggcgtttgagtctgacccggaagcagaaatccgtcaactgaacagccgtcgcgtcgaactggagcgggcgttgagtaatcatgaaaatgataaccagcagcagcgtattcagtttgagcaggcgaaagaaggcgttacggcgctgaaccgcattctgccgcgtctcaacctgttggctgatgacagcctggcggatcgcgtcgatgaaatccgcgaacgtctggatgaagcccaggaagccgcgcgttttgttcagcagtttggcaatcaactggcgaaactggaaccgatcgtttcggtattgcagagcgacccggaacagttcgaacagctaaaagaagattacgcgtactctcagcagatgcagcgcgatgcccgtcagcaggcgtttgccctgacggaagtggtgcagcgtcgtgcgcactttagctattctgactcggcagaaatgctgagcggtaatagcgatctcaacgaaaagctgcgtgaacgtctggaacaggcggaagcggagcgtactcgcgctcgtgaagcgttgcgtggtcacgcagcgcagttgagtcagtacaaccaggtgctggcttcgctgaaaagttcttacgacaccaaaaaagagctactcaacgatctgcaacgtgaattgcaggatatcggcgtgcgcgccgatagcggggcagaagagcgggcgcgaattcgccgtgacgagctgcatgcgcaactgagtaataaccggtcccgccgcaaccagctggaaaaagcactgactttctgcgaagcggagatggacaatctgacccgcaaactgcgcaagctggagcgggattactttgagatgcgcgagcaggtagtgaccgccaaagcgggctggtgtgcagtgatgcgcatggtgaaagataacgtcgttgaacggcgcttacaccgtcgcgagctggcttatctctccgctgatgatttgcgctctatgtcggataaggcattgggtgcgctgcgtctggcggtggcggataacgaacatctgcgcgacgtgctgcgcatgtcggaagatccaaaacgtccggaacgtaaaattcagttcttcgtggcggtttatcagcatctgcgtgaacgtattcgtcaggatattattcgtaccgatgatccggtggaagccatcgagcagatggaaatcgaacttagccgactgaccgaggagttaacctcccgcgaacagaaactggcgatcagttcccgcagcgtggcgaacatcattcgcaaaaccattcagcgcgaacagaaccgtatccgtatgctcaaccaggggttgcagaacgtatcgtttggtcaggtgaacagcgtacgtctgaacgtgaacgtgcgtgaaacgcacgccatgctgctggatgtgctctctgaacagcacgagcagcatcaggatctgtttaacagcaaccgtctgaccttctcggaagcgctggcgaaattgtatcagcgtcttaatccgcagattgatatggggcagcgcacgccgcagaccattggcgaagaactgctggattaccgcaactatctggaaatggaagttgaggttaaccgtggttccgatggctggttgcgcgcagagtctggtgcattgtcgaccggtgaggcgattggtaccggtatgtcgattctggtgatggtggtacaaagctgggaagatgaatctcgccgcctgcgcggtaaagatatctctccttgccgcctgctgttcctcgatgaagcagcgcgactggatgctcgttctatcgccacgctgtttgaattgtgtgaacgtttgcaaatgcagctcatcatcgcagcgccggaaaatatcagcccggagaaaggcaccacctataaactggtgcgtaaagtcttccagaataccgaacacgttcacgtcgtcggcctgcgaggatttgcgccgcaactccctgaaacgcttccaggaagtgacgaagcgccttctcaggagagttaa

SEQ ID NO: 483916 - DNA, 705 bp, Shigella sonnei
atgtcatcgacaaatattgaacaagtgatgtcggttaagctggcgcaggcgctggcgaatccgttatttccggcgctggacagcgccttacgttcaggccgccatattggcctcgacgaactggataatcatgcattcctgatggattttcaggaatatctggaagagttttacgcgcgttataacgttgagcttattcgcgcaccggaagggttcttctatttacgcccacgttccaccactcttatcccgcgttccgtcttgtcggaactggatatgatggtcgggaaaatcctctgttatctctatctcagcccggaacggctggcgaatgaggggattttcacccagcaggaactgtacgacgaactgctcaccctggccgatgaagcaaaactgctgaaactggtgaacaaccgttcaaccggttcagacgttgaccgtcagaagttgcaggagaaagtacgttcttcgctcaaccgtctgcgtcgtttaggcatggtgtggtttatgggccacgacagcagcaagtttcgcattaccgaatcggtgttccgcttcggagccgatgtgcgtgctggcgacgatccccgtgaagcacagcgtcgcctgattcgtgatggcgaagcaatgccgattgaaaatcatctgcaactcaacgatgaaaccgaagagaatcagccagatagcggagaggaagaataa

SEQ ID NO: 483917 - DNA, 1323 bp, Shigella sonnei; identical to SEQ ID NO: 472948

SEQ ID NO: 483918 - DNA, 786 bp, Shigella sonnei
atgcaggatcgcaattttgatgatattgcggaaaagttttcccgtaacatttacggcaccaccaaagggcagcttcgacaggctattctgtggcaggatctcgatcgcgtgctggcggaaatgggtccgcaaaaactgcgtgtgctggatgcgggcggtggagaagggcagaccgcaatcaaaatggccgagcgcgggcatcaggtcattttatgcgatctttctgcgcagatgatcgaccgcgcaaaacaggcggcagaagcaaaaggtgtgagcgacaacatgcaatttatacattgcgccgctcaggatgttgcttcgcatttggaaacgcccgttgatctgatattgttccatgcggtgctcgagtgggtggccgatccccgcagtgtattgcagaccctgtggtcagtgttgcgtccaggcggcgtgttgtcgttaatgttctacaatgcgcatggtttgttgatgcataacatggtcgccgggaattttgattacgtgcaggcgggaatgccgaaaaagaaaaaacggacgctttcgccagattatccacgcgacccggcgcaggtttatctgtggctggaagaagctggttggcaaattatgggtaagacaggcgttcgcgtgtttcatgattatctgcgcgagaagcaccagcagcgcgactgctatgaagcattacttgaattagaaacgcgttattgccgtcaggaaccgtatattaccctggggcgttatattcatgtcaccgcgcgcaaaccgcagagcaaggataaagtatga

SEQ ID NO: 483919 - DNA, 780 bp, Shigella sonnei
atgctttttacactgaaaaaagtgattggcaatatgttgctgccacttccgctgatgttgttaattattggcgctggcctggcgctgctgtggtttagccgttttcaaaaaaccgcgaagatttttattagcattgggtggctggcactcttgttattgagtttgcaaccggtagccgaccgcctgctgcgtcccatcgaaagcacctatccgacatggaataattcgcaaaaagtggactatatcgtggtgctcggaggtggttatacctggaacccgcagtgggcaccgagctctaatttaatcaataacagtctgccacgcctgaatgaaggtattcgcttatggcgcgaaaatccgggatcaaaactgatcttcacgggaggcgtagcaaaaaccaatacggtgagtacagcggaagtaggtgccagagttgcgcaatcgctgggcgtgccgcgcgagcaaattatcaccctggatttgccaaaagataccgaagaagaagctgcggcagtgaaacaggcgattggtgacgcccctttcctgctggtgacctccgcatcacatctgccgcgggcgatgatcttttttcagcaggaagagttaaatccgctaccagccccggcgaatcagttggccatcgactcgccgcttaatccgtgggaacgggcaatcccttctccggtctggctgatgcatagcgatcgtgttggctatgaaacgcttggccgcatctggcagtggctgaaaggtccgtcaggcgagccacggcaagagtga

SEQ ID NO: 483920 - DNA, 894 bp, Shigella sonnei; identical to SEQ ID NO: 459679

SEQ ID NO: 483921 - DNA, 747 bp, Shigella sonnei
atgagttttgtggtcattattcccgcgcgctacgcgtccacgcgtctgcccggtaaaccattggttgatattaacggcaaacccatgattgttcatgttcttgaacgcgcgcgtgaatcaggtgccgagcgcatcatcgtggcaaccgatcatgaggatgttgcccgcgccgttgaagccgctggcggtgaagtatgtatgacgcgcgccgatcatcagtcaggaacagaacgtctggcggaagttgtcgaaaaatgcgcattcagcgacgacacggtgatcgttaatgtgcagggtgatgaaccgatgatccctgcgacaatcattcgtcaggttgctgataacctcgctcagcgtcaggtgggtatggcgactctggcggtgccaatccacaatgcggaagaagcgtttaacccgaatgcggtgaaagtggttctcgacgctgaagggtatgcactgtacttctcacgcgccaccattccttgggatcgtgatcgttttgcagaaggccttgaaaccgttggcgataacttcctgcgtcatcttggtatttatggctaccgtgcaggctttatccgtcgttacgtcaactggcaggcaagtccgttagaacacatcgaaatgttagagcagcttcgtgttctgtggtacggcgaaaaaatccatgttgctgttgctcaggaagttcctggcacaggtgtggatacccctgaagatcttgagcgcgttcgcgctgaaatgcgctaa

SEQ ID NO: 483922 - DNA, 183 bp, Shigella sonnei; identical to SEQ ID NO: 459681

SEQ ID NO: 483923 - DNA, 1233 bp, Shigella sonnei
atgtcactgccgcacctctcccttgctgatgcgcgtaatcttcaccttgccgcacaaggcctgttaaacaaaccccgccgtcgagcgtcgttggaggatattccggcaacgatctcccgcatgtccttgctgcaaatcgataccatcaatattgttgcccgtagtccatatctggtgcttttcagtcgtctgggaaattatcctgcccagtggctggatgagtctctggcgcgtggcgaattaatggaatactgggcgcatgaagcctgctttatgccgcgtagcgactttcgtcttattcgccaccgcatgctggcacctgaaaaaatgggctggaaatacaaagacgcctggatgcaggaacatgaggcggaaattgcacagttaattcagcatattcatgataaggggccggtacgttcagccgattttgagcatcctcgtaaaggtgcaagcggctggtgggaatggaagccgcataaacggcatctggaaggtttatttactgccggaaaggtgatggtgattgaacggcgcaacttccagcgcgtttatgatttaacccaccgtgtcatgcctgactgggatgatgagcgcgatctcgtttcgcaaacagaagcagaaatcatcatgctggataacagtgcgcgtagcttgggaatattccgcgaacagtggctggcagattactatcggctgaaacgtccggcactggcggcgtggcgcgaagcgagggctgaacagcagcaaatcattgctgtgcatgttgaaaaattgggcaatctttggctgcatgctgatttgctgccgctactcgagcgtgcgctggccggaaagctcactgcaacgcacagcgcggtactttcgccttttgatcctgttgtctgggatcgcaaacgcgcagagcagctttttgattttagctaccggctggagtgctataccccagcgccgaaacgccagtatggctattttgttctgccattattacatcgtgggcaattagttgggcgaatggatgccaaaatgcatcgccagacaggcatccttgaagttatctctctgtggttacaggaaggcattaaaccaacgacaatgctgcaaaaagggttacgtcaggcgattactgatttcgcgagctggcagcaggcaacgcgggtgacattaggacgctgcccgcaaggtctctttactgattgccgcactggctgggaaatagaccccgtcgcataa

SEQ ID NO: 483924 - DNA, 987 bp, Shigella sonnei
atgatcgaaaaaatctggtctggtgaatcccctttgtggcggctattgctgccactctcctggttgtatggcctggtgagtggcgcgatccgtctttgctataaactaaaactgaagcgcgcctggcgtgcccccgtaccggttgtcgtggttggtaatctcaccgcaggcggcaacggaaaaaccccggtcgttgtctggctggtggaacagttgcaacagcgcggtattcgcgtgggggtcgtatcgcggggatatggtggtaaggctgaatcttatccgctgttattgtcggcagataccacaacagcacaggcgggtgatgaacctgtgttgatttatcaacgcactgatgcgcctgttgcggtttctcccgttcgttctgatgcggtaaaagccattctggcgcaacaccctgatgtgcagatcatcgtaaccgacgacggtttacagcattaccgtctggcgcgtgatgtggaaattgtcgttattgatggtgtgcgtcgctttggcaatggctggtggttgccggcggggccaatgcgtgagcgagcggggcgcttaaagtcggttgatgcggtaatcgtcaacggcggtgtccctcgcagcggtgaaatccccatgcatctgctgccgggtcaggcggtgaatttacgtaccggtacgcgttgtgacgttgctcagcttgaacatgtagtggcgatggcggggattgggcatccgccgcgcttttttgccacgctgaagatgtgtggcgtacaaccggaaaaatgtgtaccgctggccgatcatcagtctttgaaccatgcggatgtcagtgcgttggtaagcgccgggcaaacgctggtaatgactgaaaaagatgcggtgaaatgccgggcctttgcagaagaaaattggtggtatttgcctgtagacgcacagctttcaggtgatgaaccagcgaaactgcttacgcaactaacctcgctggcttctggcaactag

SEQ ID NO: 483925 - DNA, 1749 bp, Shigella sonnei
atgcataacgacaaagatctctctacgtggcagacgttccgccgactgtggccaaccattgcgccttttaaagcgggtctgatcgtggcgggcgtagcgttaatcctcaacgcagccagcgataccttcatgttatcgctccttaagccacttcttgatgatggctttggtaaaacagatcgctccgtgctggtgtggatgccgctggtggtgatcgggctgatgattttacgtggtatcaccagctatgtctccagctactgtatctcctgggtatcaggaaaggtggtaatgaccatgcgtcgccgcctgtttggtcacatgatgggaatgccggtttcattttttgacaaacagtcaacgggtacgctgttgtcacgtatcacctacgattccgaacaggttgcttcttcttcttccggcgcactgataacggttgtgcgtgaaggtgcgtcaatcatcggcctgttcatcatgatgttctattacagttggcaactgtcgatcattttgattgtgctggcaccgattgtttcgattgcgattcgcgttgtatcgaagcgttttcgcaacatcagtaaaaacatgcagaacaccatggggcaggtgaccaccagcgcagaacaaatgctgaagggccacaaagaagtattgattttcggtggtcaggaagtggaaacgaaacgcttcgataaagtcagtaaccgaatgcgtcttcaggggatgaaaatggtttcagcctcttccatctctgatccgatcattcagctaatcgcctctttggcgctggcgtttgttctgtatgcggcgagcttcccaagtgttatggataacctgactgccggtacgattaccgttgttttctcttcaatgattgcactgatgcgtccgctgaaatcgctgaccaacgttaacgcccagttccagcgcggtatggcggcttgtcagacgctgtttaccattctggacagtgagcaggagaaagacgaaggtaagcgcgtgatcgagcgtgcgactggcgacgtggaattccgcaatgtcacctttacttatccgggacgtgacgtgcccgcattgcgtaacatcaacctgaaaattccggcagggaaaacggtcgctctggttggacgctctggttcaggtaaatcaaccatcgccagcctgatcacgcgtttttacgatattgatgaaggcgaaatcctgatggatggtcacgatctgcgcgagtataccctggcgtcgttacgtaaccaggttgctctggtgtcgcagaatgtccatctgtttaacgatacggttgctaacaacattgcttacgcacggactgaacagtacagccgtgagcaaattgaagaagcggcgcgtatggcctacgccatagacttcatcaataagatggataacggtctcgatacagtgattggtgaaaacggcgtgctgctctctggcggtcagcgtcagcgtattgctatcgctcgagccttgttgcgtgatagcccgattctgattctggacgaagctacctcggcgttggataccgaatccgaacgtgcgattcaggcggcactggatgagttgcagaaaaaccgtacctctctggtgattgcccaccgcttgtctaccattgaaaaggcagacgaaatcgtggtcgttgaggatggtgtcattgtggaacgcggtacgcataacgatttgcttgagcaccgcggcgtttacgcgcaacttcacaaaatgcagtttggccaatga

SEQ ID NO: 483926 - DNA, 2265 bp, Shigella sonnei
atgaaaataacgacagtcgacgtatgcataatttgcggaatttttccgttgctgattttgccccaattgcctgggacattagcccttgcgtttctgactctcttcgcctgcgtactggcatttatacctgttaaaaccgtccgttatatcgcgctgacgttgctgtttttcgtttggggcatattatcagcaaagcaaattttgtgggcaggagaaaccttaactggcgcgacgcaggatgcaattgttgagatcactgctactgacggcatgaccactcattacggtcaaattacttatctacaaggtcgacgtatattccctgcgccaggccttgtgctgtatggcgaatatcttccgcaagcggtttgtgccggacaactgtggtcaatgaaactcaaagttcgtgccgttcatggtcaacttaatgatggcggctttgatagccagcgttatgccattgcccagcatcagccgctcaccggccgctttctgcaggcaagtcttattgaaccgaattgtagcctgcgtgcacagtatctggcgtcactacaaacaacgctgcaaccctatccgtggaatgcggttattcttggtttaggtatgggggaacggttatccgtccccaaagaaatcaaaaatatcatgcgcgatactggaacggcgcatttaatggcgatatcgggattgcacatcgcttttgcggtgttgctggctgccggactcattcgcagtggacaaatttttctgcctgggcgctggatccactggcaaataccattaattggtgggatctgctgtgctgctttttatgcctggttgacgggaatgcaacctcctgcattgcgtaccgtggtggcgcttgctacgtggggaatgcttaagttaagtgggcgacagtggagtggctgggatgtatggatatgttgtctggcggcaattttgctgatggatcctgttgccattctctcgcaaagtttatggctctctgccgctgcggtcgcggcactgattttttggtatcagtggtttccctgtcctgagtggcaactgccgccggtattgcgtgcagttgtttccctcatccatctgcaactgggtatcacacttctgcttatgcccgtgcaaatcgtcatatttcatggcattagtctgacctcgtttattgcaaatctattagcaattcccttggtgacatttatcacggttccgttgatcctcgccgcgatggttgtgcatttaagcgggccgttaatcctggagcaagggttatggtttcttgccgaccggtctttggctttacttttctgggggttaaagagtttgccagaagggtggatcaacattgctgaacgttggcaatggctatcattttccccatggttcttactggtggtatggcgattaaacgcctggcgaacgttgccagcaatgtgtgtggctgtaggcttgctgatgtgctggccgctgtggcaaaaacctcgacctgacgagtggcaggtgtacatgcttgatgtcgggcaagggctggcaatggtgatagccagaaacggcaaagcgattctctatgacacaggactggcctggcccgaaggggatagtgggcaacaactgattatcccctggctccactggcataatcttgaaccggaaggcgttattctgagtcatgaacatctggatcaccggggagggctggactcaatattgcacacatggccgatgttatggatcagaagtccgttaaactgggaacatcatcagccctgtgtgcgtggcgaagcgtggcaatggcaaggattgcgtttcagcgtgcactggcctttacaagctagcaacgataaaggaaataaccattcctgtgtggttaaggttgatgacgggacgaatagcattcttctaaccggtgatattgaagtccccgctgaacaaaagatgctaagccgttactggcagcaagtgcagacaacattgcttcaggtacctcaccatggcagtaatacctcatcatcgttgccattaattcagcgagtgaatggaaaagtggcactcgcatcggcatcgcgctataacgcatggcgattgccctcaagcaaagttaaacatcgctatcaacaacagggttataagtggcttgatactcctcatcaggggcaaatagcggtcaatttttcagcgcaaggctggcggattagcagcctcagggagcaaattttacctcgttggtatcatcagtggtttggcgtgccagtggataacgggtag

SEQ ID NO: 483927 - DNA, 285 bp, Shigella sonnei; identical to SEQ ID NO: 459702

SEQ ID NO: 483928 - DNA, 1674 bp, Shigella sonnei
atgactgaatcttttgctcaactctttgaagagtccttaaaagaaatcgaaacccgcccgggttctatcgttcgtggcgttgttgttgctatcgacaaagacgtagtactggttgacgctggtctgaaatctgagtccgccatcccggctgagcagttcaaaaacgcccagggcgagctggaaatccaggtaggtgacgaagttgacgttgctctggacgcagtagaagacggcttcggtgaaactctgctgtcccgtgagaaagctaaacgtcacgaagcctggatcacgctggaaaaagcttacgaagatgctgaaactgttaccggtgttatcaacggcaaagttaagggcggcttcactgttgagctgaacggtattcgtgcgttcctgccaggttctctggtagacgttcgtccggtgcgtgacactctgcacctggaaggcaaagagcttgaatttaaagtaatcaagctggatcagaagcgcaacaacgttgttgtttctcgtcgtgccgttatcgaatccgaaaacagcgcagagcgcgatcagctgctggaaaacctgcaggaaggcatggaagttaaaggtatcgttaagaacctcactgactacggtgcattcgttgatctgggcggcgttgacggcctgctgcacatcactgacatggcctggaaacgcgttaagcatccgagcgaaatcgtcaacgtgggcgacgaaatcactgttaaagtgctgaagttcgaccgcgaacgtacccgtgtatccctgggcctgaaacagctgggcgaagatccgtgggtagctatcgctaaacgttatccggaaggtaccaaactgactggtcgcgtgaccaacctgactgactacggctgcttcgttgaaatcgaagaaggcgttgaaggtctggtacacgtttccgaaatggattggaccaacaaaaacatccacccgtccaaagttgttaacgttggcgatgtagtggaagttatggttctggatatcgacgaagaacgtcgtcgtatctccctgggtctgaaacagtgcaaagctaacccgtggcagcagttcgcggaaacccacaacaagggcgaccgtgttgaaggtaaaatcaagtctatcactgacttcggtatcttcatcggcctggacggcggcatcgacggcctggttcacctgtctgacatctcctggaacgttgcaggcgaagaagcagttcgtgaatacaaaaaaggcgacgaaatcgctgcagttgttctgcaggttgacgcagaacgtgaacgtatctccctgggcgttaaacagctcgcagaagatccgttcaacaactgggttgctctgaacaagaaaggcgctatcgtaaccggtaaagtaactgcagttgacgctaaaggcgcaaccgtagaactggctgacggcgttgaaggttacctgcgtgcttctgaagcatctcgtgaccgcgttgaagacgctaccttggttctgagcgttggcgacgaagttgaagctaaattcaccggcgttgatcgtaaaaaccgcgcaatcagcctgtctgttcgtgcgaaagacgaagctgacgagaaagatgcaatcgcaactgttaacaaacaggaagatgcaaacttctccaacaacgcaatggctgaagctttcaaagcagctaaaggcgagtaa

SEQ ID NO: 483929 - DNA, 684 bp, Shigella sonnei
atgacggcaattgccccggttattaccattgatggcccaagcggtgcagggaaaggcaccttgtgtaaggctatggcggaagcattgcaatggcatctgctggattcgggtgcaatttatcgcgtactggcgttggcggcattacatcaccatgttgatgttgcgtcagaagatgcgctggtaccgctggcatcccatctggatgtacgttttgtgtcaaccaatggcaatctggaagtgatcctcgaaggggaagatgtcagcggcgaaattcgtactcaggaagtggcgaatgcagcttcacaagtcgcggcattcccacgcgttcgtgaagcattattgcgtcgccaacgcgcgtttcgcgaattaccaggcctgattgccgatggccgcgacatgggaacggtggtattccctgatgcgccagtgaaaattttccttgacgcctcctcggaagaacgtgcgcatcgccgcatgctacagttgcaggagaagggctttagtgttaactttgagcgccttttggccgagatcaaagaacgcgacgaccgcgatcgtaaccgagcggtagcgccactggttccggcatccgatgctttagtgttggattccaccaccttaagcattgagcaagtgattgaaaaagcgctacaatacgcgcgccagaaattggctctcgcataa

SEQ ID NO: 483930 - DNA, 765 bp, Shigella sonnei
atgaagaatactaaattactgctggcgattgcgacctctgcagcattactgacagggtgtcaaaatacccacggtattgataccaatatggctatcagctccggtttaaatgcctataaagcagcaacattaagcgatgccgatgcaaaagcgattgccaatcagggctgtgccgaaatggacagcggcaatcaagtcgcaagtaaatccagcaagtacggtaaacgtctggcaaaaatcgccaaagcattgggtaacaatattaatggcacgccggtcaactataaggtttatatgaccagcgacgtcaacgcatgggcgatggcgaacggctgtgtccgtgtctacagtggcctgatggacatgatgaatgacaacgaaattgaaggtgttctgggccatgaactgggccacgtcgcgttgggtcactcgctggctgaaatgaaagcttcttatgcgatcgttgccgcacgcgatgccatttcagctaccagcggtgtggcttcccagctttcccgctcacaattgggtgatatcgcagaaggcgctattaatgctaaatactcccgtgataaagagtccgaagcagatgatttctcctttgatctgttgaagaaacgtggcatcagcacccaggggctggttggcagctttgaaaaactggctagtctggatggcggtcgcacccagtccatgtttgactctcacccaccatcaacagagcgtgcgcaacacatccgtgatcgtatcgcctctggtaagtaa

SEQ ID NO: 483931 - DNA, 333 bp, Shigella sonnei
atggctggttggtttgaactcagtaagagcagtgataatcagttccggtttgtgctaaaagcgggcaatggtgagactatcctcaccagcgagctgtatacatcaaaagcctctgcggaaaagggcatcgcgtcggtgcgtagcaacagcccgcaagaagaacgctatgagaaaaaaacggcaagtaacggcaaattctatttcaatctgaaagccgccaatcatcaaattatcggctccagccagatgtacgccaccgcgcaatctcgtgaaaccggaattgcctccgttaaagccaatggcacaagccagacggtgaaagacaatacgtaa

SEQ ID NO: 483932 - DNA, 1362 bp, Shigella sonnei
atgtttaaaccggaactcctttccccggcgggaacgctgaaaaatatgcgttacgctttcgcttatggcgcagatgctgtttatgcgggccagccgcgttactccctgcgtgtgcgcaacaacgaattcaaccacgaaaatcttcagctcggcatcaatgaagcccacgcgctggggaaaaagttttatgtcgtggtcaacattgcaccgcacaacgccaagctgaaaacctttatccgtgacctgaaaccggtggtggaaatggggccggatgcgctgattatgtccgatccagggctgattatgctggtgcgtgagcacttccctgaaatgccgatccacctctcggtgcaggctaacgccgtaaactgggcgacggtgaaattctggcagcaaatgggcctgacccgcgtgatcctctctcgcgagctgtcgctggaagagattgaagagatccgcaatcaggtgccggatatggagattgagatcttcgttcacggtgcgctgtgcatggcctactccggtcgctgcctgctctctggctatatcaacaagcgcgatccgaaccagggtacctgcaccaacgcctgccgctgggagtacaacgtccaggaagggaaagaagatgacgttggcaacatcgtacacaagtacgagccgattccggtgcaaaatgttgagccgacgctaggtatcggcgcgccaaccgacaaagtgtttatgatcgaagaagcccagcgtccgggcgagtatatgaccgcgtttgaagatgagcacggcacttacatcatgaactcgaaagatctgcgcgccatcgcccatgtagaacgcctgaccaaaatgggcgtgcattcgctgaaaatcgaaggccgtactaaatctttctactattgcgcacgcaccgcacaggtttatcgtaaagctatcgatgatgccgctgcgggcaaaccgttcgataccagcctgctggaaactctggaaggtctggcgcatcgtggctataccgaaggtttcctgcgtcgtcatactcacgacgattatcagaactacgaatacggttattcagtttctgaccgccagcagtttgttggtgagtttaccggtgagcgcaagggggacctcgcagcggtagcggtgaaaaataaattctccgttggcgacagccttgagctgatgacgccgcaaggcaacattaactttacccttgagcacatggaaaacgccaaaggtgaagcgatgccggtcgcaccaggcgatggttatactgtgtggctcccggtcccgcaggatcttgagctaaattacgcgctgctgatgcgtaatttctccggggaaaccacgcgtaacccacacggtaagtga

SEQ ID NO: 483933 - DNA, 318 bp, Shigella sonnei
atgaaaaagatagctgctatatcattaattagtatttttcttatatctggttgtgctgtgcataatgatgaaacaagtatcggtaaatttggtcttgcatataaaagtaatattcagcgtaaactcgataaccaatactacaccgaagccgaagcttctttagctaggggaagaatatctggtgcagaaaatatagtaaaaaatgatgcagcccatttctgtgttactcagggcaaaaaaatgcagatagttgacctgaagacagaaggtgcaggattacatggcgtcgctcgtctgacattcaaatgtggagagtga

SEQ ID NO: 483934 - DNA, 900 bp, Shigella sonnei
atggcagaatttcccgccagcttactgattcttaatggcaaaagtactgacaatctacccttgcgcgaagcaattatgctgttgcgtgaggaaggaatgacgatccatgtgcgggtcacctgggagaaaggcgatgccgcacgatatgtagaggaggcccggaagttgggcgtcgcaacggtgattgccggtggtggcgatggcaccattaatgaagtttctacggcgttgattcagtgtgagggggatggcatacccgcgctgggaattttgccattaggaaccgccaatgattttgccaccagtgtagggattcctgaggcactggataaggcgctgaaactggcaattgccggtaacgccattgcgatagatatggcgcaggtcaacaaacaaacctgttttattaatatggcgacaggcggatttgggacgcgtattaccacagaaacgccggaaaaattaaaagccgcgctgggtggcgtctcttacatcattcatggcttaatgcgcatggatactctgcaaccggaccgttgtgaaatccgcggtgaaaactttcactggcaaggtgacgccctggtcattggtattggtaacgggcgtcaggccggtggcggtcagcaattgtgtccgaacgcgttaattaacgatggcttgctgcaactgcgcatttttaccggcgatgaaattcttccggctctcgtatcaaccttaaaatctgacgaagataacccgaatattatcgaaggcgcttcgtcgtggtttgatatacaagccccacacgaaatcacttttaatcttgatggcgaaccgttgagcggacaaaactttcatattgaaatacttccggcggcgttgcgttgtcgattaccaccagattgtctattattgcgttaa

SEQ ID NO: 483935 - DNA, 780 bp, Shigella sonnei
atgacgatgaattcattcgagcgaaggaataagatcatccaattagtgaatgaacagggaaccgtgcttgttcaggatctggcgggagtatttgctgcctcggaagcgacaatccgtgccgatttgcgctttctcgaacaaaaaggcgtggttacgcgctttcatggcggtgcggcgaaaataatgtccggtaatagtgaaaccgagacccaggaagtcgggtttaaagagcgatttcagctcgccagcgcgccaaaaaacagaatagcgcaggcggcagtcaaaatgatccatgaagggatgaccgttattctcgacagcggaagtacgacaatgcttatcgccgaaggattaatgaccgctaaaaatatcacggtgattaccaacagtctcccggcagcgtttgccctttccgaaaataaagacattactctggtcgtctgtggtggcacggtccgccataaaacgcgctcgatgcatggttccattgccgagcgttcattgcaggatattaatgccgatttaatgtttgtcggtgctgatggtattgatgcggttaatggtattacgacctttaatgaaggttattcgattagcggtgcgatggtcaccgccgctaataaagtgattgccgttctcgattcatcgaaatttaaccgtcgcggttttaatcaggtactgccaatcgaaaaaattgacattattattaccgatgatgctgtatcagaggtggataaactggcattgcagaagacacgggtaaaattaattacggtgtag

SEQ ID NO: 483936 - DNA, 1041 bp, Shigella sonnei
atgaaatcaatggtgaatgatactgatggtatcgtgcgcgttgcagaaagcgtcattcctgaaattaaacatcaggatgaggtgcgggtaaaaattgccagctcgggcttatgtggttccgatttacccaggatatttaaaaatggtgcacattattatccaataacgttaggccatgaatttagcggctatattgatgcggtgggatccggtgttgatgatttacaccctggcgatgcggttgcctgtgtgccgttattaccctgttttacttatccagagtgtttgaaagggttttattcccagtgcgcaaaatatgattttattggctcgcggcgtgatggtggatttgctgaatatattgtcgttaagcgaaaaaatgtctttgctctacccacggatatgcctattgaggatggggcttttattgagccgattaccgttggcctgcatgcttttcatttagcgcaaggttgtgagaataaaaacgttattattattggtgccggaaccattggcctgctggctattcagtgcgctgtcgcgctgggagcaaagagtgtgacggcgatcgacattagctcagaaaaactggcattggcaaaatctttcggtgcgatgcaaacatttaacagtagcgaaatgagcgcgccgcaaatgcagagcgttttacgcgaactgcgctttaatcagcttatcctcgagacggctggcgtaccgcaaactgtcgaactggcggtagagattgccggtcctcatgcccaactggcgctggtgggcacgttgcatcaggatctgcatttaacatcggcaacgtttggcaaaatattgcgtaaagagctgacggttatcggcagttggatgaactattccagcccttggccggggcaggagtgggaaacggcgagccggttgctgacagaacgtaagttaagcctggagccattaatcgctcaccgtggaagctttgaaagcttcacccaggcggtgcgtgacatcgctcgtaatgccatgccgggcaaagtgttgctcattccatga

SEQ ID NO: 483937 - DNA, 1356 bp, Shigella sonnei
atgttttcagaagtcatgcgttatattctcgacctcggccctacggtgatgcttccgattgtcatcattattttttctaaaatattaggcatgaaggcaggcgattgctttaaagcgggtctgcatatcgggattggctttgttggcattggccttgtgattggcttaatgctggattccattggtccggcggcgaaagcgatggcggaaaatttcgacctgaatctgcatgtggtcgatgtcggctggccgggctcttcaccaatgacctgggcgtcgcaaattgcgctggtggcgattccgattgcgattctggttaacgtggcgatgttactgacccgtatgacgcgggtggtaaatgttgatatctggaatatctggcatatgaccttcaccggcgcgttgctgcatctggcaaccggttcatggatgatagggatggcaggtgtggtaattcacgcggcgtttgtttataagctcggcgactggtttgcccgcgatacccgaaatttctttgagctggaaggtattgctattccgcacggtacgtcggcgtatatggggccgattgcggtgctggtcgatgctatcatcgagaaaatcccaggcgttaaccgaattaaatttagcgccgacgatattcagcgcaaatttggtccatttggcgagcctgtcaccgtgggttttgtgatggggctgattatcggcatcctcgccggttacgatgtcaaaggtgtattgcagctggcggtaaaaacggcggcagttatgctgctgatgccacgggtgattaaacccatcatggatggtttaacgcccatcgctaagcaggcccgtagtcgtttacaggcgaagttcggcggtcaggagttcctgattggcctggatcccgcattactgctggggcatacggcggtggtatcggcaagcctgatttttatcccgctcaccattttaattgctgtttgtgttccgggtaatcaggtactgccgtttggcgatcttgccaccatcggcttcttcgtggcgatggcggtcgcggtgcatcgtggaaatctgttccgcaccttaatctcgggtgtcatcattatgagcatcaccctgtggatcgcgacgcaaactattggtttgcacacccaactggcggctaatgctggggcgttaaaagccgggggtatggtggcttcaatggatcagggcggttctcccattacctggttactgattcaggttttctccacgcaaaatattcccggtttcattattatcggcgcaatttatcttaccggtattttcatgacctggcgtagagcgcgtggttttattaaacaagagaaaaccgttctcgcagaataa

SEQ ID NO: 483938 - DNA, 285 bp, Shigella sonnei
atgaaacgcaagattattgtcgcttgcggaggcgcggttgcgacctctacgatggcggcggaagaaattaaagagttgtgtcagaatcatagtattcctgttgaattaatccagtgtcgggttaatgaaatagaaacctatatggatggtgtgcatttgatatgcaccactgccaaagtggatcgtagttttggcgatattccgttagttcacggcatgccttttatttctggtgtcggtatcgaagcattacaaaataaaattctgactatcttacaggggtga

SEQ ID NO: 483939 - DNA, 453 bp, Shigella sonnei
atgactaacctgtttgttcgtagcggaatttcttttgtcgatcgtagcgaagttttaacccatatcggtaatgagatgctcgccaaaggtgtggttcatgatacctggccacaggcattaattgccagagaagcagaattccctaccgggataatgcttgagcagcacgccattgcaataccgcattgtgaggcgattcatgctaagtcgtcagccatttatctgttaaggccaacaaataaagttcattttcagcaagcggatgatgataacgacgtggaggtatcgttggttattgcgttgattgtggagaatccgcagcagcaattgaaacttttacgctgtttatttggcaagttacaacagcccgatatcgtcgagacactaatcactcttcctgaaacccagttaaaggaatacttcacaaagtatgttttagattcagacgaataa

SEQ ID NO: 483940 - DNA, 801 bp, Shigella sonnei
gtggcgacagattgccagcgtgagcaactgagctatgtcattggcactgaagttccggttccgggcggtgaggccagcgccattcagtcagtacacatcacccatgttgaagatgccgccaatactttacgtacgcatcaaaaggcctttattgcccgtgggctgacagaggcgttaacacgcgtgattgccatcgtggtgcagccgggcgtggaatttgatcacagcaatattatccattatcagccgcaggaagcgcagccgctggcgcaatggatagaaaacacccgaatggtttatgaagcacattctaccgattaccagacccggacggcttattgggaattagtccgcgatcactttgcaatattgaaagtcggtcccgcattaacctttgctttacgcgaggcgatatttgcactggcacaaattgagcaggaacttatcgcccctgaaaatcgcagcggttgcctggcggtaattgaagaagtgatgctcgacgaaccgcaatactggaaaaaatattatcgtacgggttttaacgattcattactggatattcgttacagcctgtcggatcgtattcgttattactggccgcatagtcggattaaaaatagcgtcgaaacgatgatggtgaatcttgaaggcgtggacatcccactgggcatgattagtcagtatcttcccaaacaatttgaacgcattcagtccggggaattatcagcaataccgcatcagctgattatggataaaatttatgatgttttgcgcgcctatcgctacggctgtgcggaataa

SEQ ID NO: 483941 - DNA, 480 bp, Shigella sonnei
atgaaaacgttaattgcccggcataaagctggtgaacatatcggcatatgttcagtctgttctgcccatccgttggttatcgaagcggcgctggcatttgatcgcaacagcacgcgcaaagtgctgattgaagcaacgtcaaaccaggtcaatcaatttggcggttataccggaatgacaccggcagactttcgcgaatttgtttttacgattgccgataaagtcggatttgcacgcgaacgcattattctcggcggcgatcatctggggccaaactgctggcagcaagaaaatgcggatgcggcgatggaaaaatccgtcgagctggtaaaagcatatgttcgtgctggcttcagtaaaattcatcttgatgcgtcaatgtcctgcgcgggggatcccataccgttagcaccagaaacggttgcggaacgagctgctttgctttgctgcggaaagtgtggcgacagattgccagcgtga

SEQ ID NO: 483942 - DNA, 855 bp, Shigella sonnei
atgtacgtggtatcgacaaagcagatgctgaacaacgcacagcgcggcggttatgcggttccggcattcaatattcacaatctcgaaacgatgcaagtggtggtggaaaccgctgccaacctgcatgcgccggtcatcatcgccggaacgcctggcacattcacttatgctggtacagaaaatctgttggcgctggtcagcgcgatggcgaagcaatatcaccatccactggcaattcatctcgaccatcacacgaaatttgacgatatcgctcagaaggttcgttctggcgtgcgctcagtcatgattgacgcctcgcatttgccttttgcgcaaaatatttcacgggtcaaagaggtggtggatttttgccatcgctttgatgtcagcgtcgaagcggagctggggcaacttggcggccaggaagatgatgtgcaagtcaatgaagccgatgttttttataccaaccccgctcaggcgcgtgaatttgccgaggcaaccggaattgattccctggcggtcgccatcggcacggctcatgggatgtatgccagcgcaccggcgcttgatttttctcgactggagaacattcgccagtgggtgaacttaccgctggtgctgcatggcgcgtcagggttatcgactaaggatattcagcaaaccatcaaactggggatatgcaaaatcaacgttgcaacggagctgaaaaatgccttctcgcaggcgttaaaaaattacctgaccgagcaccctgaagcgaccgatccccgggattatttgcagtcggctaaatccgcaatgcgcgatgtggtgagcaaagtgattgccgattgtggctgcgagggcagggcataa

SEQ ID NO: 483943 - DNA, 1053 bp, Shigella sonnei
atgacagatattgcgcagttgcttggcaaagacgccgacaaccttttacagcaccgttgtatgacaattccttctgaccagctttatctccccggacatgactacgtagaccgcgtaatgattgacaataatcgcccgccagcggtgttacgtaatatgcagacgttgtacaacaccgggcgtctggctggcacaggatatctttctattctgccggttgaccagggcgttgagcactctgccggagcttcatttgctgctaacccgctctactttgacccgaaaaacattgttgaactggcgatcgaagcgggctgtaactgtgtggcgtcaacttacggcgtgttggcgtcggtatcgcggcgctatgcgcatcgcattccatttctcgtcaaacttaatcacaacgagacgctaagttacccgaatacctacgatcaaacgctgtatgccagcgtggagcaggccttcaacatgggcgcggtggcggttggtacgactatctattttggctcggaagagtcacgtcgccagattgaagaaatttctgcggcctttgaacgcgcgcacgagctgggcatggtgaccgtgctgtgggcctatttgcgaaactccgcctttaagaaagatggcgttgattaccatgtttccgccgacctgaccggtcaggcaaaccatctggcggcaaccatcggtgcagatatcgtcaaacaaaaaatggcggaaaataacggcggctataaagcaattaattacggttacaccgacgatcgtgtttatagcaaattgaccagcgaaaacccgattgatctggtgcgttatcagttagctaactgctatatgggccgggctgggttgataaactccggcggtgctgcgggcggtgaaactgacctcagtgatgcagtgcgtactgcggttatcaacaaacgcgctggcggaatggggctgattcttggacgtaaagcgttcaagaaatcgatggctgacggcgtgaaactgattaacgccgtgcaggacgtttatctcgatagcaaaattactattgcctga

SEQ ID NO: 483944 - DNA, 1278 bp, Shigella sonnei
atgaaaacaacagcaaagctgtcgttcatgatgtttgttgaatggtttatctggggcgcgtggtttgtgccattgtggttgtggttaagtaaaagcggttttagtgccggagaaattggctggtcgtatgcctgtaccgccattgcggcgatcctgtcgccaattctggttggctccatcactgaccgctttttctcggcgcaaaaagtgctggcggtattgatgttcgcaggcgcgctgctgatgtatttcgctgcgcaacagaccacttttgccgggttctttccgttactgctggcttactctctaacctatatgccgaccattgcgctgactaacagcatcgcttttgccaacgtgccggatgtggagcgtgatttcccgcgcattcgtgtgatgggcactatcggctggattgcctccggtctggcatgtggtttcttgccgcaaatactggggtatgccgatatctcaccgactaacatcccgctgctgattaccgccggaagttctgctctgctcggtgtgtttgcgtttttcctgcccgacacgccaccaaaaagcaccggcaaaatggatattaaagtcatgctcggcctggatgcgctgatcctgctgcgcgataaaaacttcctcgtctttttcttctgttcattcctgtttgcgatgccactggcgttctattacatctttgccaacggttatctgaccgaagttggcatgaaaaacgccaccggctggatgacgctcggccagttctctgaaatcttctttatgctggcattgccgtttttcactaaacgctttggtatcaaaaaggtattattgcttggtctggtcaccgctgcgatccgctatggcttctttatttacggtagtacggatgaatatttcacctacgcgttactgttcctcggtattttgcttcacggcgtaagttacgatttttactacgttaccgcttacatctatgtcgataaaaaagcccccgtgcatatgcgtaccgctgcgcaggggctgatcacgctctgctgccagggcttcggcagtttgctcggctatcgtcttggcggtgtgatgatggaaaagatgttcgcttatcaggaaccggtaaacggactgactttcaactggtccgggatgtggactttcggcgcggtgatgattgccattatcgccgtgctgttcatgatttttttccgcgaatccgacaacgaaattacggctatcaaggtcgatgatcgcgatattgcgttgacacaaggggaagttaaatga

SEQ ID NO: 483945 - DNA, 1005 bp, Shigella sonnei
atgaaaacagaacgtattctcggtgctctttatgggcaggcgttaggggatgcgatggggatgccctccgagctttggccacgcagccgcgttaaagcacactttggctggattgaccgttttcttcctggaccaaaggagaataacgcggcctgttattttaaccgcgccgaattcaccgacgatacctcgatggcgctgtgtctggcggatgcgttactggaacgtgaaggcaagatcgatccggatctgattgggcgtaatattctcgactgggcgctgcgtttcgacgcctttaacaaaaacgtactaggtccgacctcgaagattgcgcttaacgccattcgcgacggtaaacccgttgctgaactggaaaacaacggcgtgaccaacggcgcagcgatgcgcgtctcgccattaggttgtttgcttccggcgcgtgatgttgattcctttattgatgatgtagcgctggcgtccagcccgacccataaatccgatctggcggttgcaggcgcggtagtcatcgcatgggcgatttctcgtgccattgacggagaaagctggtcagcgattgttgattccctgccttcaattgcgcgacatgcacagcaaaaacgcatcactacgttcagcgcctcactggcggcgcggctggagattgcgctgaaaattgtgcgcaatgccgacggcaccgaatccgccagcgaacagctttaccaggtcgttggcgcaggtaccagcactattgagtccgttccgtgcgccattgcgctggttgaactagcacaaaccgacccgaatcgctgcgccgtcctgtgcgctaaccttggcggcgacacagacaccatcggtgctatggcgacggcaatttgcggcgcgttgcatggcgttaacgctatcgatcctgcgttaaaggcggaactggatgcggtaaatcagcttgatttcaaccgctatgccacagcgctggcgaaatatcgtcaacaacgggaggcggtatga

SEQ ID NO: 483946 - DNA, 966 bp, Shigella sonnei
atgagcggcgctcgattacacacgctgctgcctgaattaaccacgcgtcagccggtgatggtcgtcggcgcggcggtcattgacgtgatcgccgacgcttatgccctcccctggcgtgggtgcgatatcgaactgaaacagcagagcgttaacgttggcggctgcgcactgaatattgccgtggcgttaaagcgcctcggcatcgaagcgggtaatgccttgccgctcggtcagggcgtgtgggcggagattattcgcaaccggatggcaaaagagggcttaatcagcctgatcgataacgccgaaggtgataacggctggtgtctggcgctggttgagccggatggcgaacgcacttttatgtcattcagcggtgtggaaaatcagtggaatcgccagtggctggcgcgattaaccgttgcgcctggcagcctgctctatttttccggttatcaactggcctcgccctgcggcgaattgttagtggaatggctggaagaactgcaagacgtgacgccgtttatcgattttggcccacgtattggcgatatcccggatgcattactggcgcggatcatggcctgtcgacctttagtgtcgctcaatcgtcaagaggctgagattgccgccgaacgttttgctttatccgcagagataacaacacttggcgagcaatggcaggagaaatttgccgcgccgttgatcgttcgtctcgataaagaaggcgcatggtatttcagcaacgacgcttctggctgcattccggcatttccaacgcaagttgtagacaccattggggcgggcgacagtcatgcaggtggcgtacttgccgggctggcctctggtctgccactggcggatgccgtattactgggcaatgcagtggcgtcgtgggttgtcgggcatcggggcggtgattgtgcgccaacgcgcgaggaactactcctcgcacacaaaaacgtatag

SEQ ID NO: 483947 - DNA, 747 bp, Shigella sonnei
atggaacaagcgcatacccagctgattgcccaactgaacgaacgtattttagcggcggataacacgccgctttatattaagtttgccgaaacggtaaaaaatgccgtgcgcagcggggtgctggagcatggcaatattttgcccggtgagcgtgatttaagtcagttaaccggcgtttcgcgcattacggtgcgcaaggcgatgcaggcgctggaagaagagggcgtggtgacgcgttcgcgcggttacggcacgcagatcaacaacatcttcgaatactcgttgaaagaagcgcgaggtttttctcagcaggtggtgttgcgcgggaaaaagcccgatacgctatgggttaacaagcgtgtcgtgaaatgtcccgaagaagtcgcgcagcagctggcggtcgaagcaggaagtgatgtctttttgcttaagcgtattcgctatgtcgatgaagaagcggtatcgattgaggaatcgtgggttccggcgcatttaattcatgatgttgatgccatcgggatttcactttatgactatttccgcagccagcacatttacccacaacgtacgcgttcccgcgttagcgcccggatgccggatgccgagtttcagtcacatattcagttagatagcaaaataccggtgctggtgatcaagcaagtggcgcttgaccaacagcaacggcctattgagtacagcattagccactgtcgcagcgatctatacgtttttgtgtgcgaggagtag

SEQ ID NO: 483948 - DNA, 819 bp, Shigella sonnei
atgcagctaagaattaccagtcgaaaaaaactcaccgctctattatgcgctcttgggctaatttccatcgttgcaatttatccgcgtcagacggtgaattttttctattcgacagcagttcagattacagactacatccacttctacggttatcgcccggttaaatctttcgctattcgtattcctgccagttacaccattcacggaatagatgtttcgcgctggcaggagcggatcgactggcagcgtgtggcaaaaatgcgcgataacggtattcgcttacaatttgcctttattaaggcgacggaaggcgaaaagctggtggacccctatttttcgcgtaactggcaactaagccgcgaaaatggcttgctgcgcggggcatatcattatttctccccgtcggtagcagcaccggttcaggtgcgattatttctgcaaacggtagatttctcacaaggcgatttccctgcggtactggacgtagaagagcgaggaaaattatcggcaaaagaattacgcaagagggtaagtcagtggctaaaaatggtcgaaaaaagtacggggaaaaagccgattatttactcaggagccgttttttatcacacgaatctggcgggctatttcaatgaatatccgtggtgggtggctcactactatcaacgtcgtccggacaatgacggcatggcctggcgcttctggcagcattccgaccgtggacaggtagatggcatcaatggtccggtggattttaatgtgtttaatggcacggtggaggagttgcagggattcgttgatgggattaaagaaacgccttaa

SEQ ID NO: 483949 - DNA, 801 bp, Shigella sonnei
atgaaacgaattaacgctctgacgattgccggtactgatccgagtggtggtgcggggattcaggccgatcttaaaaccttctcggcacttggcgcttatggttgctcagttattactgcactggtggcgcaaaatacccgtggcgtacagtcggtgtatcgcattgagcctgattttgtcgccgcccagctcgattcggtgttcagcgatgtgcgaatcgataccactaaaatcggtatgttggcggaaaccgatattgttgaagcggtggcagaacggttgcaacgttatcagatccaaaacgtggtactcgacaccgttatgctggcaaaaagcggcgacccactgctttcaccttcggcagttgccacgctacgcagtcgattattgccacaggtttcattaataacgccaaacttgcccgaagcagccgccttgctcgacgcgccacacgcgcgcaccgaacaggaaatgctggaacaagggcgatcgctgttggcgatgggctgtggcgcagtgctaatgaaaggtggtcatctggatgatgagcaaagcccggactggctgtttacccgcgagggtgaacaacggtttaccgcaccgcgcattatgaccaaaaacacccacggtactggttgtacactctctgcggcgttggctgcactacgcccgcgccatacaaactgggctgacaccgtacaggaggcaaaaagctggctttcatcggcgttagcccaggccgacacgctggaagttggtcacggtattggtccggttcaccacttccacgcctggtggtga

SEQ ID NO: 483950 - DNA, 789 bp, Shigella sonnei
atgcaagtcgacctgctgggttcagcgcaatctgcgcacgcgttacacctttttcaccaacattcccctcttgtgcactgcatgaccaatgatgtggtgcaaacctttaccgctaataccttgctggcgctcggtgcatcgccagcgatggttatcgaaaccgaagaggccagtcagtttgcggctatcgccagtgccttgttgattaacgttggcacactgacgcagccacgcgctcaggcgatgcgtgctgccgttgagcaagcaaaaagctctcaaacaccctggacgcttgatccagtagcggttggtgcgctcgattatcgccgccatttttgtcatgaacttttatcttttaaaccggcagcgatacgtggtaatgcttcggaaatcatggcattagctggcattgctaatggtggacggggagtggataccactgacgccgcagctaacgcgatacccgctgcacaaacactggcacgggaaactggcgcaatcgtcgtggtcactggcgaggtggattatgttaccgatggccatcgcgccgttggcattcacggtggcgatccgttaatgaccaaagtggtaggaactggctgtgcattatcggcggttgtcgctgcctgctgtgcgttaccaggcgatacgctggaaaatgtcgcatctgcctgtcactggatgaaacaagccggagagcgcgcagtcgccagaagcgaggggctaggcagttttgttccacatttccttgatgcgctctggcaattgacgcaggaggtgcaggcatga

SEQ ID NO: 483951 - DNA, 273 bp, Shigella sonnei
atgtctcatacaatccgtgataaacagaaactgaaagcgcgtgccagtaagattcagggccaggtcgtggcgctcaagaaaatgctcgacgagccgcatgaatgcgctgcagttttacaacagattactgctatccgtggcgcggtaaacggtctgatgcgggaagtgattaaaggtcatctgacggaacacatcgttcaccagggggatgagctaaaacgtgaagaagatctggatgtcgttctgaaggtgctggattcatatatcaaataa

SEQ ID NO: 483952 - DNA, 825 bp, Shigella sonnei
atgaccgaatttacaactcttcttcagcaaggaaacgcctggttcttcatccccagcgccatcttacttggtgcgcttcatggcctggaaccagggcactcaaaaacgatgatggcggcgtttatcatcgccatcaaaggcaccattaaacaagcggtgatgctcggactggcagcaactatttcgcataccgcagtggtctggttaattgcctttggcgggatggtgatcagcaagcgctttactgctcaatcagcagaaccgtggctccagctgatttccgcagtgatcattattggcaccgcgttctggatgttctggcgtacctggcgcggcgaacgcaactggctggagaatatgcacgagtatgattatgagcatcatcatcacgatcacgaagatcaccacgaccatggacatcatcaccatcacgaacatggcgagtatcaggatgcccatgcacgagcccatgccaatgacattaaacgacgctttgatggtagagaggtcaccaactggcaaattttgctatttggcttaaccggtggccttatcccctgcccggcagcaattaccgtgctgttgatatgcattcagttgaaagccctgacactgggcgcaacactggtcgtcagtttcagcattggcctggcgttaacgcttgtcaccgtaggcgttggcgcagcaatcagcgttcagcaggtcgcaaaacgctggagcggatttaacactctcgctaaacgcgccccctatttttccagtctgttgattggcttagtcggtgtgtatatgggcgtacatggcttcatgggcataatgcgataa

SEQ ID NO: 483953 - DNA, 339 bp, Shigella sonnei; identical to SEQ ID NO: 471682

SEQ ID NO: 483954 - DNA, 126 bp, Shigella sonnei
atgcagacaccttgttattttttattattagccacttgctcgtctggtaatgactccaacttattgatagtgttttatgttcagataatgcccgatgactttgtcatgcagctccaccgattttga

SEQ ID NO: 483955 - DNA, 771 bp, Shigella sonnei
atgcaaactgagcaacagcgagccgtaacacggctttgtatccagtgtggattatttcttttgcaacatggtgcggaaagcgcgttggttgatgagctttcctcacgactgggtcgggcgttggggatggacagcgtcgaaagttctatctcttcgaacgccatagtgctgacaaccattaaagatgggcaatgcctgacatcgacacgtaaaaatcacgatcgcggcattaatatgcatgtggtgactgaagtccagcacattgtgattctggcggagcaccatctgctggattacaaaggcgtagagaaacgatttagccaaattcagccattacgttacccaagatggctggtagccttaatggttggcctttcttgcgcctgtttctgcaaactcaataaaggtggctgggatggtgccgtcatcaccttctttgccagtacggccgcgatgtatatccgccagctgctggcacaacgtcatcttcatccgcagatcaacttttgcctcaccgctttcgccgccaccaccatttccggattgcttttgcaacttcccactttcagcaatacacccactatcgcgatggccgccagcgttctgctgctggtgccgggatttccgttgattaatgccgtcgccgatatgtttaaaggccacatcaataccggactggcacgctgggcgatcgccagtctgctgacactggctacctgcgtcggcgtggtgatggcactgacgatttgggggctacgcggatgggtgtga

SEQ ID NO: 483956 - DNA, 474 bp, Shigella sonnei
atgggtgtgatcgagtttctgtttgcattggcgcaggatatgatcctcgccgccattccagcggtcggctttgcgatggtgttcaacgttcccgttcgggcattacgctggtgtgcgctgcttggcgcgattggtcatggttcacgaatgatcttaatgaccagcgggctgaatattgagtggtcaacctttatggcctccatgctggtcggcaccattggtattcaatggtcgcgctggtatctggcgcatccgaaagtgtttaccgtggcggccgttatccctatgttcccgggcatatcggcttataccgcaatgatttcggcggtaaaaatcagccagttaggttacagcgaaccgttgatgattaccctgttaaccaactttcttacagcttcatcgattgttggtgcgttatccatcggtctttccattcctggattatggttgtaccgcaagcgccctcgcgtataa

SEQ ID NO: 483957 - DNA, 540 bp, Shigella sonnei; identical to SEQ ID NO: 460701

SEQ ID NO: 483958 - DNA, 738 bp, Shigella sonnei; identical to SEQ ID NO: 460700

SEQ ID NO: 483959 - DNA, 495 bp, Shigella sonnei
atgatgaaaactgttaaacatcttctgtgctgtgccattgccgccagcgcattaatttccaccggggtgcatgctgcgtcctggaaagatgcgctctccagcgccgccagcgaacttggcaaccaaaacagcacgacacaggaaggcggttggtcgctcgcgtcattaactaacttgcttagcagcgggaaccaggccttaagcgcagataacatgaacaacgccgcaggcattctgcaatactgcgcgaagcaaaagctggcgtcggtaaccgatgccgaaaacatcaagaaccaggtgctggaaaagctgggcctgaacagtgaagagcaaaaagaagacaccaactatctggatggcattcagggtttgctgaaaaccaaagatggtcagcaactcaatctggataacatcggaacgactccgctggcagaaaaggtgaaaaccaaagcctgcgatctggtgttaaagcaggggctgaacttcatttcctga

SEQ ID NO: 483960 - DNA, 2292 bp, Shigella sonnei
ttgtcagaactactctctttcgccctttttctcgcctctgtgctgatttacgcatggaaagcgggacgtaacacctggtggtttgcagccacattaacggtgctggggctatttgtcgttttaaatatcaccctgtttgccagcgactattttactggcgatggtattaacgacgcggttctctataccttaaccaacagcctgaccggtgctggcgtcagcaaatacatcctgccgggtatcggcattgtgctggggctgacagcggtgttcggtgcgctgggctggatcctgcgccgtcgtcgccatcatccgcaccattttggttacagcctgctggcgctcttactggcgctgggttcggtggacgccagcccggcatttcgtcagataacggaactggtgaaatcccagtcacgcgatggcgacccggactttgcggcttattataaagagccgtcgaaaactatccctgacccgaaactcaacctggtttatatctacggcgaaagtctcgagcggacctattttgataacgaagctttcccggatctcacgcctgaactgggcgcgttgaaaaatgaaggcctggatttcagccacacgcagcagctgccaggaacggattacacgattgcgggcatggtggcttctcagtgcggcataccgctgtttgccccctttgaaggcaacgcctccgcctctgtctccagcttcttcccgcagaacatctgtctgggcgatatcctgaaaaactcgggttatcagaactatttcgtgcagggcgcgaatctgcgttttgccggtaaagatgtgttcctgaagtcgcatggcttcgaccacttatacggctcagaagagctgaaaagcgtggtggccgacccgcactatcgcaacgactggggattctacgacgataccgttctcgatgaagcgtggaaaaagtttgaagagctttcccgctcaggtcagcgattctcactgtttaccctgacagtcgatacccatcacccggatggttttatctcgcgtacctgtaaccgcaaaaaatatgattttgacggtaagccgaaccagtcattcagcgcggtaagttgcagccaggagaatatcgcggcgtttatcaacaaaatcaaagcgtcaccgtggtttaaagataccgtcatcgtcgtctcttctgaccatttagcgatgaacaacacggcgtggaaatacctcaataagcaggatcgcaataacctgttttttgtcattcgtggcgacaagccgcagcaagagacgctggcagtgaagcgtaacacgatggataacggcgcgacggtgctggacattctcggtggcgataactatctcggacttggtcgtagcagtttatccgggcagtcgatgtcggaaatcttcctcaatatcaaagagaaaacattggcgtggaagccggatatcatccgcctgtggaaattccctaaagagatgaaagagttcaccatcgaccagcagaaaaacatgattgccttctcgggtagccatttccgtttgccgctgctgttgcgggtttcagacaaacgcgtggaaccgctgccggaaagcgaatactcagcaccgctgcgtttccagctggccgatttcgctccacgcgacaatttcgtctgggttgaccgttgctataagatggcacaactctgggctccggaactggcactctccaccgactggtgtgtctcgcaagggcagcttggcggtcagcaaattgttcagcatgttgacaaaacaacatggcagggcaaaacggcatttaaagatacggtcatcgacatggcgcgttataaaggcaatgtcgatacgctgaaaattgttgataacgatattcgctacaaagccgacagtttcatcttcaacgtcgccggtgcgccagaagaggtgaaacagtttagtgggatttcccgtccagagtcgtggggccgctggtccaacgcgcagctgggcgatgaagtaaaaatcgagtacaagcatccgctgccaaagaaatttgacctggtgattaccgccaaagcatacggcaataacgccagccgtcctattccggtacgcgtaggcaatgaagaacaaacccttgtgctgggcaatgaagtgaccaccaccacactgcatttcgataacccaaccgatgccgacacactggtaattgtgccgccggaacctgtctcaaccaacgaagggaatatcctcggacactcgccgcgtaagctcgggatcggcatggtggaaattaaagtggtggaacgtgaaggataa

SEQ ID NO: 483961 - DNA, 1023 bp, Shigella sonnei
atgtctacgatgaatgttttaatttgccagcagccgaaagaattagtctggaaacaacgcgagatacctattccgggtgacaatgaagcattaataaaaattaagtctgtcgggatttgcggtaccgatattcatgcctggggtggaaatcaaccattttttagttatccacgtgttttaggccatgaaatatgtggggagattgttgggctgggtaaaaatattgctgatcttaaaaatggtcagcaagttgctgtgatcccttatgttgcctgtcagcaatgcccggcgtgtaaaagcgggcgtaccaattgctgtgaaaaaatttcagtcattggcgtgcatcaggatggcggttttagtgagtatttgagcgtgccggtggcgaacattttgcccgcagacggtattgacccgcaggcggcagcattgattgaacctttcgctattagcgctcatgcggtgcgtcgcgcagccattgctcccggcgagcaggtgctggtggtcggggcggggccaatcggtctgggcgcggcggcaatcgctaaagccgatggcgcacaggtggtggtggcggataccagtccggcgcgccgtgaacatgtggcaacgcgtctggaattacctttactggacccgtcagccgaagattttgacgcgcagctacgggcgcagtttggtggttcgctggcgcagaaagtgatcgacgcgacaggtaatcaacatgcgatgaataacaccgtgaatttgattcgtcacggcggcacggtggtatttgtcggcctgtttaaaggtgagttgcagttctccgatccggaattccataaaaaagaaacgacgatgatgggtagccgcaacgccacgccggaagattttgctaaagtcggtcgactgatggcggaaggaaaaatcactgctgacatgatgttaacccatcgctatccgttcgccacgctggcagaaacctacgagcgcgatgtgattaacaatcgtgagttgattaagggtgtaattactttctga

SEQ ID NO: 483962 - DNA, 915 bp, Shigella sonnei
atgagtcgttcacaaaatttacgccacaatgtgattaaccaggtcattgatgatatggcgcggggtcatatcccttccccacttccatcgcaaagtgcgctggcggaaatgtacaacatcagccgcaccacagtgcgtcatattctcagccacttacgcgaatgcggcgtcttgacgcaggttggaaacgactatgttattgcgcgtaaacctgaccatgatgacggtttcgcctgtactaccgcttcaatgagtgaacaaaacaaagtgtttgagcaggcttttttcacgatgataaaccagcgccagttacgcccaggggaaacgttttctgaactgcaactggctcgggccgcgggtgtcagcccggttgtagtaagagaatatcttttaaaattcggccgttataatcttattcacagcgaaaagcgcggccagtggagcatgaagcaattcgatcaatcctacgccgagcagctgtttgagctacgcgaaatgctcgaaacacattcacttcagcactttctcaacctgcctgatcatgatccccgctggctgcaggcgaaaaccatgctcgaacgtcatcggctactgcgtgacaacatcggcaatagctttcgcatgttctcgcaacttgacagagattttcactccttactgctttcagctgccgacaatatcttttttgatcaatcgcttgagatcatctcagtcatctttcattttcactatcaatgggacgaaagcgatcttaaacagcgcaatatcattgccgtcgatgagcatatgaccattctcagcgctctgatttgccgcagtgaccttgatgccacccttgcgctccgtaaccatttgaattcagctaaacaatcaatgattcgatccattaatgagaacacgcgttatgctcattaa

SEQ ID NO: 483963 - DNA, 1362 bp, Shigella sonnei
gtggaaaaagaaaatatcaccctcgatccgcgttcttcatttactccatcttcgtcggcagatattcccgtgccaccagatggattagttcaacgcagtacccgaattaaacgcattcaaaccaccgccatgttgttattattttttgcggcggtaatcaattatctcgaccgcagttcgctgtcggtagcaaatttaacgattcgtgaagaattgggattaagtgccaccgaaatcggcgctttgctctccgtgttttcactcgcttacgggattgcgcaacttccttgcggcccactattggatcgtaaaggcccacgcctgatgctgggactggggatgttcttctggtcactgttccaggcaatgtctggcatggtgcacaactttacgcagttcgtgttggtgcgtatcggtatggggattggtgaagcgccgatgaacccatgcggtgtaaaagtcattaacgactggttcaacatcaaagagcgcggacgcccgatgggcttcttcaacgcagcttctaccattggcgttgccgtaagcccaccgattctggcggcgatgatgctggtgatgggctggcgcgggatgtttattaccattggtgtactggggatttttctcgccatcggctggtatatgctctatcgcaaccgcgagcacgtagaactgactgccgttgaacaagcttatctcaatgcaggtagcgtcaatgcccgccgagatccgctcagttttgccgaatggcgcagcctgttccgtaaccgtacaatgtggggaatgatgctcggattcagtggcatcaactacactgcgtggctgtatctggcctggcttcctggttacctgcaaacagcctataacctggatttaaaaagcacagggttgatggcggctatccctttcctgtttggggctgccgggatgctggtcaacggttacgttactgactggctggtcaaagggggaatggctccgattaaaagccgtaagatctgcattattgccgggatgttctgttctgccgcctttacgctggtcgtaccgcaagcgacaacatccatgacagcggttctgctgattggcatggcactgttctgtattcactttgccggaacatcctgctggggcttgatccacgtcgcagttgcttctcgcatgactgcgtcggtgggcagtatccagaactttgccagcttcatctgcgcctcttttgcgccgatcattactggttttattgttgataccacccactcattccgtctggcactaatcatctgcggttgcgtcaccgcagcgggggcactggcgtacatcttcctggttcgtcagccgatcaacgacccacgtaaagattaa

SEQ ID NO: 483964 - DNA, 711 bp, Shigella sonnei
gtgaagcagaacgccgaaaatgcgcgccaggccagccatctggcgttaagtgcttctgaaacggcgcaacgcggcggcaaagtggtagataacgtggtgcagactatgcgcgatatctccaccagttcgcagaaaatcgccgatattatcagcgtaattgacggcattgccttccagaccaatattctggctttgaacgcggcggttgaggctgcgcgtgcgggtgagcaagggcgcggttttgcggtggtcgcgggagaagtgcgtaatctggcccagcgcagcgcccaggcggctcgtgaagttaaaagcctgattgaagactcggtggggaaagtggatgttggctctacgctggtcgaaagcgccggggaaacaatggcggagattgtcagcgccgtgacccgcgtgacggacattatgggcgaaattgcttctgcttctgatgagcagagccgtggtatcgatcaggttggcttagcggttgctgagatggaccgggtaactcaacagaacgccgcgctggtggaagagtctgccgctgccgccgccgcgctggaagagcaggccagtcgcctgaccgaagcagtggcagtgttccggattcagcaacagcagcgtgaaacatcggctgtggtaaaaaccgtgacgccagctgcgccgcgtaaaatggccgtggcagatagcgaggagaactgggaaacattttaa

SEQ ID NO: 483965 - DNA, 933 bp, Shigella sonnei
atgttaaaacgtatcaagatcgtgaccagcttactgctggttttggccgtttttggccttttacaactgacatcaggcggtctgttctttaatgccttaaagaatgacaaagaaaatttcactgttttacaaaccattcgccagcagcaatccacgctgaatggcagctgggtcgcgttgttgcagacgcgtaacaccctcaaccgcgcgggtatccgctacatgatggatcagaacaatattggtagcggttcaaccgttgctgagctgatgcagagtgccagtatttcgctgaaacaggcggaaaaaaactgggcggattacgaagcgttgccgcgtgacccgcgtcagagcaccgccgcagcggcagagatcaaacgtaattacgatatttatcacaatgcgctggcggagctgatccaactgttaggtgcaggcaaaatcaacgagttctttgatcagccgacccagggatatcaggacggtttcgagaagcagtatgtggcttacatggagcaaaacgatcggctctatgatatcgccgtcagcgataacaatgcctcctacagccaggcgatgtggattctggtgggcgtgatgatcgtcgtactggcggtcatcttcgccgtctggttcggtattaaagcctcgctggtagcgccaatgaatcgcctgattgacagcattcgtcatattgcaggcggcgatctggtgaaaccgattgaggtggatggctctaatgagatggggcaactggcagagagtttgcgccatatgcagggagagctgatgcgtaccgtcggtgatgtgcgcaacggggccaatgccatctatagcggtgccagcgaaatcgccaccggcaataacgatctctcttcgcgcaccgagcaacaggccgcttcgctggaagagacggcagccagcatggagtaa

SEQ ID NO: 483966 - DNA, 447 bp, Shigella sonnei
atgcacgactcactaaccattgcgttgctccaggcgcgagaagcggcgatgagttattttcgcccaatcgttaaacggcataatttgactgagcaacagtggcgcatcgtgcgtattctggcggaaagcccatcaatggattttcacgatctggcgtatcgcgcctgcattttgcgcccaagcctgaccgggatcctcacgcggatggaacgcgacggtttagtgttgcgattaaagccgatcaatgatcagcggaagctctatatctcgctaaccaaagaggggcaggcgctgtataaccgcgctcagacacagattgaagaagcctatcggcagattgaagctcagtttactgccgagaaaatgcaacagttaacccatctgttagaggaatttattgctctgggcaattcccgacaagaagccatcccgggcgataatgaataa

SEQ ID NO: 483967 - DNA, 1290 bp, Shigella sonnei
atgaaaggcactatcttcgccgtagcgttgaaccatcgcagccaacttgatgcatggcaggaagcgttccagcaatccccctacaaagccccgcctaaaactgcggtctggtttattaaaccgcgcaatacggtgattggttgcggtgaaccgattccctttccacagggtgaaaaggtactgagcggtgcgactgttgcgctgattgtgggaaaaacggcgacgaaagtacgtgaagaagatgcggcagagtacatcgccggatatgcgctggctaacgacgtcagcctgccggaagagagcttttaccgcccggcaatcaaagcaaaatgtcgtgatggattctgccccattggcgaaaccgtggctctcagcaatgtcgataatctgaccatctataccgagatcaacgggcgtcctgccgatcactggaataccgccgatttacaacgtaacgccgcgcagttgctgagcgccctgagcgaatttgccacgctgaatccaggcgacgccattctgctcggcacgccacaggcgcgcgtggaaatacagccaggcgatcgcgttcgtgttctcgcagaaggtttcccgccgctggaaaatccggtagtggacgaacgtgaagtgaccacgcacaagagcttcccaacgcagccacacccgcacggcacgctgtttgccctcggcctgaactacgccgaccacgccagcgaactggaatttaagccaccggaagaaccgctggtgttcctgaaagcgccaaataccctcactggcgataaccagacctccgtgcgtccaaacaatattgaatacatgcactatgaagcggagctggtggtagttattggcaaacaggcgcgtaacgtcagcgaagccgatgccatggattatgtcgcgggctacaccgtgtgtaacgactacgccattcgtgactatctggaaaactactaccgccctaacctgcgggtaaaaagccgcgacggactgacgccgatgctttcaaccatcgtgccgaaagaggcgatcccggacccgcataatctgacccttcgcaccttcgtcaacggcgagttacgccagcaaggcaccaccgccgatctgatcttcagcgtgcccttcctgatcgcctacttaagtgaatttatgaccctgaatccgggcgacatgatcgccaccggcacacccaaaggcttatctgacgtggtgcctggcgatgaagtagtggtggaagtagaaggcgtgggccgcctggtgaaccgaattgtgagtgaggatacagcgaaatga

SEQ ID NO: 483968 - DNA, 1467 bp, Shigella sonnei
atgaaaaaagtaaatcattggatcaacggcaaaaatgttgcaggtaacgactacttccagaccaccaatccggcaacgggtgaagtgctggcggatgtggcctctggcggtgaagcggagatcaatcaggcggtagcggcagcgaaagaggcgttcccgaaatgggccaatctgccgatgaaagagcgtgcgcgcctgatgcgccgtctgggcgatctgatcgaccagaacgtgccagagatcgccgcgatggaaaccgcggacaccggcctgccgatccatcagaccaaaaatgtgttgatcccacgcgcttcccacaactttgaatttttcgcggaagtctgccagcagatgaacggcaagacctatccggttgacgacaagatgctcaactacacgctggtgcagccggtgggcgtttgtgcgctggtatcgccgtggaacgtaccgtttatgaccgccacatggaaggtcgcgccgtgtctggcgctgggcaataccgcggtactgaaaatgtcggaactctccccgctgaccgctgacagcctgggtgagctggcgctggaagccgatattccggcaggcgtgctgaacgtggtacagggctacggcgcaaccgcaggggatgcgctggttcgtcatcatgacgtacgtgccgtgtcgttcaccggcggtacggccaccgggcgcaacatcatgaaaaacgccgggctgaaaaaatactccatggaactgggcggtaaatcgccggtgctgatttttgaagatgccgatattgaacgcgcgctggacgccgccctgttcaccatcttctcgatcaacggcgaacgctgcaccgccggttcgcgcatctttattcagcaaagcatctacccggaattcgttaaacgctttgccgaacgcgccaaccgtctgcgcgtgggcgatccgaacgatccgaatacccaggttggcgcgcttattagccagcagcactgggaaaaagtctccggctatatccgtctcggcattgaagaaggcgcaaccctgctggcgggcggcccggataaaccgtccgacctgcctgcgcacctgaaaggcggcaacttcctgcgcccaaccgtgctggcagacgttgataaccgtatgcgagtcgcccaggaagagattttcgggccggtcgcctgcctgctgccgtttaaagacgaagccgaaggcttacgtctggcaaacgacgtggagtacggcctcgcgtcgtacatctggacacaggatgtcagcaaagtgttacgcctggcgcgtggcattgaagctggcatggtgttcgtcaacacccagaacgtgcgtgacctgcgccagccatttggcggcgtaaaagcctccggcaccgggcgtgaaggcggtgagtacagcttcgaagtgttcgcggaaatgaagaacgtctgcatttccatgggcgaccatccaattccgaaatggggagtctga

SEQ ID NO: 483969 - DNA, 852 bp, Shigella sonnei
atgggtaagttagcgttagccgccaagatcacgcacgtaccgtcgatgtatcactctgaactgccagggaaaaaccacggttgccgccagggcgcgatcgacgggcataaagagatcagcaagcgttgccgggaaatgggcgtcgataccattatcgttttcgatacccactggctggtcaacagtgcttatcacatcaactgtgcagaccattttgaaggcgtctacaccagcaacgagctgccgcattttatccgcgatatgacctacaactacgagggcaacccggagttggggcagcttattgccgatgaagccttaaagctcggcgtgcgggcaaaagcgcacaacattcccagcctgaaactggaatacggcacgctggtgccgatgcgctacatgaatgaagacaagcacttcaaagtggtctccatttcggctttctgcacggttcacgattttgccgacagccgcaagctgggcgaagcgattctgaaagcgatcgaacagtacgacggcaccgtggcggtccttgccagcggttcgttatcgcaccgctttattgacgatcagcgtgcggaagaagggatgaacagctacacccgcgagttcgaccgccagatggacgagcgcgtggtgaagttgtggcgcgaaggccagttcaaagagttctgcaatatgctgccggagtacgccgactactgctacggcgaaggcaatatgcacgacacggtgatgctgctggggatgctcggctgggataaatacgacggcaaggtggagtttatcaccgagctattcccaagctctggcaccggtcaggttaacgctgttttcccgcttcccgcgtaa

SEQ ID NO: 483970 - DNA, 381 bp, Shigella sonnei
atgccgcactttatcgttaaatgcagtgacaacatccgcgaagaagccgacctgccggggttgttcgccaaagtgaatccgacgctggcagccacgggtatttttccgctggcgggtattcgcagccgcgtgcattgggtcgatacctggcagatggccgacgggcagcgtgattatgccttcgtgcatatgacgttgaaaatcggcgcaggtcgcagcctggaaagccgccagcaggcgggtgaaatgctgtttgaactgattaaaacgcacttcgccgccctgatggagagccgcctgctggcgttgtcgtttgagattgaagagctgcatccgacgctgaattttaaacaaaacaacgtgcacgcattgtttaagtag

SEQ ID NO: 483971 - DNA, 804 bp, Shigella sonnei
atgttcgataaacacacccacaccctgatcgcccagcgtctggatcaggcagaaaaacagcgcgaacagatccgcgcgatctcgctggattacccggagatcaccatcgaagacgcttacgcggtgcagcgtgaatgggttcgcctgaaaatcgccgaaggtcgcacgctgaaaggccacaaaatcggcctgacctcgaaagcgatgcaggcaagctcgcagatcagcgaaccggattacggcgcgctgctggatgacatgttcttccacgatggcagcgatatcccgaccgatcgctttatcgtgccgcgcattgaagtggagctggctttcgtgctggcaaaaccgctgcgtgggccaaactgcacgctgttcgacgtctacaacgccacggactacgtgatcccggcgctggagctgatcgacgctcgctgccacaacatcgatccggaaacccagcgcccgcgcaaagtgttcgacaccatttctgataacgccgccaacgccggggtgatcctcggcggtcgtccgatcaaaccagacgaactggatctgcgttggatctccgccctgatgtatcgcaatggcgtgattgaagaaaccggcgtcgccgctggcgtgctgaatcatccggcaaacggcgtggcctggctggcgaacaaactcgcaccgtatgacgtacaactggaagccgggcaaatcattctcggtggttcgttcacccgcccggttccggcgcgtaagggcgacaccttccacgtcgattacggcaacatgggttccattagctgccgctttgtttaa

SEQ ID NO: 483972 - DNA, 789 bp, Shigella sonnei
atggaaaacagctttaaagcggcgctgaaagcaggccgtccgcagatcggattatggctggggctgagtagcagctacagcgcagagttactggccggagcaggattcgactggttgttgatcgacggtgagcacacgccgaataacgtgcaaaccgtgctcacccagctacaggcgattgcgccctaccccagccagccggtagtacgtccgtcgtggaacgatccggtgcaaatcaaacaactgctggacgtcggcacacaaaccttgctggtgccgatggtacaaaacgctgacgaagcccgtgaagcggtacgcgccacccgttatccccccgccggtattcgcggtgtgggcagtgcgctggcccgcgcctcgcgctggaatcgtattcctgattacctgcaaaaagccaacgatcaaatgtgcgtgctggtgcagatcgaaacgcgtgaggcaatgaagaacttaccgcagattctggacgtggaaggcgtcgacggcgtgtttatcggcccggcggatctgagcgccgatatgggttatgccggtaatccgcagcacccggaagtacaggccgccattgagcaggcgatcgtgcagatccgcgaagcgggcaaagcgccggggatcctgatcgccaatgagcaactggcaaaacgctatctggaactgggcgcgctgtttgtcgccgtcggcgttgacaccaccctgctcgcccgcgccgccgaagcgctggcagcacggtttggtgcgcaggccaccgccgtgaagcccggcgtgtattaa

SEQ ID NO: 483973 - DNA, 1377 bp, Shigella sonnei
atgagcgacacctcacctgccataccggagagtatcgatccggcgaatcagcataaagcgctgactgccggacaacaggcggttattaagaagctatttcgccgcctgagcgtctttctgttcgtgctgtttatcttctcgttccttgatcgcatcaacatcggctttgccggactcacgatgggacgcgacctcggtctgagcgccaccatgtttggcctcgctaccaccctgttctatgccgcttatgtcatcttcggcattcccagcaacattatgctgagtattgtcggtgcgcggcgctggatcgccaccatcatggtgctctggggcatcgcctctactgccaccatgtttgccactggccccaccagcttgtacgtactgcgtatactggttggcattaccgaagccggctttctgcctggtattctgctgtatttaaccttctggtttccggcctatttccgcgcccgtgccaacgccttgtttatggtagcaatgccggtaacgacagcgttgggctcgatcgtttccggctacattttgtcgctggatggcgtcatggcattaaaaggctggcagtggctgtttttgctggaaggcttcccgtcggtattactcggcgtcatggtgtggttctggcttgatgactcaccggacaaagctaagtggctgacgaaagaagacaaaaaatgcctgcaagagatgatggataacgatcgtctgacgctggttcagccagagggagccatcagccaccacgccatgcaacaacgcagtatgtggcgggagatcttcactccggtggtgatgatgtataccctggcgtatttctgcctgaccaacacacttagtgcgatcagcatctggacaccgcagatcctgcaaagttttaatcagggcagcagtaatatcaccatcggcatgctggccgccgtaccgcagatttgtaccattctcgggatggtctactggagccgtcactcagatcgccgccaggaacgaaggcatcacaccgcccttccttatttgttcgctgccgcaggttggttactggcttcggcaactgatcacaacatgatccagatgctggggatcattatggcttcgaccggatcattcagcgcaatggcgattttctggacaacaccggatcagtccatcagcctgcgggcacgagcgatcggtattgcggtgatcaacgccactggcaacattggttcagcgttaagtccgtttatgatcggctggttgaaagatttgaccggcagctttaacagtggattgtggtttgttgccgcgctgctggtgattggtgcggggattatctgggcgattccaatgcagtcctcccgtccgcgagcgaccctgtaa

SEQ ID NO: 483974 - DNA, 255 bp, Shigella sonnei
atgtgtgaccgtcagattgccaatattgatatcagcaaagagtacgatgaaagcctgggcacggacgatgtgcattatcagtcgttcgcccgcatggcggcattttttggccgccatatgctgccacatcgccacgaacagtactttcagatgcatttcctcaatagcggacagattgagctacagcttgacgatcatcgctactcggtggaagcgcccctgtttgtcctgacgccgccgtcagtactgaggtag

SEQ ID NO: 483975 - DNA, 756 bp, Shigella sonnei
ttgagtgcgggacgcctgaataaaaaatctctgggtatcgtgatgttgttatcggttggactgcttttggcgggctgttcgggtagcaaatcatccgatacaggaacgtattccggctccgtttacaccgtgaaacggggggatacgctatatcgtatttcgcgcaccacgggaaccagcgtaaaagaactggcgcgactgaacggcatttcccccccttacaccattgaagttggtcagaaactaaaactgggtggggcgaaaagtagcagtagtacacgtaaatcaaccgccaaatcaacgaccaaaaccgcatcggttacaccgtcatcagcggtaccgaaatcatcctggccgccagtagggcaacgttgttggttatggccaacgacagggaaagttatcatgccgtattcgacagcagatggcggcaataaagggattgatatctcagctccacggggtacacctatttacgccgcgggtgcaggaaaggtggtgtatgtgggcaaccagctgcgtggctacggtaatctcatcatgattaaacacagtgaagattacattacggcttacgcccataatgacacgatgctggtaaataatgggcaaagcgtgaaggctgggcaaaaaatcgccactatggggagcacggatgcggcatctgttcgcctgcatttccagattcgttaccgtgcaacggcaattgatccgctacgttacttgccgccgcagggcagcaagccaaaatgctga

SEQ ID NO: 483976 - DNA, 2298 bp, Shigella sonnei
atggaagcgcgggaagcaaccgctacgggtgaatcatgcatgcgcgtcgatgccattgctaaggtcaccgggcgggcacgatatactgacgattatgttatggcgggcatgtgttatgcgaaatatgtacgtagccctatcgcacatggttatgccgtaagtattaatgatgaacaagccagaagtttgccgggtgtactggcgatttttacctgggaagatgtgcctgatattccattcgctacagctgggcatgcctggacacttgacgaaaacaagcgcgataccgccgatcgcgcactgctaactcgccatgttcgtcatcatggtgacgccgttgccatcgtcgtggcccgcgatgaactcacggcagaaaaagcggcgcaattggtcagcattgagtggcaagaattacccgttatcaccacgccagaagcggcgctggcagaagacgctgcaccaatccataacggtggcaatttactgaaacaaagcacgatgtcgacgggtaatgtccaacaaacaatcgatgccgccgactaccaggtacaggggcactatcagacccccgttattcaacattgtcacatggaaagcgtaacatcgctggcgtggatggaggatgactcgcgaattaccatcgtttccagcacccagatcccgcacattgttcgccgcgtggttggtcaggcgctggatattccctggtcatgcgtacgagtcatcaaaccgtttgtcggtggcggttttggtaataaacaggatgtactggaagagccaatggcagcattcctgaccagcaagcttggcggcattccggtgaaagtttcccttagccgtgaagagtgtttcctcgcaacccgtacccgccacgcttttaccattgacgggcaaatgggcgtgaaccgcgacggaacattgaaaggttatagtctggatgttctgtctaacaccggcgcttatgcatctcacgggcactccatcgcttctgcggggaggaataaagtcgcttacctttatcctcgttgtgcctacgcttacagttcaaagacctgctataccaacctcccctcggctggtgcgatgcgtggttatggcgcgccacaagtcgtatttgccgttgagtctatgcttgatgacgccgcgacagcgttaggtattgatcctgttgaaattcgtttacgcaacgccgcccgcgaaggagatgctaatccgctcacgggcaaacgtatttacagcgcagggttgccggagtgtcttgaaaaaggccggaaaatctttgaatgggaaaaacgccgtgcagaatgccagaaccagcaaggcaatttgcgccgcggcgttggcgtcgcctgttttagctatacctctaacacctggcctgtcggcgtagaaatagcaggcgcgcgccttctgatgaatcaggatggaaccatcaacgtgcaaagcggcgcgacggaaatcggtcagggtgccgacaccgtcttctcgcaaatggtggcagaaaccgtgggggttccggtcagcgacgttcgcgttatttcaactcaagataccgacgttacgccgttcgctcccggcgcatttgcctcacgccagagctatgttgccgcgcctgcgctgcgcagtgcggcactattattaaaagagaaaatcatcgctcacgccgcagtcatgctacatcagtcagcgatgaatctgaccctgataaaaggccatatcgtgctggttgaacgaccggaagagccgttaatgtcgttaaaagatttggcgatggacgctttctaccaccctgaacgcggcgggcagctctctgctgaaagctccatcaaaaccaccactaacccatcggcgtttggctgtacctttgttgatctgacggtcgatattgcgctgtgcaaagtcaccatcaaccgcatcctcaacgttcatgattcagggcatattcttaatccactgctggcagaaggtcaggtacacggcggaatgggaatgggcattggctgggcgctatttgaagagatgatcatcgatgctaaaagcggcgtggtccgtaaccccaatctgctggattacaaaatgccgaccatgccggatctgccacaactggaaagcgcgttcgtcgaaatcaatgagccgcaatccgcatacggacataagtcactgggtgagccaccaataattcctgttgccgctgctattcgtaacgcggtgaagatggctaccggtgttgcaatcaatacactgccgctgacgccaaaacggttatatgaagagttccatctggcaggattgatttga

SEQ ID NO: 483977 - DNA, 879 bp, Shigella sonnei
atgtttgattttgcttcttaccatcgcgcagcaacccttgccgatgccatcaacctgctggctgacaacccgcaggccaaactgctcgccgatggcactgacgtactgattcagctccaccatcacaatgaccgttatcgccatattgttgatattcataatctggcggagctgcggggaattacgctggcggaagatggctcgctacgtatcggctctgcaacgacatttacccagctaatagaagctcctataactcaacgtcatctcccggcgttatgtgctgcggccacgtccattgctggaccgcagatccgtaacgtcgctacctacggtggaaatatttgcaacggtgccaccagcgcagattctgccacgccaacgctaatttatgacgcgaaactggagatccactccccgcgcggtgttcgtttcgtcccgattaatggctttcacaccgggccgggcaaagtgtctcttgagcatgacgaaatcctcgtcgcctttcattttccgccacagccgaaagaacacgcgggcagcgcgcattttaaatatgccatgcgcgacgcaatggatatttcaacgattggctgcgccgcacattgccgactggataacggcaatttcagcgaattacgcctggcatttggtgttgccgcgccaacgccgattcgctgccaacatgccgaacagactgcacaaaatgcgccattaaacctgcaaacgctggaagctatcagcgaatctgtcctgcaagatgtcgccccgcgttcttcatggcgggccagtaaagagtttcgtctgcatctcatccagacgatgaccaaaaaagtgattagcgaagccgtcgccgcggcggggggaaaattgcaatga

SEQ ID NO: 483978 - DNA, 480 bp, Shigella sonnei
atgaatcacagcgaaacaattaccatcgaatgcaccattaacgggatgccttttcagcttcacgccgcaccaggcacgccgctctcggaattactccgcgaacaaggactgctaagtgtcaaacaagggtgctgcgtgggtgaatgtggtgcctgtacggtgttggtcgacggcacagcaatagacagttgcttataccttgccgcctgggctgaaggaaaggagatccgcacgctggaaggtgaagcgaaaggcggaaaactttctcatgttcagcaggcttatgcgaaatccggcgcagtgcagtgcgggttttgtacgcctggcctgattatggctaccacggcaatgctggcgaaaccacgcgagaagccattaaccattacggaaattcgtcgcggactggcgggaaatctttgtcgctgcacggggtatcagatgattgtaaatacagttctggattgcgagaaaacgaagtaa

SEQ ID NO: 483979 - DNA, 1779 bp, Shigella sonnei
atggagcttgctactacgcagtcagtattgatgcaaattcaaccgacaattcagcgttttgccagaatgcttgccagcgttttgcagtttgaggttgagatcgttgatgaaaacttgtgtcgcgtcgccggaacgggcgcgtatgggaagtttcttggtcgccagttgagcggcaactcacgcctgctccgccacgtcctggaaacgaaaactgaaaaagttgtgacacagtctcgcttcgatcccctttgcgaaggttgcgatagtaaagaaaattgccgcgaaaaagcatttctgggtacgcctgtcattttacaggatcgttgtgttggggtgataagtttgattgccgttacccacgagcaacaagagcatatcagtgataatttacgcgaattttctgattatgttcgccatatatccaccatttttgtttcgaaacttctggaggatcaggggccaggagataacatcagtaaaatattcgcgaccatgatcgataatatggatcagggcgtattagttgttgatgatgaaagtcgggttcagtttgttaatcagactgccttaaaaacacttggtgttgtacaaaataatattattgggaaacctatccgtttcagaccattaacatttgagagtaattttactcatggacatatgcagcatattgtttcgtgggacgataaaagtgaattaatcattggtcaattgcataacattcagggccgacaattatttttaatggcatttcaccaatcgcataccagtttttctgtagcaaatgcacctgatgaaccacatattgaacaattggttggcgagtgccgtgttatgcggcaattaaaacgactcattagccgtattgcacccagcccatccagcgttatggtggttggtgaaagcggcacgggtaaagaagtcgtcgcccgagcaatccataagttgagcggaagacggaataaaccctttattgctatcaactgtgccgcgattccggagcagcttctggaaagcgaactgttcggttatgttaaaggcgcatttactggtgcttctgccaacggtaaaacagggttgattcaggcggcgaatacgggcacgctgtttctcgatgaaataggtgatatgccattaatgttgcaggctaaattactgcgcgctattgaggcgcgtgaaattctgccgattggtgccagtagcccaatacaagtcgacattcgcatcatttctgcaactaatcagaatttggcccagttcattgccgaaggtaaattccgcgaagatctcttctaccgacttaatgttatcccgataactctgccaccgctgcgtgaacgtcaggaagatattgaactattggtgcattactttttacatctgcatacccgtcgtctgggatcggtttatcctggcattgctcccgatgtcgtcgaaatattgcgtaagcatcgttggcccggaaacctgcgcgagttaagcaatttgatggaatatctggttaacgtggttccttcaggtgaagttatcgacagcacgctattgccgccaaatctgctgaataatggcacaacggagcaaagtgatgtaacagaggtcagtgaggcgcacctgtcactcgatgatgcgggcggcacggcgctggaggagatggaaaagcaaatgatccgcgaggcgctttcacgtcataacagcaagaagcaagttgctgatgaactgggcatcggcattgctacgctctatcgcaagattaagaaatatgagttgttaaacacataa

SEQ ID NO: 483980 - DNA, 1188 bp, Shigella sonnei
atgaaaactgttaatgagctgattaaggatatcaattcgctgacctctcaccttcacgagaaagattttttgttaacgtgggaacagacgccagatgaactgaaacaagtactggacgttgccgcagcattaaaagcactgcgtgctgaaaacatctcaaccaaagtctttaatagtggattaggtatttccgtattccgcgacaactccacccgtacccgcttctcttatgcttccgcgcttaacctgctcggccttgcacaacaagatctcgacgaaggcaaatcacaaatcgctcacggcgaaaccgtgcgtgaaaccgccaatatgatctccttctgcgccgacgctattggtattcgcgacgatatgtatctgggcgcaggcaacgcctatatgcgtgaagttggcgctgcacttgatgacggttacaagcagggtgtactgccacagcgtccggctttagtgaacctgcaatgcgatattgaccacccgactcagtcaatggctgacctcgcgtggttacgtgaacactttggttcactggaaaacctgaaaggtaaaaaaatcgccatgacctgggcctactctccaagctatggcaaaccgctctctgtaccacaaggcatcatcggtctgatgactcgcttcggtatggatgtcaccttggcccatccggaaggctacgacctgatcccggatgtggttgaagtggcgaaaaacaatgctaaagcctccggtggtagcttccgtcaggtcaccagcatggaagaagccttcaaagacgcagacatcgtttatccgaagtcatgggcaccttacaaagtgatggaagagcgtactgaattgctgcgtgcgaacgaccacgaaggcttaaaagcactggaaaaacagtgtctggcacagaacgcgcaacacaaagactggcattgtactgaagagatgatggaactgacccgtgatggcgaagccctgtacatgcactgcctgccagctgatatcagcggcgtatcctgcaaagaaggtgaagtgactgaaggcgtattcgaaaaataccgtatcgctacctacaaagaagccagctggaagccttatatcatcgccgcgatgatcctgtcccgtaaatacgccaaaccaggtgcactgctcgagcaactgctgaaagaagcgcaagaacgcgtgaaataa

SEQ ID NO: 483981 - DNA, 1197 bp, Shigella sonnei
atgtccgttttctcattgaagattgatatcgccgataacaaatttttcaacggcgaaacatcaccgctcttttcgcaaagccaggccaaactggcgcgccagttccaccagaaaatagctggttatcgcccaacaccgctttgtgcgctggacgatctcgcaaacctttttggtgtgaagaaaattctcgtcaaagacgaatcaaaacgattcggtctgaacgccttcaaaatgcttggcggtgcgtacgccatcgctcaattattgtgtgaaaaatatcatcttgatatcgaaacgctgtcatttgagcacctgaaaaatgccatcggcgaaaaaatgactttcgcgaccaccaccgacggcaaccacgggcgcggtgtggcgtgggcagcacagcaactcggacagaatgcggtgatttacatgccgaaaggttctgctcaggaacgcgttgacgccattctgaacctcggtgccgagtgcatcgtcacggatatgaactatgacgataccgttcgcctgaccatgcaacacgcgcagcagcacggctgggaagtggtacaggacacggcatgggaaggttacaccaaaatcccaacctggatcatgcaaggctacgcaaccctggcagatgaagccgtcgagcaaatgcgtgaaatgggcgtaaccccgacgcacgttctgctgcaagccggtgtcggagcaatggccggtggtgtgctgggttatctggtcgacgtctacagcccgcaaaatctgcacagcattattgttgaacctgacaaagctgactgtatttatcgctccggcgtcaaaggcgacatcgtcaacgttggcggtgatatggccaccatcatggcgggcctggcctgtggcgaacctaacccgctgggctgggaaatcctacgtaactgcgccacccaattcatctcctgccaggacagcgttgccgcattaggtatgcgcgtgctgggtaatccgtacggcaacgacccgcgcatcatctccggtgaatccggcgctgtcggtttgggcgttctcgcagcggttcattatcacccgcaacatcaaagcctgatggaaaaactggcgctggacaaagatgccgtagtgctggttatcagcactgaaggcgacaccgacgtgaagcactaccgcgaagttgtctgggaaggcaaacacgctgtagcaccttaa

SEQ ID NO: 483982 - DNA, 1212 bp, Shigella sonnei
atggctaagaatattccattcaaactgattcttgaaaaagcaaaagattaccaggcggacatgactcgcttcctgcgcgacatggttgctattcccagtgaaagctgcgacgaaaaacgcgtagtacatcgaattaaagaagagatggaaaaagtcggcttcgataaagttgaaatcgacccgatgggcaacgttctcggttatatcggccacggcccgcgtctggtggcaatggacgctcatatcgataccgtcggcattggcaacatcaaaaactgggacttcgatccgtacgaaggcatggaaactgatgagctaatcggtggtcgcggtacttccgaccaggaaggcggcatggcatctatggtttatgccggtaaaatcattaaagacctcggtctggaagatgaatataccctgctggttaccggtactgtgcaggaagaagactgcgacggtctgtgctggcagtacattattgaacaatccggcattcgcccggaatttgtggtcagtaccgaaccaaccgactgccagatataccgtggtcagcgcggtcgtatggaaattcgtattgatgttcagggtgttagctgccacggttctgcgccagaacgcggtgacaacgccattttcaaaatgggtccgattcttggcgaattacaagaactctcccaacgtctgggttatgacgaattcctcggcaaaggcaccctcaccgtttctgaaatcttcttcacatccccaagccgttgcgctgtagcagatagctgcgccgtctctattgaccgccgtctgacctggggcgaaacctgggaaggcgcgctggacgaaatccgcgccctgcctgcagtacagaaagctaacgcggttgtttctatgtacaactacgaccgtccgtcctggactggcctggtttacccaaccgaatgctacttcccgacctggaaagtggaagaagatcacttcaccgttaaagcactggtgaatgcctacgaagggctgtttggcaaagcgccggttgttgataagtggaccttctcaactaacggcgtatctatcatgggccgtcacggcattccggtgatcggctttggcccgggtaaagaacctgaagcgcatgcacctaacgaaaaaacctggaaatctcacctggtgacctgtgccgcgatgtacgctgcaatcccgttaagctggctggcaacagagtaa

SEQ ID NO: 483983 - DNA, 1386 bp, Shigella sonnei
atgcgcgtattgatcaaaaacggcactgtcgttaacgcagatggacaagccaaacaggatttgctgattgaaagcgggattgttcgccagttgggcaacaatatttcgccgcagctcccgtatgaagaaattgatgccactggctgttacgttttccctggcggcgtggatgtccatacgcatttcaatattgatgtcggcatcgcgcgcagttgtgatgatttttttaccggtacccgcgcagctgcgtgtggcggtacaacaaccattattgaccatatgggatttggcccaaacggctgtcggttacgccatcaactggaggtttatcgtggttatgccgcccataaagcggtcatcgattacagctttcacggtgtgatccagcacattaatcacgcaatcctcgacgaaatcccgatgatggtcgaggaaggactgagcagttttaaactctatttaacctatcaatacaaactcaacgatgacgaggttttgcaggcattacgccgcttgcatgaatccggcgcgctgaccaccgtgcacccggaaaatgatgcggctatcgccagcaagcgggcggaatttatcgccgcagggttaaccgcgccgcgctatcatgccttgagtcgccctctggaatgcgaagcggaagccatcgcccgcatgattaacctggcacaaattgccggtaacgccccgctctatatcgtgcacctgtctaacggcttaggtctggattatctgcgtcttgcccgtgcgaatcaccagccagtctgggttgaaacctgcccacaatatctcctgttggacgaacgcagttacgatacagaagatggcatgaagttcattcttagcccaccgctgcgtaacgtacgcgagcaggacaaactgtggtgtggcatcagcgatggtgcgattgacgtggtggcgaccgatcactgcaccttctcgatggctcaacgcctgcaaatttctaaaggcgatttcagtcgctgcccaaatggcttacccggtgtggaaaaccgcatgcagttactgttttccagtggcgtgatgacgggacgtataacaccggaacgctttgttgaattaaccagcgcaatgcccgccaggctgtttggcctgtggccgcaaaaaggattattagcgcccggttccgatggcgacgtggtgattatcgacccacgtcagagccaacaaattcagcatcgccatctccacgacaacgccgactactcgccatgggagggttttacctgtcagggcgcgattgtcagaaccttatcccgtggtgaaacgattttctgtgacggcacctttacaggcaaagccgggcgaggtcgtttcctgcgacgcaaaccgtttgtccctcccgtgctctaa

SEQ ID NO: 483984 - DNA, 933 bp, Shigella sonnei
atgagtaagaaaattgttctcgccctgggcgggaatgcgctgggcgatgacctggccggacaaatgaaagcggtaaaaattacttctcaggcaattgttgatttaattgcccaaggacatgaagttatcgtcactcatggtaacgggccgcaggtgggcatgattaaccaagcctttgaagctgccgcaaaaactgaagcacactcgccaatgctgccgatgtctgtctgtgttgccttaagccagggttatattggttacgatctacaaaacgcgttaagagaagaactgctttctcggggcattaataaacctgtagcaacgctggttactcaggtcgaagtcgacgctaacgatccggcattcctcaacccgaccaagccgatcggttcgttctttaccgagcaagaagcagagcaactgacaaaacagggttacactctgaaagaagatgctggtcgcggctatcgccgtgttgttgcctcgccaaaaccggttgatatcattgaaaaagaaacggttaaagctctggtagatgcaggccaggtggtgatcgccgttggcggtggtggtatccctgttattcgtgaaggtaaccatctgcgtggtgccagcgcggttatcgataaagactgggccagcgcccgtttagcagaaatgattgatgccgatatgctgatcattctgactgcggtagaaaaagtggccattaacttcggtaaagagaatgaacagtggctcgatcgcctgtcattaagtgatgctgaacgctttatcgaagaaggtcattttgcgaaaggttctatgctgcctaaagtggaagctgccgcctcgtttgctcgctctcgcgcaggtcgtgaagcactgattaccgtattgagcaaagcgaaagaagggattgaaggcaaaaccggaacggtgatttgtcagtaa

SEQ ID NO: 483985 - DNA, 1626 bp, Shigella sonnei
atgaatattttcacagaggctgcaaaactcgaagagcaaaattgtccgtttgcgatggcgcaaattgttgatagccgaggctcgactccccgccattctgcacaaatgttagtgcgcgccgatggttctatcgtcggtacaattggtggcggaatggttgagcggaaggtgattgaagagtcacttcaggcattgcaggaacgtaagccgcgattattccatggacgtatggctcgtaacggtgcggatgctgtcgggtcagattgtggaggtgcaatgtcagtatttatcagcgtccatggtatgcgtccacgtctggtgttgattggcgcggggcatgtcaaccgggcgatagcccagagtgcggcgctattaggatttgatattgccgttgccgatatttatcgcgaaagcctcaatcctgaactattcccaccatcaaccacgcttctccatgctgagtcgtttggtgcggcagtggaagaactggatattcgccctgataattttgtcctgattgccacgaataatcaggatcgtgaagccctcgacaaactcattgaacagcccattgcatggttggggttgctggcaagtcgccgcaaggttcagcttttcctgcgtcaattgcgtgagaaaggcgtggctgaagaacatattgcccgtttacatgcgcccgttggttacaacataggtgcggaaacgccgcaggagatcgccatcagcgtgctggcagaaatattatgggtgaaaaataacgcgccgggtgggctgatgatgaaaccttctcatccttccggacaccagctggtggtgattcgcggtgcgggagatatcgccagtggtgtggcgctacgtctgtatcatgcgggttttaaagtgatcatgctggaagtggaaaaaccgacagtgattcgttgtaccgtggcgtttgcccaggccgtgttcgatggcgaaatgacggtcgaaggcgtcactgctcgcctggcaaccagctctgcggaagcgatgaaacttaccgaacgcggattcatccctgtgatggtagatcccgcctgttcattgcttgatgaactgaaaccgctttgcgtggtggacgctattctggcgaaacagaatttgggaacgcgggcagatatggcaccagtaacaatcgcgcttgggccgggctttactgcagggaaggattgtcatgcggtaattgaaacaaatcgcgggcactggctcggtcaggtgatttactctggttgtgcgcaggagaataccgatgttcctggcaatattatggggcataccacccgacgggtgatccgtgctcctgctgcaggcattatgcgatccaacgtgaaattaggcgatctggtgaaagagggcgatgtgattgcctggattggtgagcatgaaattaaagcaccgttgacggggatggtgcgtggcttgttgaacgacggcctggcagtggttggtggttttaaaattggtgatatcgatcctcgtggtgaaaccgctgatttcaccagcgtttctgataaagcccgggcgattggcggcggcgtacttgaggcgttaatgatgttgatgcatcagggcgtgaaagcgacaaaagaagtgctggaagtggcttaa

SEQ ID NO: 483986 - DNA, 771 bp, Shigella sonnei
gtgaaaagtatagttgacccatcggcattagtcattgatttaggtgcgcagaaacgtcccactgtgatttctgttgttggtgctggggggaaaaccagcttgcttttttggctggcagaactgctccaggctagcggcaggcgtgtgttaatcacgacgacgacacatatgtttatgccaacgtctcactggcccgtggttttctgtcgtgatcccgccatgcttcctcatgcgtctcttacatcccccatttcattttgttttcacagctggaaagcgaaccagggaaaagtgcagggatttacgccagaagcgattgatgcactggtgcaacgaccagagtgtgacgtaattctcattgaagcagatggctcgcgtggaatgccgttaaaagcgcctgatgagcacgaaccttgcatacccaaaagcagttgctgcgtgattgctgtgatgggaggacatactttgggcgcgaaagtgagcacagaaaatgtccatcgctggtcgcagtttgctgatattaccgggttaacacctgatgcaaccttgcaactgagcgatctcgttgcgctggttcgccaccctcagggggcgtttaaaaacgtaccgcaaggttgtcggcgagtctggttcattaaccgtttttctcaatgtgagaatgcgattgcacaaagcgagctccttcaaccgctgcaacaacacgacgtagaggcaatctggctgggcgatatacaagaacatcctgcaatcgcgcgcagatttgtgaattag

SEQ ID NO: 483987 - DNA, 591 bp, Shigella sonnei
atgtcagccatcgactgtataattaccgctgccggattatcatcaagaatggggcaatggaaaatgatgttcccctgggaacagggaacaattcttgatacaagtatcaaaaatgcgttgcagttttgtagccgaattattttagtcaccggctatcgtggtaatgaactgcacgaacgttatgcgaaccagagcaatatcactattattcacaacccagattatgcgcagggtttactaacatccgtcaaggccgcagtacccgcagtgcaaacagaacattgttttctcacccacggtgacatgccaaccctcaccatcgatatttttagaaaaatctggtcgttacgaaatgatggcgcaatactgccactccataatggcatccccggccatccgattttagtgtcaaaaccatgcctgatgcaggcaatccagcgacccaatgtcaccaatatgcgtcaggcactccttatgggagatcattattccgtcgaaatagaaaatgcagaaataattttagatattgatactccggacgactttattacagcgcaaaaaggtatactaaaatttagaaaatgtagttaa

SEQ ID NO: 483988 - DNA, 1806 bp, Shigella sonnei
atgggggatattatgcgtcccattccgtttgaggaacttttgacgcgcatatttgatgaataccaacaacaacgctcaatctttggtattcccgagcaacagttttactcacctgtaaaaggtaaaactgttagcgtcttcggtgaaacctgtgccactcccgtcggccctgccgctggcccgcacacgcagctcgcgcaaaatattgtcacttcctggctgactggcggacgcttcatcgaactaaaaaccgtccaaattcttgaccgcctggagctggaaaagccctgtattgatgccgaagacgaatgctttaacaccgaatggtctaccgaatttaccttgcttaaagcctgggatgaatacctcaaagcctggtttgccctgcaccttctcgaagcgatgttacagccttctgattccggtaaatcgttcatctttaatatgagcatcggttacaacctcgaaggtattaagcaaccgccgatgcaacagttcatcgacaatatgatggacgcatctgaccatccgaaattcgctcaatatcgcgatacgctgaataaattactccaggatgacgcatttttagcccgccacggattgcaggaaaaacgcgaaaacttgcaagccttacccgctcgcatccccaccagtatggtgcagggcgtcaccctctccaccatgcacggctgtcctccgcatgaaatcgaagccatttgccgctacatgctggaagaaaaagggctcaacacctttgtcaaacttaacccgaccttactggggtacgcgcgtgttcgtgagatcctcgatgtctgcggtttcggttacataggcttaaaagaagagtcatttgatcacgacctcaagctgacgcaagcactggaaatgctggagcgcctgatggtactggcaaaagaaaaatcactcggctttggcgtaaaactgactaacactctcggcaccatcaacaataaaggcgcactgcctggtgaagagatgtatatgtcaggccgtgcgctgttcccgctctccatcaatgttgcagcagttctctctcgcgcctttgacggcaaactgcccatttcttattccggtggtgccagtcagctgactatccgcgatatttttgatacaggtattcgccctattactatggcaaccgacctgctgaaacctggcggctatctgcgcttaagtgcctgcatgcgcgagctggaaggctccgacgcctggggacttgaccatgttgacgtcgaacgactgaacagactggcagcagacgcgttaaccatggaatacacccagaaacactggaagccagaagagcgtattgaagtggcagaagacctgccgctgaccgattgctacgttgccccctgtgttactgcctgcgctatcaagcaagatattccggaatacatccgtctgcttggcgaacaccgctatgccgacgcgctggaactcatctaccaacgcaacgccctacctgccattaccggtcatatttgcgatcaccagtgccaatacaactgtacccgcctggattacgacagtgcgctgaatatccgcgaactgaaaaaagtcgcgctggaaaaaggttgggatgaatataagcaacgctggcacaaacccgccggttctggttcacgccatccggttgccgtgattggtgcaggtccggcgggtctggcagcaggttacttccttgccagagcgggccatccggttacgctgtttgaacgcgaagccaatgctggcggcgtggtgaaaaatatcattcctcagttcctaatgccagtcagttaa

SEQ ID NO: 483989 - DNA, 576 bp, Shigella sonnei; identical to SEQ ID NO: 461186

SEQ ID NO: 483990 - DNA, 888 bp, Shigella sonnei
gtggtacggcgtttaacttctccgcggctcgaatttgaagctgcggcaatttatgaatatcccgaacatttacgttcattccttaatgacttacccacccgaccaggggtgtatctgtttcatggcgaaagtgacaccatgccgctctatatcggcaaaagcgttaatatccgcagtcgggtgctttctcatttacgcaccccggatgaagccgccatgctacggcaatcccggcgaattagctggatctgtaccgcaggcgaaatcggcgctctgctccttgaagcgcgattaatcaaagaacaacagccgctgtttaataaacggttgcgccgcaatcgccagctctgtgccctgcaattaaatgaaaagcgcgtcgatgtggtgtatgccaaagaggtggatttttcacgagcccccaacctgtttggcctgtttgccaataggcgcgcagctttgcaagcattgcagaccatcgctgatgaacaaaaactttgttatggcctgctgggactggaaccgttaagtcgcggtcgtgcatgttttcgttcagcgctaaaacgttgcgccggagcatgctgcggtaaagagagccatgaggaacatgcgctacgcttgcgccagtctctggagcgtttgcgggtggtgtgttggccttggcaaggtgcggtggcactgaaagaacagcacccggaaatgactcaatatcatattattcaaaactggctgtggctgggggcggttaattcgctggaagaagcgacaacgttaattcggacacccgccgggtttgatcacgacggttataaaattctttgtaagccgctgctttccggtaactatgaaattactgaacttgatccggcgaatgaccagcgagccagttga

SEQ ID NO: 483991 - DNA, 828 bp, Shigella sonnei
atgacattgcaacaacaaataataaaggcgctgggcgcaaaaccgcagattaatgctgaagaggaaattcgtcgtagtatcgattttctgaaaagctacctgcaaacttatccgttcattaaatcactggtgctcgggatcagcggcggtcaggactccacgcttgccggaaagctgtgccagatggcgattaatgagctgcgcctggaaaccggcaacgaatcactgcaatttattgccgtacgcctgccctatggtgttcaggccgacgaacaagattgccaggatgccattgcctttattcaaccggatcgcgtattaaccgttaatatcaagggcgcggtattggccagcgaacaggcattgcgggaagcaggcattgaactgagcgattttgtccgtggcaatgaaaaagcgcgtgagcggatgaaagcacaatatagcattgcgggtatgaccagcggtgtcgtggtgggcaccgatcatgcagcagaagccattaccggattcttcactaaatatggtgacggcggtacagacattaatccgctgtatcgtctcaacaaacgtcagggtaaacagttactggcggcattaggttgcccggaacacctttataagaaagcgccaacggccgatctggaagatgatcgcccttctctgccagatgaagtggcactcggcgtgacctatgacaatatcgacgactatctggaagggaaaaacgtacctgaacaggtcgccagaacaatagagaactggtatctgaaaaccgaacataaacgccgtccgccaattaccgttttcgatgatttctggaaaaagtaa

SEQ ID NO: 483992 - DNA, 339 bp, Shigella sonnei
atgaacaagaatatggcaggaattctgagtgcagcggcggtattaaccatgctggcgggttgtacggcttatgatcgtactaaagaccagtttgtacagcctgtggtgaaagacgtcaaaaaaggcatgagccgggcgcaggttgcacaaattgcgggtaaaccttcgtctgaagtgagcatgatccatgctcgtggtacttgccagacctacatcctgggtcaacgtgatggtaaagcagaaacctactttgtcgcgttagatgataccggacatgtcatcaactccggttatcagacctgtgctgaatacgacactgatccacaggctgcgaagtaa

SEQ ID NO: 483993 - DNA, 372 bp, Shigella sonnei
atgttggtttcgcaagttacccagagcatggaagctaacattcccgatacgcaaacggaagctgaagagctggaagaagtggtgatggggcttatcatcaactccggacaagcgcgcagcctggcgtatgcggcactgaaacaggcgaagcagggcgattttgctgcagcaaaagccatgatggatcagtcacggatggcattgaatgaagcgcatctggtacagacgaaactgattgaaggcgatgcgggcgaaggtaagatgaaagtgagtctggtgctggtccacgctcaggatcatttaatgacgtccatgcttgcgcgtgaactgattactgaattaattgagcttcatgaaaaactgaaggcataa

SEQ ID NO: 483994 - DNA, 840 bp, Shigella sonnei
atgcagccagtgattaacgcgccggaaattgccactgcccgagaacagcagttgtttaatggcaaaaacttccatgtgtttatctataacaaaactgagagtatcagcgggctgcatcagcacgactattatgaatttactctggtattaaccgggcgttatttccaggagattaacggtaagcgcgtgttactggaacggggcgattttgtttttattccgttaggttcgcaccatcaaagtttttatgagtttggtgccacgcgtatattgaacgttgggatcagtaaacgcttttttgagcagcattacctgccgttgttgccttattgctttgtcgcttcgcaggtataccggaccaataacgcttttctcacctatgtggaaacagtgatttcttcattgaatttccgcgaaacagggctggaagagtttgttgagatggttactttttatgtcattaaccgtttacgtcattaccgcgaagaacaggtgattgatgatgtaccgcagtggctgaaaagtacggtagaaaagatgcatgataaagagcagtttagtgaatcggcgctggagaatatggtgacgttgtcagccaaatcacaggaatatttgacgcgagcgactcaacgatattatggcaaaacaccaatgcagattattaatgagatccgtattaattttgccaaaaaacaactggaaatgaccaactattccgtgacggatattgcgtttgaggccggttatagtagcccgagtttgtttattaaaacgtttaagaaattaacgtcctttacgcctaagagctatcgtaagaaattgactgaatttaatcagtaa

SEQ ID NO: 483995 - DNA, 1353 bp, Shigella sonnei
atgagccagaaattaaaagtcgtcactattggtggcgggagcagctataccccggagttactggaaggatttattaagcgttatcacgaattgccggtcagcgaattatggctggtggatgtcgaagatggtaaagagaaactggatatcatttttgaactctgccaacggatgattgataacgctggcgtcccgatgaagctttataaaacgctggatcgccgcgaagcattgaaagatgctgatttcgttactacccaactgcgcgtaggccaattaccggcgcgcgaactggatgaacgtattccattaagtcatggttatcttggccaggaaaccaacggcgcgggcggtctgtttaaaggtctgcgtaccattccggtgatttttgacatcgtaaaagatgtcgaagaactttgtccgaatgcatgggtgattaacttcactaacccggcgggaatggttactgaagccgtttatcgtcataccggatttaaacgctttatcggcgtgtgtaatattccgatcggcatgaagatgtttattcacgatgttctgatgctgaaagacagcgatgatttatctatcgatttgttcggcctcaaccatatggtgttcattaaggatgtgctggtaaatggcaagtcgcgctttgccgaattgcttgatggtgtggcatccgggcagttaaaagcatctggcgttaaaaatattttcgatctgccatttagcgaaggcttaattcgttctctgaatctgttgccgtgttcttatttgctttattacttcaagcaaaaagagatgctggctattgaaatgggcgaatactacaaaggcggcgcacgagcgcaggtagtacagaaagtcgagaaacaactttttgagctgtataaaaacccggagttgaaagttaagccgaaagaactggaacagcgcggtggggcttattactctgatgcagcgtgcgaagtgatcaacgctatctacaacgacaagcaagctgaacattacgttaatatcccgcatcatgggcatattgataatattccggcagactgggcggtagaaatgacctgtaagctggggcgcgatggcgcgacgccacatccgcgcattacgcatttcgatgataaagtgatggggctgattcacaccattaaaggcttcgagattgctgccagcaacgccgcacttagcggagaatttaacgatgtgttactggcgctaaaccttagtccgttggtgcattccgatcgcgatgctgagctgctggcacgcgagatgattctggcgcacgagaaatggctgccaaattttgccgactgcatcgcagagcttaaaaaagcacattaa

SEQ ID NO: 483996 - DNA, 759 bp, Shigella sonnei
atggaacgcttactgattgttaatgccgatgattttggcttaagcaaaggtcagaactacggcattatcgaggcctgtcgcaatgggattgtcacatcgacgacggcgctggtgaatgggcaggctattgaccatgcggtgcagttgagtcgtgatgaaccgagtctggccatagggatgtactttgtccttactatgggcaagccactgacagctatgccggggttaacccgcgatggtgtgctgggaaaatggatctggcagttggcagaagaagatgctttaccgctggaagaaattactcaggagcttgccagtcagtatttgcgtttcattgagctatttggacgcaaacctacgcatcttgatagccatcatcatgtgcatatgttcccgcagattttcccgattgttgccaggtttgcggctgaagaggggattgcgttgcgcatcgaccgtcagccgctatctaactctggtgatttaccggctaatctgcgcagttctcagggattcagtagcgcgttttatggtgaagagattagcgaggcactgttcctgcaagtgctggatgacgcaagccatcggggtgatcgttcgctggaggtgatgtgtcatccggcgtttatcgataatactatccgtcagagtgcttactgtttcccacgcttaacggagctggatgtgttgacatcagcgtcgttgaaaggtgctatcgctcagcgtggttatcggttggggagttatcgggatgtgtaa

SEQ ID NO: 483997 - DNA, 2262 bp, Shigella sonnei
atgtcgcaacataacgaaaagaacctacatcagcaccagtcaccactacacgattccagcgaagcgaaaccggggatggactcactggcacctgaggacggatctcatcgtccagcggctgaaccaacaccgccaggtgcacaacctaccgcccctgggagcctgaaagcccctgatacacgtaacgaaaaacttaattctctggaagacgtacgcaaaggcagtgaaaattatgcgctgaccactaatcagggcgtgcgcatcgccgatgatcaaaactcactgcgtgccggtaaccgtggtccaacgctgctggaagattttattctgcgcgagaaaatcacccactttgaccatgagcgcatcccggaacgtattgttcatgcacgcggatcagcagctcacggttatttccagccatataaaagcttaagcgatatcaccaaagcggatttcctctcagatccgaacaaaatcaccccagtatttgttaggttctctaccgttcagggtggcgctggctctgcagataccgtgcgtgatatccgtggttttgccaccaagttctatactgaagagggtatttttgacctcgttggcaataacacgccaatcttctttatccaggatgcgcataaattccccgattttgttcatgcggtaaaaccagaaccgcactgggcaattccacaagggcaaagtgcccacgatactttctgggattatgtttctctgcaacctgaaactctgcacaacgtgatgtgggcgatgtcggatcgcggcatcccccgcagttaccgcaccatggaaggcttcggtattcacaccttccgcctgattaatgccgaagggaaggcaacgtttgtacgtttccactggaaaccactggcaggtaaagcctcactcgtttgggatgaagcacaaaaactcaccggacgtgacccggacttccaccgccgcgagttgtgggaagccattgaagcaggcgattttccggaatacgaactgggcttccagttgattcctgaagaagatgaattcaagttcgacttcgatcttctcgatccaaccaaactgatcccggaagaactggtgcccgttcagcgtgtcggcaaaatggtgctcaatcgcaatccggataacttctttgccgaaaacgaacaagcagcattccatccaggtcatattgttcctggtctggacttcaccaacgatccgctgttgcagggacgtttgttctcctataccgatacacaaatcagtcgtcttggtgggccgaatttccatgagattccgattaaccgtccgacctgcccttaccacaacttccagcgtgatggcatgcatcgtatggggatcgacactaacccggcgaattacgaaccgaactcgatcaacgataactggccgcgcgaaacaccgccgggaccgaaacgcggcggttttgaatcatatcaggaacgcgtggaaggaaataaagttcgtgagcgcagtccatcgtttggcgaatattattcccatccgcgtctgttctggctaagtcagacgccattcgagcagcgccatattgtcgatggtttcagttttgagttaagcaaagtcgttcgtccgtatattcgtgagcgcgttgttgaccagctggcgcatattgatctcactctggcccaggcggtggcgaaaaatctcggtatcgaactgactgacgaccagctgaatatcaccccacctccggacgtcaacggtctgaaaaaggatccatccttaagtttgtacgccattcctgacggtgatgtgaaaggtcgcgtggtagcgattttacttaatgatgaagtgagatcggcagaccttctggccattctcaaggccctgaaggccaaaggcgttcatgccaaactgctctactcccgaatgggtgaagtgactgcggatgacggtacggtgttgcctatagccgctacctttgccggtgcaccttcgctgacggtcgatgcggtcattgtcccttgcggcaatatcgcggatatcgctgacaacggcgatgccaactactacctgatggaagcctacaaacaccttaaaccgattgcgctggcgggagacgcgcgcaagtttaaagcaacaatcaaggtcgctgaccagggtgaagaagggattgtggaagctgacagcgctgacggtagttttatggatgaactgctaacgctgatggcagcacaccgcgtgtggtcacgcattcctaagattgacaaaattcctgcctga

SEQ ID NO: 483998 - DNA, 243 bp, Shigella sonnei
atgaagaaaccgctccgccagcaaaaccgccagattattagctatgtcccacgcacggaacccgcgccgccagaacatgcgataaagatggattcgtttcgtgatgtctggatgctgcgtggcaaatatgttgcgtttgtactgatgggagagtcatttctgcgctcaccggcgtttactgtgcctgaatctgcccaacgttgggcaaatcagatccgccaggaaggggaagtgactgagtaa

SEQ ID NO: 483999 - DNA, 498 bp, Shigella sonnei
atggggcgggagatgttttctacaaacttaatacagagtaattatggtgatttaaatattaaaagcctggctttcgactcttttaaagaaaggcttgagtctaccatggcggcactcactttctttatatcaacgggtcaatgtgactgcgatgaaatagcagagtcgaacttcaatcgtatgattgcctatatgtctaacattaactatgatgcctcaaagccaggagctccagcacttagttttgatacgtatctgcaggacaatgttaaatatagagtgataattaataatctttatggcagtgagtttcggataagagatattaatgagaattttgttgggatggattttacctgtgaattccgacccgaaaaaatgacgaatttgatcaatataaaaaataggttggttattcattatttaaggactatatactatgaaaaaaattatatacatcctgccgggagcatttttgctgcgattcaaaaaaaatga

SEQ ID NO: 484000 - DNA, 378 bp, Shigella sonnei; identical to SEQ ID NO: 473245

SEQ ID NO: 484001 - DNA, 1392 bp, Shigella sonnei
atgaactttccattaattgcgaacatcgtggtgttcgttgtactgctgtttgcgctggctcagacccgccataaacagtggagtctggcgaaaaaagtgctggtgggtctggtgatgggtgtggtttttggccttgccctgcataccatttatggttctgacagccaggtacttaaagattctgtacagtggtttaacatcgttggtaacggctatgttcaactgctgcaaatgatcgttatgccgttagtcttcgcctctattctgagcgcggttgcccgtctgcataacgcatctcagttaggcaaaatcagttttctgaccatcggtacgcttttgtttaccacgctgattgcggcgctggtcggtgtgctggtcaccaacctgtttggtttgacggctgaaggtctggttcagggtggtgcagaaactgcacgtctgaacgccattgaaagtaactatgttggtaaagtctctgatctgagcgttccgcagctggtcttgtcctttatcccgaaaaacccgtttgccgatcttaccggagccaatccgacgtcaattatcagcgtggtaatttttgccgcattcctcggcgtagctgcattgaaactgctgaaggatgatgcgccgaaaggtgaacgcgtcttagccgctatcgataccctacaaagctgggtgatgaaactggttcgccttgtcatgcagttgaccccttacggcgttctggctctaatgaccaaagtggttgcaggttctaacttgcaagacatcatcaaactgggaagtttcgttgtcgcgtcctacctcggtctgctgattatgtttgcagtgcatggcattctgctgggcattaatggcgtgagtccgctgaagtacttccgtaaggtatggcctgtgctgacgtttgcctttaccagccgttccagtgctgcgtctatcccactgaatgtggaagcacaaacgcgtcgtctgggcgttcctgaatccatcgccagtttcgccgcctctttcggtgcaaccattggtcagaacggctgcgccggtttgtatccggcaatgctggcggtgatggttgcgcctacggttggcattaacccgctggacccgatgtggattgcgacgctggtcggtattgttaccgttagttccgcaggcgttgccggtgtcggtggtggtgcaactttcgccgcactgattgtgctgcctgcgatgggcctgccagtaaccctggtggcgctgttaatctccgttgaaccgcttatcgacatgggccgtacggcgctaaacgttagtggctcgatgacagctggcacgctgaccagccagtggctgaagcaaaccgataaagccattctggatagcgaagacgacgccgaactggcacaccgttaa

SEQ ID NO: 484002 - DNA, 591 bp, Shigella sonnei; identical to SEQ ID NO: 473248

SEQ ID NO: 484003 - DNA, 669 bp, Shigella sonnei; identical to SEQ ID NO: 460814

SEQ ID NO: 484004 - DNA, 537 bp, Shigella sonnei
atgacgtatcaacaagctggacgcattgctgttttgaaaaggattttgggttgggtgatttttatacctgcattgatctccacattgatttctttgctgaaatttatgaatacccggcaggaaaaccaggaaggcattaatgcggtcatgctcgactttactcatgtcatgatcgatatgatgcaggcgaatacgccttttttgaatctgttctggtataactccccgacccctaattttaatggtggcgtgaacgttatgttctgggtgattttcatcctgatttttgtcggactggcgttgcaggattccggtgcccggatgagtcgccaggcgcgcttcttgcgggaaggtgttgaagatcaactcattctggaaaaagccaaaggggaagaggggctaacgcgtgaacaaattgagtcccgtattgttgttccgcaccatactattttcctgcagtttttctcactatatatcctgccggttatttgtattgctgcaggttatgtgttcttttctctgcttgggtttatttaa

SEQ ID NO: 484005 - DNA, 861 bp, Shigella sonnei
atgtggcaggcaatcagtcgtcttttgagcgagcagttaggtgaaggcgaaatcgaactgcgtaatgaactgcctggcggagaagtccatgccgcatggcatttgcgctatgcaggacatgactttttcgtcaaatgtgatgaaagggaactgcttcccggttttaccgccgaagccgaccaactggagttactgtcgcgtagtaaaaccgtcaccgtgcctaaggtttgggcagtaggcgctgaccgtgactacagttttctggtgatggattatctcccacctcgtccgctggatgcgcatagcgcatttattcttggtcagcaaattgcgcgtttacatcaatggagtgaccaaccacaatttggcctcgattttgataactcgctctccacaactccacagcccaacacctggcaacgtcgctggtcaacgttttttgctgaacaacggattggctggcagttggaactggcagcagagaaagggatcgctttcggcaatatcgacgccatcgtcgagcatattcagcagcgtctggcctcgcatcaactgcagccttctctgttgcacggcgatttatggtccggcaactgtgcgctgggtccggatggcccgtacattttcgaccctgcctgctactggggtgaccgagagtgcgacctggcgatgttaccgctgcatactgaacagccgccacaaatctatgacggctatcagtcagtatccccgctacctgccgatttccttgaacgtcaaccggtttaccaactctacacgctgttaaatcgtgcaagattatttggcggtcagcatttggttattgctcagcagtcattggatagattattagcagcatga

SEQ ID NO: 484006 - DNA, 291 bp, Shigella sonnei
atggccagtggcgatcttgtccgttatgtcataaccgtcatgttgcatgaggatacattgactgaaattaacgagttgaataattacctgactcgcgacggttttttgctcaccatgacggatgatgagggaaatatccatgagctggggactaacacttttggacttatcagtacccaaagtgaagaagaaattagagaactggtttcggggcttacccaaagtgcaaccggcaaagatcctgaaatcaccatcacgacttgggaggaatggaatagcaacagaaaataa

SEQ ID NO: 484007 - DNA, 930 bp, Shigella sonnei
atggtacgtatctatacgttgacacttgcgccctctctcgatagcgcaacaattaccccgcaaatttatcccgaaggaaaactgcgctgtaccgcaccggtgttcgaacccgggggcggcggcatcaacgtcgcccgcgccattgcccatcttggaggcagtgccacagcgatcttcccggcgggtggcgcgaccggcgaacacctggtttcactgttggcggatgaaaatgtccccgtcgctactgtagaagccaaagactggacccggcagaatttacatgtacatgtggaagcaagcggtgagcagtatcgttttgttatgccaggcgcggcattaaatgaagatgagtttcgccagcttgaagagcaagttctggaaattgaatccggggccatcctggtcataagcggaagcctgccgccaggtgtgaagctggaaaaattaacccaactgatttccgcttcgcaaaaacaagggatccgctgcatcgtcgacagttctggcgaagcgttaagtgcagcactggcaattggtaacatcgagttggttaagcctaaccaaaaagaactcagtgcgctggtgaatcgcgaactcacccagccggacgatgtccgcaaagccgcgcaggaaatcgttaatagcggcaaggccaaacgggttgtcgtttcccttggtccacaaggagcgctgggtgttgatagtgaaaactgcattcaggtggtgccaccaccggtgaaaagccagagtaccgttggcgctggtgacagcatggtcggcgcgatgacactgaaactggcagaaaatgcctctcttgaagagatggtccgttttggcgtagctgcggggagtgcagccacactcaatcagggaacacgtctgtgctcccatgacgatacgcaaaaaatttacgcttacctttcccgctaa

SEQ ID NO: 484008 - DNA, 759 bp, Shigella sonnei
atgaagcttttgaagacagttcctgccatcgttatgttggcggggggcatgtttgcgtcactgaatgcagctgccgatgattccgtttttactgtcatggacgatcctgccagcgctaaaaaacctttcgaaggtaatctgaacgcaggatatcttgcacaatcaggcaatacgaaaagctcctcacttacggctgacaccaccatgacctggtatggacaaaccactgcctggtcgctgtgggggaacgccagtaatacttcttctaatgatgagcgttcttcagaaaaatatgcggcgggcgggcgtagccgttttaatttaactgattatgactatttatttggtcaggcaagctggctgacagaccgttataacggctatcgagagcgcgatgtgttgaccgcgggttatggtcgccagtttttgaatggcccggtacacagtttccgctttgaattcggcccaggtgtgcgttacgacaaatataccgacaatgccagtgaaacccagccgctgggctatgcctccggggcttatgcatggcagttgactgacaacgctaaatttacgcagggtgtttcggtctttggcgcggaagatacaacgctgaactccgaaagcgcattaaatgttgctattaatgaacattttggactgaaggtggcttacaacgtcacatggaactctgaacctccagagtctgcaccggaacataccgatcgtcggacaaccttatcgctgggctacagcatgtaa

SEQ ID NO: 484009 - DNA, 681 bp, Shigella sonnei
atgatgaacggacaaactgacaacgtaaaaatatttatgcaagaaattcagtcactggtatacaatcatatcattcatgaagataatctggttaaattactgcaaactaaaagtgctaacgaaacacctggactctatatctccatgttgtatggattcgatgaaataatcgatatctttctgaatgcattaaccactccaatagcacaagaacttttaaacaaaaaaatggtgatgagtattttagccatgaaaatacatgatggtgagctaggattatacgccgcaatggaaaataatcaccctttgtgtgtcacacggttcctctctaaaattaatggcatcgcctttaaatacaagttgagcaaagctaacatcatggatttattaaaaggagctacagcacagggaacccctgcattatacatcgccatgagcaagggtaatgaagacgtcgtgttatcttatatatcgacgctgggtgcttttgcaaaaaaacattcttttagtcaacatcagttatttacactattggccgctaaaaatcatgacaacatgtcagctgttcatatagccattcatcataagcattataaaactgtagaaacatattatgctgctataaatgtcatcagccaaagcctgagttttagtgctgatgaaataaagacgtatttataa

SEQ ID NO: 484010 - DNA, 768 bp, Shigella sonnei
ttgatacccgtagagcgtcgccaaatcatccttgagatggtagctgaaaaaggcattgtcagtattgctgaactaacggacagaatgaatgtgtcacatatgaccattcgtcgggatttacaaaaactggagcagcagggagccgttgtgctggtgtccggaggcgtccagtctccgggacgcgtggcgcatgaaccttctcatcaggtaaaaactgcgctggcaatgacgcaaaaagcggctattggcaagctggcggcaagtcttgttcagccgggaagttgtatctatctggatgcgggaacgaccacgttagcgatagcacagcatctgattcacatggagtcactgactgtggtcacaaacgatttcgttattgcgaactacttgctcgacaacagtaattgcacaattattcacactggcggtgcagtgtgtcgggaaaaccgttcctgtgtcggggaagccgctgcgaccatgctgcgcagcctgatgattgatcaggcttttatttctgcatcgtcatggagtgtgcgggggatttctacgccagcggaagataaagtcacggtgaaacgggcgattgccagtgccagccgccagcgagttttggtctgtgatgcgacgaaatatggtcaggtggcgacatggctggcgttaccattaagcgagtttgatcagattatcacagacgacggtttgccggagagtgccagtcgcgcgctggcgaagcaggatctctctttgctggtagcgaaaaatgaataa

SEQ ID NO: 484011 - DNA, 909 bp, Shigella sonnei
atgaaaacgggatctgagtttcatgtcggtatcgttggcttagggtcaatgggaatgggagcagcactgtcatgtgtccgcgcaggtctttctacctggggcgcagacctgaacagcaatgcctgcgctacgttgaaagaggcaggtgcttgcggggtttctgataacgccgcgacgtttgccgaaaaactggacgctctgctggtgctggtggccaatgcggcccaggttaaacaggtgctgtttggtgaaacaggcgttgcacaacatctgaaacccggtacggcagtaatggtttcttccactatcgctagtgctgatgcgcaagaaattgctaccgctctggctggattcgatctggaaatgctggatgcgccagtttctggtggtgcagtaaaagccgctaacggtgaaatgactgtcatggcctccggtagcgatattgcctttgaacgactggcacccgtgctggaagccgttgccggaaaagtttatcgcataggtgcagaaccgggactaggttcgaccgtaaaaattattcaccagttgttagcgggcgtacatattgctgccggagccgaagcgatggcacttgcagcccgtgcggggatcccgctggatgtgatgtatgacgtcgtgaccaatgccgccggaaattcctggatgttcgaaaaccggatgcgtcatgtggtggatggcgattacaccccgcattcagccgtcgatatttttgttaaggatcttggtctggttgccgatacagccaaagccctgcacttcccgctgccattggcctcaacagcattgaatatgttcaccagcgccagtaacgcgggttacgggaaagaagacgatagcgcagttatcaagattttctctggcatcactctaccgggagcgaaatcatga

SEQ ID NO: 484012 - DNA, 1263 bp, Shigella sonnei
atgatcaagattggcgttatcgccgatgattttaccggcgcgacggatatcgccagttttctggtggaaaacggtctaccaacggtacaaattaacggtgttccaacaggtaaaatgccggaagcaatcgacgcactggtgatcagcctgaaaacgcgctcctgtccggtggttgaagccacacagcaatcgctggcggctctgagctggttgcaacagcaaggttgcaaacagatctatttcaaatactgctctactttcgacagtacggcgaaaggtaatattggcccggttaccgatgccttaatggatgctctcgacacgccgtttacggtcttctctccggccctgtcggtcaacggacgtacggtttatcaggggtatttgttcgtaatgaatcaactgctggccgaatccgggatgcgccatcacccggtaaatcccatgaccgacagctatcttccccgtctggttgaagcgcaatccacagggcgctgcggcgtcgtttcggcacatgttttcgaacaaggcgtggatgccgttcgtcaagagctggctcgcttacagcaagagggctaccgctacgcggtgcttgatgcgctgaccgaacaccatctggaaattcagggagaagccttgcgcgatgccccactggtaacgggcggttctggtctggcgattggcctggcccggcagtgggcgcaagaaaacggtaaccaggctcgcgaagcagggcgtccgctcgctgggcgcggcgtagtgctctccggttcatgctctcaaatgaccaaccgccaggtggcacattaccgtcaaattgcaccagcccgtgaagttgatgtggcacgctgcctctcaaccgaaactctggccgcttatgcacacgaactggcagagtgggttctgggccaggaaagtgtacttgctccactggtttttgccaccgccagcactgacgcattggcagcaattcaacagcaatacggtgcacaaaaagccagtcaggcagtagaaactctgttttctcaactagcggcgcggttagcagcggaaggcgtgacacgctttattgtcgcaggcggtgagacctccggcgtagtcacacagagcctgggcataaaagggtttcatattggcccaaccatttcccccggcgtgccgtgggtaaacgcactggataagcctgtctcactcgcccttaaatctggcaacttcggtgatgaagcctttttttcacgagcccaaagagagtttttatcatga

SEQ ID NO: 484013 - DNA, 639 bp, Shigella sonnei
atgagcgatttcgcaaaagtagagcagtctttgcgagaggagatgacgcggattgccagttcattctttcagcgcggctatgcaaccggttcggctggcaatctgtcgctgcttttacctgacgggaatttactggcgacaccgacaggttcatgcctgggcaatctcgatccgcagcggctttccaaagtcgccgcggatggcgaatggttaagtggtgacaaaccctcgaaagaggtgctctttcatctggcgctgtatcgcaacaatccgcgctgtaaagcggtggtgcatttgcacagcacatggtcgacggcgctttcctgcctgcaagggctggacagcagcaacgttattcgtccgttcacaccatacgtggtgatgcggatgggaaatgtcccgctggtgccttattaccgaccgggcgataaacgcatcgcacaggatctggcggaactggcagcagacaatcaggcttttttactggcaaatcatggcccagtggtttgcggtgaaagcctgcaagaagccgccaacaatatggaagagctggaggaaacggcaaagctgatttttattctcggtgaccgcccgatccgttatctgaccgcaggtgaaattgcggaattaaggagttaa

SEQ ID NO: 484014 - DNA, 777 bp, Shigella sonnei
atgcctcgttttgcagctaatttatccatgatgttcaccgaagtgccttttattgaacgcttcgccgcagcgcgaaaagccgggttcgatgctgtggaatttctgtttccctatgactactccaccctgcaaatccaaaagcaactggagcaaaaccatctgacactggcgctgttcaataccgctcccggagatattaatgcgggggaatggggattatccgcccttcccggacgtgagcacgaagcacacgcagacatcgacctggcactggaatatgcattggcgctcaattgtgaacaagtccatgtgatggcaggcgtcgtgcccgctggcgaagacgctgaacggtaccgggcagtatttatcgataatctccgctacgctgccgaccgctttgcgctacacggcaagcgaatattagttgaagcactcagccccgacgttaagcctcattatctcttctccagccagtatcaggcactggctattgttgaagaggttgcgcgagataacgtgtttattcaactagatacttttcatgcgcaaaaagtagatggcaacctgacgcatttaatccgcgactacgctgggaaatatgcgcacgtacaaattgccggactacctgatcgacatgaaccggacgatggagaaatcaactatccgtggctgttccgcctgttcgatgaggtgggatatcagggctggatcggttatgaatataaacctcgtggcctcaccgaagaagggcttggctggtttgacgcctggcgctaa

SEQ ID NO: 484015 - DNA, 1365 bp, Shigella sonnei
atgtccacaattacattgttatgcattgcgttagctggcgtaatcatgctgttgctgctggtcatcaaggcaaaggtacaaccattcgttgctctgctcctcgtcagcctgttagtcgcacttgcggcgggtataccggcgggcgaagtgggtaaagtgatgatcgccgggatgggcggtgtgcttggttccgtcactattattattggtctgggcgctatgctggggcgtatgatcgaacactctggtggtgcagagtcactggctaattatttcagtcgcaagttaggtgacaaacgaactatcgctgcgctgactctggcagcgttcttcctcggtattcccgtcttctttgatgtcggctttattattcttgctccaatcatttacggttttgccaaggttgccaaaatatcgccactcaaatttggcctgcctgtcgctgggatcatgctaactgtacatgtggcggtaccgccgcatccaggccctgtcgccgcagcggggttactccacgcagacatcggctggctaaccatcatcggtattgcgatttctattcccgtagggattgttggctactttgcagcgaaaataatcaataagcaccaatatgcgatgtcggtggaagtactggaacagatgcaactggctccggccagtgaggaaggcgcgacaaaattaagcgataaaataaatccaccgggcgtcgcgctggtcacctcgctaattgttattcctatcgcgattatcatggcgggtacggtttccgcaacactgatgccgccttcgcatcccctgcttggtacgctacagctgatcggctcaccaatggtagctctaatgattgcgctggtgctggcattctggttattggctttacgtcgcggctggagcttacaacacaccagcgacattatgggctcagcccttcccactgcggcggtagtgattttggttactggtgctggaggggtatttggcaaagtgctggtggaatcgggcgtcggcaaagcccttgccaacatgctacaaatgattgacctgcctctgttaccagccgcatttattatttcactggcgctgcgtgcatcgcaggggtcagcaaccgtagcaatcctgacaaccggcgggttactctcagaagcggtgatgggattgaatccgattcagtgcgtattggtgacgctggcagcctgctttggtgggcttggggcgtcacatattaatgactcagggttctggattgtgaccaaatatctggggttgtcggtagcagacggtctgaaaacctggacagtgttaacgaccattctcggttttaccggattcttaattacctggtgcgtatgggcggtaatttga

SEQ ID NO: 484016 - DNA, 519 bp, Shigella sonnei
atgaaccaaacccgtactattcgtttgccgattcacatcgtaaaggagctgaacgtttacctgcgaaccgcacgtgagttgtcccataagctggaccatgaaccaagtgcggaagagatcgcagagcaactggataagccagttgatgacgtcagccgtatgcttcgtcttaacgagcgcattacctcggtagacaccccgctgggtggtgattccgaaaaagcgttgctggacatcctggccgatgaaaaagagaacggtccggaagataccacgcaagatgacgatatgaagcagagcatcgtcaaatggctgttcgagctgaacgccaaacagcgtgaagtactggcacgtcgattcggtttgctggggtacgaagcggcaacactggaagatgtaggtcgtgaaattggcctcacccgtgaacgtgttcgccagattcaggttgaaggcctgcgccgtttgcgtgaaatcctgcaaacgcaggggctgaatatcgaagcgctgttccgcgagtaa

SEQ ID NO: 484017 - DNA, 444 bp, Shigella sonnei
atgagtcagaatacgctgaaagttcatgatttaaatgaagatgcggaatttgatgagaacggagttgaggtttttgacgaaaaggccttagtagaagaggaacccagtgataacgatttggccgaagaggaactgttatcgcagggagccacacagcgtgtgttggacgcgactcagctttaccttggtgagattggttattcaccactgttaacggccgaagaagaagtttattttgcgcgtcgcgcactgcgtggagatgtcgcctctcgccgccggatgatcgagagtaacttgcgtctggtggtaaaaattgcccgccgttatggcaatcgtggtctggcgttgctggaccttatcgaagagggcaacctggggctgatccgcgcggtagagaagtttgacccggaacgtggtttccgcttctcaacatacgcaacttag

SEQ ID NO: 484018 - DNA, 1140 bp, Shigella sonnei
atgagcgcgggaagcccaaaattcaccgttcgccgcattgctgctttgtcactggtttcgctatggctggcaggctgttctgacacttcaaatccaccggcaccggtcagctccgttaatggcaatgcgcctgcaaatactaattctggtatgttgattacgccgccgccgaaaatggggacgacgtctacagcccagcaaccgcaaattcagccggtacagcagccacaaattcaggctactcaacaaccgcaaatccagccagtgcagccagtagctcagcagccggtacagatggaaaacggacgcatcgtctataaccgtcagtatgggaacattccgaaaggcagttatagcggcagtacctataccgtgaaaaaaggcgacacacttttctatatcgcctggattactggcaacgatttccgtgaccttgctcagcgcaacaatattcaggcaccatacgcgctgaacgttggtcagaccttgcaggtgggtaatgcttccggtacgccaatcactggcggaaatgccattacccaggccgacgcagcagagcaaggagttgtgatcaagcctgcacaaaattccaccgttgctgttgcgtcgcaaccgacaattacgtattctgagtcttcgggtgaacagagtgctaacaaaatgttgccgaacaacaagccaactgcgaccacagtcacagcgcctgtaacggtaccaacagcaagcacaaccgagccgactgtcagcagtacatcaaccagtacgcctatctccacctggcgctggccgactgagggcaaagtgatcgaaacctttggcgcttctgaggggggcaacaaggggattgatatcgcaggcagcaaaggacaggcaattatcgcgaccgcagatggccgcgttgtttatgccggtaacgcgctgcgcggctacggtaatctgattatcatcaaacataatgatgattacctgagtgcctacgcccataacgacacaatgctggtccgggaacaacaagaagtgaaggcggggcaaaaaatagcaaccatgggtagcaccggaaccagttcaacacgcttgcattttgaaattcgttacaaggggaaatccgtaaacccgctgcgttatttgccgcagcgataa

SEQ ID NO: 484019 - DNA, 627 bp, Shigella sonnei
atggtaagcagacgcgtacaagcacttctggagcaattacgtgcgcaaggtattcaggatgagcaggtgctgaatgcacttgccgccgtgccgcgtgaaaaattcgttgatgaagcgtttgaacaaaaagcctgggacaatatcgccttgccgataggtcaggggcagacaatttcgcagccgtatatggtggcgcgaatgaccgaattactcgagctgacgccgcagtcgcgggtgctggaaattggcactggttcgggatatcaaacggcaatcctagcgcatcttgtccagcatgtttgctcggttgaacggattaaaggcttgcagtggcaggcacgtcgccgcctgaaaaatcttgatttacataatgtttcaacccgtcatggcgatggatggcaaggttggcaggcacgtgcgccgtttgacgctatcattgttacggcggcaccgccggaaattccaactgcgctaatgacgcagctggacgaaggcgggattctcgtcttacccgtaggggaggagcaccagtatttgaaacgggtgcgtcgtcggggaggcgaatttattatcgataccgtggaggccgtgcgctttgtccctttagtgaagggtgagctggcttaa

SEQ ID NO: 484020 - DNA, 762 bp, Shigella sonnei; identical to SEQ ID NO: 459249

SEQ ID NO: 484021 - DNA, 1050 bp, Shigella sonnei
atgattgagtttgataatctcacttacctccacggtaaaccgcaaggcaccgggctgctgaaagccaatccggaagactttgtggtggtggaagatttgggctttgagcctgatggtgaaggtgagcatattctggttagaatcctcaaaaacggctgcaatacccgttttgtggcggatgcactggcgaaattcctgaaaattcatgcccgtgaagtcagcttcgctgggcaaaaagacaaacatgctgttacggaacagtggttatgcgctcgcgtgccaggcaaggaaatgcccgatctgagcgcctttcaactggaaggctgccaggtgctggagtatgcgcggcacaagcgcaagctgcgtttaggcgcgctgaaaggtaacgcctttaccctggttctgcgcgaagtgagcaatcgcgatgacgttgaacaacgtctgatcgatatttgcgtaaaaggtgtaccgaactacttcggtgcccaacgttttgggattggcggtagcaacttgcagggggcgcagcgctgggcgcaaaccaatactccggtgcgcgatcgcaataaacggagtttttggttgtcggcagcccgcagtgcgttgtttaatcagattgttgctgagcgcctcaaaaaagcagacgttaatcaagttgttgacggcgatgcgctacaattagccggacgtggtagctggtttgtcgcaaccaccgaagaactggcggaattacagcgtcgcgtcaacgataaagagctgatgataaccgccgcattgccgggtagtggcgaatggggaactcagcgtgaagcgctggcattcgaaaaggcagctgtcgccgcagaaactgaattacaagctttactggtgcgcgaaaaagttgaagccgcgcgcagagcgatgttgctgtatccgcaacaattaagctggaattggtgggatgacgtcaccgtagagatccgtttctggcttccggcgggtagttttgcaaccagcgttgtcagggaacttatcaacacaacaggtgattatgcgcatattgctgagtaa

SEQ ID NO: 484022 - DNA, 480 bp, Shigella sonnei
atgcgaattggacacggttttgacgtacatgcctttggcggtgaaggcccaattatcattggtggcgtacgcattccttacgaaaaaggattgctggcgcattctgatggcgacgtggcgctccatgcgttgaccgatgcattgcttggcgcggcggcgctgggggatatcggcaagctgttcccggataccgatccggcatttaaaggtgccgacagccgcgagctgctacgcgaagcctggcgtcgtattcaggcgaagggttataccctgggcaacgtcgatgtcactattatcgctcaggcaccgaagatgttgccgcacattccacaaatgcgcgtgtttattgccgaagatctcggctgccatatggatgatgttaacgtgaaagccactactacggaaaaacttggatttaccggacgtggggaagggattgcctgtgaagcggtggcgctactcattaaggcaacaaaatga

SEQ ID NO: 484023 - DNA, 711 bp, Shigella sonnei; identical to SEQ ID NO: 459246

SEQ ID NO: 484024 - DNA, 312 bp, Shigella sonnei; identical to SEQ ID NO: 32591

SEQ ID NO: 484025 - DNA, 324 bp, Shigella sonnei
atgcgtaatagccataacattacactaacaaataacgacagccttactgaggatgaagaaaccacatggtcactgcctggtgccgtggtcggttttatctcctggttatttgcgctggcgatgccgatgttgatttatggctctaacacgctgttcttctttatctacacctggcctttctttctggcgctgatgcccgtcgcggtagtggtggggattgcgctgcattcattgatggacggaaagctacgctacagtattgttttcaccctggtgacagtaggcattatgtttggcgcactgtttatgtggctactgggctaa

SEQ ID NO: 484026 - DNA, 606 bp, Shigella sonnei
atggcgctgcatgacgaaaacgtcgtctggcatagccatccggtcactgtgcaacaacgcgagctacaccacggtcatcgtggtgtagtgctgtggtttaccggcctctccgggtccggtaaatcaacggtcgccggggcgctggaggaggcgttacataaactcggcgtcagtacgtatctgctggatggcgataatgttcgccacggattatgcagcgatctcggttttagcgatgccgatcgtaaagagaatatccgtcgcgtcggtgaagtggcgaatttgatggttgaagccggactggtggtgctgaccgcatttatctcgccacaccgcgccgaacgccagatggttcgtgaacgcgtaggagaagggcgctttatcgaagtgtttgtcgatacgccgctggcgatttgcgaagcccgcgatccaaaaggcttatataagaaagcgcgtgccggtgaactgcgcaactttacgggaatagattccgtttacgaagcgcctgaatcggcagaaattcatctcaatggtgaacaattagtaacaaatttggtacagcaattattagatctgttgagacagaacgatattatcagatcctga

SEQ ID NO: 484027 - DNA, 1428 bp, Shigella sonnei
atgaacaccgcacttgcacaacaaatcgccaatgaaggcggcgtcgaagcctggatgattgcgcaacaacataaaagcctgctgcgttttctgacctgtggcagcgtcgatgacggcaaaagcactctgattggtcgcctgctgcacgatactcgccaaatctatgaagatcagctctcatcgctgcataacgacagtaagcgtcacggtacccagggcgaaaagctggatctggctctgctggtggacggcctgcaagctgagcgcgaacagggcatcactattgatgtggcctaccgctatttctctaccgagaagcgtaaatttattatcgccgacaccccagggcacgagcagtacactcgcaatatggcgactggcgcatcgacatgtgaactggcgatcttactgatcgatgcccgtaaaggcgtgctcgatcaaacccgtcgtcacagttttatctccacactgttggggatcaaacatctggtcgtggcgatcaacaaaatggatctggtggattacagtgaagagacgttcacccgtattcgtgaagattatctgacctttgccgggcagctgccgggtaatctggatatccgctttgtgccgctctctgcactggaaggcgacaacgtggcatcgcaaagtgaaagtatgccgtggtacagcggtccgacactgctcgaagtgctggaaaccgtggagatccagcgagtggtggatgctcagccaatgcgcttcccggtgcagtacgttaatcgcccgaatctcgattttcgtggctacgccggaacgctggcatccggtcgcgtggaagtcgggcaacgtgtaaaagtgctgccctctggtgtggaatcaaacgtcgcgcggatcgtgacttttgatggtgatcgcgaagaagcctttgccggagaagcgatcaccctggtgctgacggatgagatcgacatcagccgtggcgatctgctgctggcggcagacgaagcgttaccggcggtgcagagcgcgtcggtggatgtggtatggatggcggaacagccgctttctccagggcagagttacgacatcaaaattgccggtaagaagacgcgcgcgcgtgttgatggcattcgctatcaggttgatattaataaccttacccagcgtgaagttgaaaacctgccactgaatgggatcggcctcgtggatctcacttttgacgagccgctggtgttagatcgttatcaacaaaatccggtgacgggtgggctgatttttatcgatcgcctgagcaatgtgaccgtgggtgccggtatggtgcacgagccagttagccaggcaactgctgcgccatctgaattcagtgcattcgaactggaattgaatgctctggttcgtcgccactttccgcactggggcgcgcgcgatttgctgggggataaataa

SEQ ID NO: 484028 - DNA, 909 bp, Shigella sonnei
atggatcaaatacgacttactcacctgcggcaactggaggcggaaagcatccacattattcgcgaggtggcggcagaattctcaaatccggtgatgctctactctatcggtaaagattccagcgtcatgctgcatttggcgcgcaaggcgttttatccaggtacgctgcctttcccgttgctgcatgtcgataccggctggaaattccgcgagatgtatgagttccgcgatcgtacggcgaaagcctacggctgcgagctgctggtgcataaaaacccggaaggcgtggcgatggggattaatccattcgtgcacggcagcgcgaaacataccgatattatgaaaactgaaggcctgaaacaggcgctgaacaaatacggttttgatgccgccttcggtggtgcgcgccgtgacgaagagaaatcccgcgctaaagagcgaatctactctttccgtgaccgcttccatcgctgggatccgaaaaatcagcgcccggagctgtggcacaactacaacgggcaaattaacaaaggcgaaagcatccgcgtcttcccactctctaactggaccgagcaggatatctggcaatacatctggctggaaaatatcgacattgtgccgctgtatctcgctgcggaacgtccggttctggaacgcgacggtatgttgatgatgattgatgacaaccgtatcgacctgcaaccgggcgaagtgattaaaaaacggatggtgcgtttccgtacgctgggctgctggccgctgaccggtgcggtggagtcaaatgcacaaacactgccggaaatcatcgaagagatgctggtttccaccaccagtgaacgtcagggccgcgtgattgaccgcgaccaggcgggatctatggagctgaaaaaacgtcaggggtatttttaa

SEQ ID NO: 484029 - DNA, 1038 bp, Shigella sonnei
atgttttccgcattgcgccaccgtaccgctgccctggcgctcggcgtatgctttattctccccgtacacgcctcgtcacctaaacctggcgattttgctaatactcaggcacgacatattgctactttctttccgggacgcatgaccggaactcctgcagaaatgttatctgccgattatattcgccaacagtttcagcaaatgggttatcgcagtgatattcggacatttaatagtcggtatatttatactgcccgcgataatcgtaagagctggcataacgtgacgggaagtacggtgattgccgctcatgaaggcaaagcgccgcagcagatcatcattatggcgcatctggatacttacgccccgctgagcgatgctgacgccgatgccaatctcggcgggctgacgttacaaggaatggatgataacgccgcaggtttaggtgtcatgctggaactggcagaacgcctgaaaaatacgcctaccgagtatggtattcgatttgtggcgaccagcggcgaagaggaaggaaaattaggcgctgagaatttactcaagcggatgagtgacaccgaaaagaaaaatacgctgctggtgattaatctcgataacttaattgttggcgataaattgtatttcaacagcggtgtaaaaacccctgaagcagtaaggaaattaacgcgcgacagggcgctggcaattgcgcgcagtcacggaatagccgcaacgaccaatccgggtttgaataaaaattatccgaaaggcactgggtgttgtaatgacgcagaaatattcgacaaagcgggcattgctgtactttcggtggaagcgactaactggaatcttgggaataaggatggttatcagcaacgcgcaaaaacagccgcattccctgcgggaaatagctggcatgacgtaagactggataatcaacagcatattgataaggcacttcctggaagaatagaacgtcgctgccgtgacgttatgcggataatgctacctctggtgaaggagttggcgaaggcgtcttga

SEQ ID NO: 484030 - DNA, 294 bp, Shigella sonnei
atgagcatggtcgtggttgttacagaaaatgtccctccgcgcttacgtggacggctcgcaatctggctactggaagtgcgtgccggtgtgtatgttggtgatacatcaaaacgtattcgggagatgatctggcagcaaattacccaactggctggttgcggaaatgtggtgatggcctgggcgaccaatatcgagtcgggttttgaatttcagacctggggagaaaacagacgtattccggtggatttggatgggttacgtttggtttcttttcttcctgttgataatcaataa

SEQ ID NO: 484031 - DNA, 570 bp, Shigella sonnei
atgtatgaattacgttttcgtgaaccaccgccagctcgccgttcagtggagcagttacgtggaattgagggatctcgcgttcgccagacgtatgcattactggcgaaacaatatggtgtgaaatggaatggtcgcaaatacgatcctaaagactgggaaaaaggcgatgttgtgaatcgctgcatcagtgctgctacatcatgtctgtacggtatatctgaagcggcagtattagccgcgggatatgcgcccgctattgggtttatccatagtggcaaaccgctttcatttgtttatgacatagccgatatcattaaatttgattcggttgtgccaaaggcatttgaaatagcagcgaggcaacccgcagaacctgataaagaagtcagattagcctgtcgcgatattttccgtagcactaagttaacgggcaaattaataccgttaattgaggaagtccttgctgcaggtgaaattgaaccaccacaacccgcgccggatatgttaccgcctgccatccctgaacctgaaacgctgggtgatagtggtcaccgggggcgcggcggatga

SEQ ID NO: 484032 - DNA, 306 bp, Shigella sonnei
gtgacgtttgtaccgctgagcccgatcccattaaaagatcgcacttccatgatcttcctccagtacggtcaaatcgacgtactggacggcgctttcgtgctgatcgacaaaaccgggatccgcacgcatattccagtgggatcggtcgcctgcattatgctcgaaccgggaacaagagtttcccacgcggcagtccatctggccgccacggtgggaacactgctggtctgggtcggtgaagcgggcgttcgcgtttactcctccggacaacccggaggggcgcgggcagataaattactctactag

SEQ ID NO: 484033 - DNA, 324 bp, Shigella sonnei
atggaggcgaaacggcaggtgagggggcaggtggaaggaagtgatgtctggttgcatcaacaacaggctgcgctggactggctggcagcgcagggggagagaagcggttttacactgctggatacttcggttgatgcctaccgacaacagcaactgcggcgggaaaactcccggcaactgatccagttcagtagcgtggattatacggggatgcttacggtcaccgctcctgggttatttctgcaacgtctcagtcaggggtatggcaaaagccgggcgttcggttgtggtctgatgctgatcaaacccggagcagaggcgtga

SEQ ID NO: 484034 - DNA, 303 bp, Shigella sonnei; identical to SEQ ID NO: 21213

SEQ ID NO: 484035 - DNA, 1872 bp, Shigella sonnei
atgatggacagcttacgcacggctgcaaacagtctcgtgctcaagattattttcggtatcattatcgtgtcgttcatattgaccggcgtgagtggttacctgattggcggaggcaataactacgccgcaaaagtgaatgaccaggaaatcagccgtgggcagttcgagaacgcctttaacagcgagcgtaatcgcatgcagcaacagctgggcgatcaatactccgagctggcagcgaacgaaggctatatgaaaaccctgcgtcaacaggtgctgaatcgtctgatcgacgaggcgctgttggatcagtacgctcgtgagctgaaactgggtatcagtgatgagcaggttaaacaggcgattttcgcgaccccagccttccaggttgacggcaaatttgataacagccgctataacggtatcctcaaccagatggggatgaccgccgatcagtacgcccaggcgctgcgtaaccagctcactacccaacagctgattaacggtgttgccggtaccgattttatgctgaaaggtgaaaccgacgagctggcggcactggtcgcgcaacaacgcgtggtgcgtgaggcgactatcgatgttaacgcgctggcggcgaagcagcctgtgaccgaacaggagattgccagctactacgaacaaaacaaaaacaatttcatgacgccggaacaattccgcgtgagttacatcaagctggatgccgcaacgatgaagcaaccggttagcgatgcggatatccagagctactacgatcagcatcaggatcaattcacccagccgcagcgtacccgctacagcatcatccagaccaaaactgaagatgaagcgaaagcggtacttgatgagctgaataaaggcggtgattttgctgcattagccaaagaaaaatctgccgatattatctctgcccgtaacggcggcgatatgggttggttagaagatgccactatccccgacgaactgaaaaatgctggtctgaaagaaaaaggccaactgtctggtgtcatcaaatcttcggtcggtttcctgattgtacgtctggacgacattcagccagcgaaagtgaaatcgttagacgaagtacgtgacgacattgcggcgaaagtgaaacacgaaaaagccctcgatgcgtactatgcgctgcagcagaaagtgagcgatgcggcaagcaacgacaccgagtctctggccggtgcagagcaagctgccggcgttaaagccactcagacgggttggttcagcaaagataacctgccggaagagttgaacttcaagccggttgccgacgctatctttaacggcggtctggtaggtgaaaacggcgcgccgggcatcaactctgacatcatcaccgtagacggcgaccgcgcattcgtgctgcgcatcagcgagcacaaaccggaagcggtgaaaccgttggcagatgttcaggaacaagttaaggcactggttcagcacaacaaagctgaacaacaggcgaaagtggatgctgagaaactgctggttgatttgaaagccggcaaaggggcggaagctatgcaggctgccggtctgaaatttggcgagccgaaaaccttaagccgttccggtcgtgacccgattagccaggcggcgtttgcactgccactgccagcgaaagacaaaccgagctacggtatggcgaccgatatgcaaggtaatgtggttctgctggcgctggatgaagtgaaacaaggttcaatgccggaagatcagaaaaaagcgatggtgcagggtatcacccagaacaacgcacaaatcgtctttgaagctctgatgagtaacctgcgtaaagaggcgaaaatcaaaattggcgatgcgctggaacagcaataa

SEQ ID NO: 484036 - DNA, 273 bp, Shigella sonnei; identical to SEQ ID NO: 41042

SEQ ID NO: 484037 - DNA, 2355 bp, Shigella sonnei
atgaatcctgagcgttctgaacgcattgaaatccccgtattgccgctgcgcgatgtggtggtttatccgcacatggtcatccccttatttgtcgggcgggaaaaatctatccgttgtctggaagcggcgatggaccatgataaaaaaattatgctggtcgcgcagaaagaagcttcaacggatgagccgggtgtaaacgatcttttcaccgtcgggaccgtggcctctatattgcagatgctgaaactgcctgacggcaccgtcaaagtgctggtcgaggggttacagcgcgcgcgtatttctgcgctctctgacaatggcgaacacttttctgcgaaggcggagtatctggagtcgccgaccattgatgagcgggaacaggaagtgctggtgcgtactgcaatcagccagttcgaaggctacatcaagctgaacaaaaaaatcccaccagaagtgctgacgtcgctgaatagcatcgacgatccggcgcgtctggcggataccattgctgcacatatgccgctgaaactggctgacaaacagtccgttctggagatgtccgacgttaacgaacgtctggaatatctgatggcaatgatggaatcggaaatcgatctgctgcaggttgagaaacgcattcgcaaccgcgttaaaaagcagatggagaaatcccagcgtgagtactatctgaacgagcaaatgaaagctattcagaaagaactcggtgaaatggacgacgcgccggacgaaaacgaagccctgaagcgcaaaatcgacgcggcgaagatgccgaaagaggcaaaagagaaagcggaagcagagttgcagaagctgaaaatgatgtctccgatgtcggcagaagcgaccgtagtgcgtggttatatcgactggatggtacaggtaccgtggaatgcgcgcagcaaggtcaaaaaagacctgcgtcaggcgcaggaaatccttgataccgaccattatggtctggagcgcgtgaaagatcgcatccttgagtaccttgcggttcaaagccgtgtcaacaaaatcaagggaccgatcctctgcctggtagggccgccgggggtaggtaaaacctctcttggtcagtccattgccaaagccaccgggcgtaaatatgtccgtatggcgctgggcggcgtgcgtgatgaagcggaaatccgtggtcaccgccgtacttacatcggttctatgccgggtaaactgatccagaaaatggcgaaagtgggcgtgaaaaacccgctgttcctgctcgatgagatcgacaaaatgtcttctgacatgcgaggcgatccggcctctgcactgcttgaagtgctggatccagagcagaacgtagcgttcagcgaccactacctggaagtggattacgatctcagcgacgtgatgtttgtcgcgacgtcgaactccatgaacattccggcaccgctgctggatcgtatggaagtgattcgcctctccggttataccgaagatgaaaaactgaacatcgccaaacgtcacctgctgccgaagcagattgaacgtaatgcactgaaaaaaggtgagctgaccgtcgacgatagcgccattatcggcattattcgttactacacccgtgaggcgggcgtgcgtggtctggagcgtgaaatctccaaactgtgccgcaaagcggttaagcagttactgctcgataagtcattaaaacatatcgaaattaacggcgataacctgcatgactacctcggtgttcagcgtttcgactatggtcgcgctgataacgaaaaccgtgtcggtcaggtaaccggtctggcgtggacggaagtgggcggtgacttgctgaccattgaaaccgcatgtgttccgggtaaaggcaaactgacctataccggttcgctcggcgaagtgatgcaggagtctattcaggcggcgttaacggtggttcgtgcgcgtgcggaaaaactggggatcaaccctgatttttacgaaaaacgtgacatccacgtccacgtaccggaaggtgcgacgccgaaagatggtccgagtgccggtattgctatgtgcaccgcgctggtttcttgcctgaccggtaacccggttcgtgccgatgtggcaatgaccggtgagatcactctgcgtggtcaggtactgccgatcggtggtttgaaagaaaaactcctggcagcgcatcgcggcgggattaaaacagtgctaattccgttcgaaaataaacgcgatctggaagagattcctgacaacgtaattgccgatctggacattcatcctgtgaagcgcattgaggaagttctgactctggcgctgcaaaatgaaccgtctggcatgcaggttgtgactgcaaaatag

SEQ ID NO: 484038 - DNA, 1275 bp, Shigella sonnei
atgacagataaacgcaaagatggctcaggcaaattgctgtattgctctttttgcggcaaaagccagcatgaagtgcgcaagctgattgccggtccatccgtgtatatctgcgacgaatgtgttgatttatgtaacgacatcattcgcgaagagattaaagaagttgcaccgcatcgtgaacgcagtgcgctaccgacgccgcatgaaattcgcaaccacctggacgattacgttatcggccaggaacaggcgaaaaaagtgctggcggtcgcggtatacaaccattacaaacgtctgcgcaacggcgataccagcaatggtgtcgagttgggcaaaagtaacattctgctgatcggtccgaccggttccggtaaaacgctgctggctgaaacgctggcgcgcctgctggacgtcccgttcaccatggccgacgcaaccacgctgaccgaagccggttatgtgggcgaagacgttgaaaacatcattcagaagctgttgcaaaagtgcgattacgacgtacagaaagcgcagcgcgggattgtctacatcgatgaaatcgacaagatttctcgtaagtcagacaacccgtccattacccgagacgtttccggtgaaggcgtacagcaggcactgttgaaactgatcgaaggtacggtagctgctgttccaccgcaaggtgggcgtaaacatccgcagcaggaattcttgcaggttgatacctctaagatcctgtttatttgtggcggtgcgtttgccggtctggataaagtgatttcccaccgtgtagaaaccggctccggcattggttttggcgcgacggtaaaagcgaagtccgacaaagcaagcgaaggcgagctgctggcgcaggttgaaccggaagatctgatcaagtttggtcttatccctgagttcattggtcgtctgccggttgtagcaacgttgaatgaactgagcgaagaagctctgattcagatcctcaaagagccgaaaaacgccctgaccaagcagtatcaggcgctgtttaatctggaaggcgtggatctggaattccgtgacgaggcgctggatgctatcgctaagaaagcgatggcgcgtaaaaccggtgcccgtggcctgcgttccatcgtagaagccgcactgctcgataccatgtacgatctgccgtccatggaagacgtcgaaaaagtggttatcgacgagtcggtaattgatggtcaaagcaaaccgttgctgatttatggtaagccggaagcgcaacaggcatctggtgaataa

SEQ ID NO: 484039 - DNA, 624 bp, Shigella sonnei
atgtcatacagcggcgaacgagataactttgcaccccatatggcgctggtgccgatggtcattgaacagacctcacgcggtgagcgctcttttgatatctattctcgtctacttaaggaacgcgtcatttttctgactggccaggttgaagaccacatggcgaacctgattgtggcgcagatgctgttcctagaagcggaaaacccagaaaaagatatctatctgtacattaactccccaggcggggtgatcactgccgggatgtctatctatgacaccatgcagtttatcaagcctgatgtcagcaccatctgtatgggccaggcggcctcgatgggcgctttcttgctgaccgcaggggcaaaaggtaaacgtttttgcctgccgaattcgcgcgtgatgattcaccaaccgttgggcggctaccagggccaggcgaccgatatcgaaattcatgcccgtgaaattctgaaagttaaagggcgcatgaatgaacttatggcgcttcatacgggtcaatcattagaacagattgaacgtgataccgagcgcgatcgcttcctttccgcccctgaagcggtggaatacggtctggtcgattcgattctgacccatcgtaattga

SEQ ID NO: 484040 - DNA, 1299 bp, Shigella sonnei
atgcaagtttcagttgaaaccactcaaggccttggccgccgtgtaacgattactatcgctgctgacagcatcgagaccgctgttaaaagcgagctggtcaacgttgcgaaaaaagtacgtattgacggcttccgcaaaggcaaagtgccaatgaatatcgttgctcagcgttatggcgcgtctgtacgccaggacgttctgggtgacctgatgagccgtaacttcattgacgccatcattaaagaaaaaatcaatccggctggcgcaccgacttatgttccgggcgaatacaagctgggtgaagacttcacctactctgtagagtttgaagtttatccggaagttgaactgcagggtctggaagcgatcgaagttgaaaaaccgatcgttgaagtgaccgacgctgacgttgacggcatgctggatactctgcgtaaacagcaggcgacctggaaagaaaaagacggcgccgttgaagcagaagaccgcgtaaccatcgacttcaccggttctgtagacggcgaagagttcgaaggcggtaaagcgtctgatttcgtactggcgatgggccagggtcgtatgatcccgggctttgaagacggtatcaaaggccacaaagctggcgaagagttcaccatcgacgtgaccttcccggaagaataccacgcagaaaatctgaaaggtaaagcagcgaaattcgctatcaacctgaagaaagttgaagagcgtgaactgccggaactgactgcagaattcatcaaacgtttcggcgttgaagatggttccgtagaaggtctgcgcgctgaagtgcgtaaaaacatggagcgcgagctgaagagcgccatccgtaaccgcgttaagtctcaggcgatcgaaggtctggtaaaagctaacgacatcgacgtaccggctgcgctgatcgacagcgaaatcgacgttctgcgtcgccaggctgcacagcgtttcggtggcaacgaaaaacaagctctggaactgccgcgcgaactgttcgaagaacaggctaaacgccgcgtagttgttggcctgctgctgggcgaagttatccgcaccaacgaactgaaagctgacgaagagcgcgtgaaaggcctgatcgaagagatggcttctgcgtacgaagatccgaaagaagttatcgagttctacagcaaaaacaaagaactgatggacaacatgcgcaatgttgctctggaagaacaggctgttgaagctgtactggcgaaagcgaaagtgactgaaaaagaaaccactttcaacgagctgatgaaccagcaggcgtaa

SEQ ID NO: 484041 - DNA, 315 bp, Shigella sonnei; identical to SEQ ID NO: 138

SEQ ID NO: 484042 - DNA, 579 bp, Shigella sonnei
atgttcaaaaaaatcctcttcccgttagttgctctgtttatgcttgcaggatgcgcaaaaccgccaacaactattgaagtttccccgacgattacactgccacagcaggatccaagcctgatgggcgtcaccgtaagcattaatggtgccgatcagcgtaccgatcaggcgctggcaaaagtcacccgcgataatcaaatcgttaccctgaccgcctcccgagatctgcgtttcctgctgcaagaagtgctggaaaaacagatgaccgcgcgtggttacatggttggtccgaatggcccggttaatctgcaaatcatcgttagccaactgtatgctgacgtgtcccagggcaacgtgcgctacaacatcgcgaccaaagcggatatcgccatcatcgctaccgcgcagaatggcaacaaaatgaccaaaaactatcgtgccagctacaacgttgaaggtgcgttccaggcctccaacaaaaatatcgccgatgcggttaacagtgtgctgaccgataccatcgctgatatgtctcaggacaccagcatccacgaattcatcaagcagaacgcgcgttaa

SEQ ID NO: 484043 - DNA, 1476 bp, Shigella sonnei
atgtccagtcaatatttacgtatttttcaacagccgcgttcagccatattgctgatcctgggttttgcttccgggctaccgctcgccctgacatccggtaccttacaggcctggatgacggtcgagaatattgatctcaaaaccattggtttcttctctctggtaggccaggcttacgtttttaaattcctctggtcaccgctgatggaccgctacacgcccccattttttgggcggcggcgcggttggctgctcgccacgcaaatcctgttattagtcgccattgcggcgatgggttttctcgaacctggcacccaactccgctggatggcggcactggcggtggtgatcgctttttgctcggcctcccaggatattgtcttcgatgcgtggaaaaccgatgtgctcccggcagaagaacgtggtgcgggcgcggcaatcagcgtgctgggttaccgtttagggatgctggtttccggcggcttagccctgtggctggcagataaatggctgggctggcagggcatgtactggttgatggcggcgctgttgatcccttgtattatcgcgacgttgcttgcaccagaaccgaccgacaccattcctgtgccaaaaacgctggaacaagcggttgttgcacctctgcgagatttctttggtcgcaataatgcctggcttattttgcttcttatcgtgctgtataagctgggcgacgcattcgccatgagcctgacaaccacgtttttgattcgcggcgtcgggtttgatgcgggtgaagtaggcgtggttaacaaaacgcttggcttactggcgaccattgtgggcgcattgtacggtgggattttgatgcagcgcctgtcgctgttccgggcgctgctgattttcggcattttacaaggtgcgtctaacgctggttactggctgctgtcgattactgataagcatctctacagcatgggcgcagccgtctttttcgaaaacctctgtggcgggatgggcacatcagcctttgtcgcactgttaatgacgctgtgtaataagtcattttccgctactcaatttgccctgctctcagcgctttccgctgtaggacgagtttatgtcggccccgtggcgggttggtttgttgaagcacacggctggtcgacattctatctattctccgtcgccgctgccgtaccggggcttattttgctgctggtttgccgccagacgcttgaatatacacgagtaaatgacaactttatctcccgtaccgaatatccgacaggttatgcctttgccatgtggacactggcggcgggcgtcagcctgttggccgtgtggttactgctgttgacgatggacgcgctggatttgacgcacttctctttcctgcctgctctgctggaagtcggggttttagtcgccctttctggcgtcgtgcttggtggtttgctggattatctggctctacgaaaaacgcatctgacgtaa

SEQ ID NO: 484044 - DNA, 948 bp, Shigella sonnei
atgagactcaggaaatacaataaaagtttgggatggttgtcattatttgcaggcactgtattgctcagtggctgtaattctgcgctgttagatcccaaaggacagattggtctggagcaacgttcactgatactgacggcatttggcctgatgttgattgtcgttattcccgcaatcttgatggctgttggtttcgcctggaagtatcgtgcgagcaataaagatgctaagtacagcccgaactggtcacactccaataaagtggaagctgtggtctggacggtacctatcttaatcatcatcttccttgcggtactgacctggaaaaccactcacgctcttgagcctagcaagccgctggcacacgacgagaagcccattaccatcgaagtggtttccatggactggaaatggttcttcatctacccggaacagggcattgcaaccgtgaatgaaatcgctttcccggcgaacactccggtgtacttcaaagtgacctccaactccgtgatgaactccttcttcattccgcgtctgggtagccagatttatgccatggccggtatgcagactcgcctgcatctgatcgccaacgaacccggtacttatgacggtatctccgccagctacagcgggccgggcttctcaggcatgaagttcaaagctattgcaacaccggatcgcgccgaattcgaccaatgggtcgcaaaagcgaaacagtcgccgaacaccatgtctgacatggctgcgttcgaaaaactggccgcgcctagcgaatacaaccaggtggaatatttctccaacgtgaaaccagacttgtttgccgatgtgattaacaagtttatggctcacggtaagagcatggacatgacccagccagaaggtgagcacagtgcacacgaaggtatggaaggcatggacatgagccacgcggaatccgcccattaa

SEQ ID NO: 484045 - DNA, 1992 bp, Shigella sonnei
atgttcggaaaattatcacttgatgcagtcccgttccatgaacctatcgtcatggttacgatcgctggcattattttgggaggtctggcgctcgttggcctgatcacttacttcggtaagtggacctacctgtggaaagagtggctgacctccgtcgaccataaacgcctcggtatcatgtatatcatcgtggcgattgtgatgttgctgcgtggttttgctgacgccattatgatgcgtagccagcaggctcttgcctcggcgggcgaagcgggcttcctgccacctcaccactacgatcagatcttcaccgcgcacggcgtgattatgatcttcttcgtggcgatgcctttcgttatcggtctgatgaacctggtggttccgctgcagatcggcgcgcgtgacgttgcgttcccgttcctcaacaacttaagcttctggtttactgttgttggtgtgattctggttaacgtttctctcggcgtgggcgaatttgcgcagaccggctggctggcctatccaccgctatcgggaatagagtacagtccgggagtcggtgtcgattactggatatggagtctccagctatccggtataggtacgacgcttaccggtatcaacttcttcgttaccattctgaagatgcgcgcaccgggcatgaccatgttcaagatgccagtatttacctgggcatcactgtgcgcgaacgtactgattattgcttccttcccaattctgacggttaccgtcgcgttgttgaccctggatcgctatctgggcacccatttctttaccaacgatatgggtggcaacatgatgatgtacatcaacctgatttgggcctggggccacccggaagtttacatcctgatcctgcctgttttcggtgtgttctccgaaattgcggcaaccttctcgcgtaaacgtctgtttggttatacctcgctggtatgggcaaccgtctgtatcaccgtgctgtcgttcatcgtttggctgcaccacttctttacgatgggtgcgggcgcgaacgtaaacgccttctttggtatcaccacaatgattatcgccatcccgaccggggtgaagatcttcaactggctgttcaccatgtatcagggccgcatcgtgttccattctgcgatgctgtggaccatcggttttatcgtcactttctcggtgggcgggatgactggcgtgctgctggcagtaccgggcgcggacttcgttctgcataacagcctgttcctgattgcgcacttccataacgttatcatcggcggcgtggtcttcggctgcttcgcagggatgacctactggtggcctaaagcgttcggtttcaaactgaatgaaacctggggtaaacgcgcgttctggttctggatcatcggcttcttcgttgcctttatgccgctgtatgcgctgggcttcatgggcatgacccgtcgtttgagccagcagattgacccgcagttccacaccatgctgatgattgcagctagcggtgcagtactgattgcgctgggtattctctgcctcgttattcagatgtacgtttctattcgcgaccgcgaccagaaccgtgacctgactggcgacccgtggggtggccgtacgctggagtgggcaacctcttccccgcctccgttctataactttgccgttgtgccgcacgttcacgagcgtgatgcattctgggaaatgaaagagaaaggcgaagcgtataaaaagcctgaccactatgaagaaattcatatgccgaaaaacagcggtgcaggtatcgtcattgcagctttctccaccatcttcggtttcgccatgatctggcatatctggtggctggcgattgttggcttcgcaggcatgatcatcacctggatcgtgaaaagcttcgacgaggacgtggattactacgtgccggtggcagaaatcgaaaaactggaaaaccagcatttcgatgagattactaaggcagggctgaaaaatggcaactga

SEQ ID NO: 484046 - DNA, 615 bp, Shigella sonnei
atggcaactgatactttgacgcacgcgactgcccacgcgcacgaacacgggcaccacgatgcaggcggaaccaaaatcttcggattttggatctacctgatgagcgactgcattctgttctcaatcttgtttgctacctatgccgttctggtgaacggcaccgcaggcggcccgacaggtaaggacattttcgaactgccgttcgttctggttgaaactttcttgctgttgttcagctccatcacctacggcatggcggctatcgccatgtacaaaaacaacaaaagccaggttatctcctggctggcgttgacctggttgtttggtgccggatttatcgggatggaaatctacgaattccatcacctgattgttaacggcatgggtccggatcgcagcggcttcctgtcagcgttctttgcgctggtcggcacgcacggtctgcacgtcacttccggtcttatctggatggcggtgctgatggtacaaatcgctcgtcgcggcctgaccagcactaaccgtacccgcatcatgtgcctgagcctgttctggcacttcctggatgtggtttggatctgtgtgttcactgttgtttatctgatgggggcgatgtaa

SEQ ID NO: 484047 - DNA, 330 bp, Shigella sonnei
atgagtcattctaccgatcacagcggcgcgtcccatggcagcgtaaaaacctacatgacaggctttatcctgtcgatcattctgacggtgattccgttctggatggtgatgacaggagctgcctctccggccgtaattctgggaacaatcctggcaatggcagtggtacaggttctggtgcatctggtgtgcttcctgcacatgaataccaaatcagatgaaggctggaacatgacggcgtttgtcttcaccgtgctaatcatcgctatcctggttgtaggctccatctggattatgtggaacctcaactacaacatgatgatgcactaa

SEQ ID NO: 484048 - DNA, 891 bp, Shigella sonnei
atgatgtttaagcaatacctgcaagtaacgaaaccaggcatcatctttggcaacctgatctcggtgattgggggattcctgctggcctcaaagggcagcattgattatcccctgtttatctacacgctggttggggtgtcactggttgtggcgtcgggttgtgtgtttaacaactacatcgacagggatatcgacagaaagatggaaaggacgaagaatcgggtgctggttaaaggcctgatctctcctgctgtctcgctggtgtacgccaccttgctaggctttgctggctttatgctgctgtggtttggcgcgaatccgctggcctgctggctgggggtgatgggctttgtggtttatgtcggcgtttatagcctgtacatgaaacgccactcggtctacggcacattgattggttcgctctccggcgctgcgccgccggtgattggctactgtgcagtaaccggcgagttcgatagcggcgcagcgatcctgctggctatcttcagcctgtggcagatgcctcactcctatgccatcgccattttccgctttaaggattatcaggcggcaaacattccggtattgccagtggtaaaaggcatttcggtggcgaagaatcacatcacgctgtatatcatcgcctttgccgttgccacgctgatgctctctcttggcggttacgctgggtataaatatctggtggtcgccgcggcggtgagcgtctggtggttaggtatggccctgcgcggttataaagttgctgatgacaggatctgggcgcgcaagctgttcggcttctctatcatcgccatcacagccctctcggtgatgatgtccgttgattttatggtgccggactcgcatacgctgctggctgctgtttggtaa

SEQ ID NO: 484049 - DNA, 312 bp, Shigella sonnei
atgcctggaaaaacagccactctacccgatgtcgataaaacgctgaaaaatgcgcgggtcgaactcaaaactagtcccgacgccaaaaacaaacttcgtgaagctgcgcaagccgttggggtagatttaagcgcttttattttgagcgctgctatggaacgcgccgaaagtgtgcttgataaccaacgtcgccgtgagctttcgaatcaaagctgggaactgatgaaccaactcatcgctgaacctgctcaaccgacgctcgccctcaaggcgttaatgaaaaggaaaaacagcgatggtcgacaagcatga

SEQ ID NO: 484050 - DNA, 543 bp, Shigella sonnei
atggtcgacaagcatgaagagattactctgcccatagtcctctcctgtaattatcagtctgatattacttatcctgggcaaaaacagtttgattgcggtaaccctgttatcgataaatttgtacgcgcatcgctaaagaaaagtgtgcgtaatagcgactgtgcggctaaagcacttattgacagacaaagtggtgaactgatcggcatctgtacttttacggcatattcgctggaaaaacaacgcgtttctggcgtccttcagggttcacaaccttcagaaattggtgttgtcagattagtcatgttgggggtagcacggaagtatcaaaagcggggctttggtcaggacctactatgtgatttttttgaacatgtaaaaataattcaccaggcattaccaattaaaggggtttatcttgatgctgaccctgccgccattaatttttatgctcgtctcggctttgttcagctttcagcgacaccaaatgcttttggtgctgtacctatgtttttggcgattcagcatattctcgcggcttag

SEQ ID NO: 484051 - DNA, 534 bp, Shigella sonnei
atgtacgccaatggtcagtatgttgaggtagattgtaagaaagcgaaggaatatcttgataaaggtgtccacatttatggtggcccggaagactttctggctacttgtcgaaaagacatgattgacagaaaaacggttgacgatacgttacccgtgattacggttacccgttctgggatgcgagataattttttagataaaggtttttcctgcatggatagcctcttcgccaccaccaataaattaggcgaagtggccaatcttcgcgtgacattcagcattcgtcgcccatccggtaaggagattaaccaaacggttggcttcgcgcctttcggtttaaaccggctgaatattagctttactgattacctatttggttcatttaccagtaattcgtctcttattctttataaaccggaatttgagcgaaaatcttgtgcaactgtaaggaccacaatcgttgccgcaacggcaaccattaacggcaaggatgtggagttgctgaaagcgggggcaattgaacaaaagtggtaa

SEQ ID NO: 484052 - DNA, 1830 bp, Shigella sonnei
atgtgtggaattgttggcgcgatcgcgcaacgtgatgtagcagaaatccttcttgaaggtttacgtcgtctggaataccgcggatatgactctgccggtctggccgttgttgatgcggaaggtcatatgacccgcctgcgtcgcctcggtaaagtccagatgctggctcaggcagcggaagaacatcctctggatggcggcaccggtattgctcacactcgctgggcgacccacggtgaaccttcagaagctaacgcgcatccgcatgtttctgaacacattgtggtggtgcataacggcatcatcgaaaaccatgaaccgctgcgtgaagagttaaaagcgcgtggctataccttcgtttctgaaaccgacaccgaagtgattgcccatctggtgaactgggagctgaaacaaggcgggactctgcgtgaggctgttctgcgtgctatcccgcagctgcgcggtgcgtacggtacagtgatcatggactcccgtcacccggataccctgctggcggcacgttctggtagtccgctggtgattggcctgggtatgggcgaaaactttatcgcttctgaccagctggcgctgttgccggtgacccgtcgctttatcttccttgaagagggcgatattgcggaaatcactcgccgttcggtaaacatcttcgataaaactggcgcggaagtaaaacgtcaggatatcgaatccaatctgcaatatgacgcgggcgataaaggtatttaccgtcactacatgcagaaagagatctacgaacagccgaacgcgataaaaaacacccttaccgggcgcatcagccacggtcaggttgatttaagcgagctgggaccgaacgccgacgaactgctgtcgaaggttgagcatattcagatcctcgcctgtggtacttcttataactccggtatggtttcccgctactggtttgaatcgctggcaggtattccgtgcgacgtcgaaatcgcctctgaattccgctatcgtaaatctgccgtgcgtcgtaacagcctgatgatcaccttgtcacagtctggcgaaaccgcggataccctggcgggcctgcgtctgtcgaaagagctgggttaccttggttcgctggcaatctgtaacgttccgggttcttctctggtgcgcgaatccgatctggcgctgatgaccaacgcgggtacggaaatcggcgtggcgtccactaaagcattcaccactcagttaactgtgctgttgatgctggtggcgaagctgtctcgcctgaaaggtctggatgcctccattgaacatgacattgtgcatggtctgcaggcgctgccgagccgtattgagcagatgctatctcaggacaaacgcattgaagctctggcagaagatttctctgacaaacatcacgcactgttcctgggccgtggcgatcagtacccaatcgcactggaaggcgcattgaagctgaaagagatctcctacattcacgctgaagcctacgctgctggtgaactgaaacacggtccgctggcgcttattgatgccgatatgccggttatcgtcgttgcaccgaacaacgaattgctggaaaaactgaaatccaacattgaagaagttcgcgcgcgtggcggccaattgtatgtcttcgccgatcaggatgcgggttttgtaagtagcgataacatgcacatcatcgagatgccgcatgtggaagaggtgattgcaccgatcttctacaccgttccgctgcagctgctggcttaccatgtcgcgctgatcaaaggcaccgacgttgaccagccgcgtaacctggcaaaatcggttacggttgagtaa

SEQ ID NO: 484053 - DNA, 1371 bp, Shigella sonnei
atgttgaataatgctatgagcgtagtgatccttgccgcaggcaaaggcacgcgcatgtattccgatcttccgaaagtgctgcatacccttgccgggaaagcgatggttcagcatgtcattgatgctgcgaatgaattaggcgcagcgcacgttcacttggtgtacggtcacggcggcgatctgcttaaacaggcgctgaaagacgacaaccttaactgggtgcttcaggcagagcagctgggtacgggtcatgcaatgcagcaggccgcacctttctttgccgatgatgaagacattttaatgctctacggcgacgtgccgctgatctctgtcgaaacactccagcgcctgcgtgatgctaaaccgcagggtggcattggtctgctgacggtgaaactggatgatccgaccggttatggacgtatcacccgtgaaaatggcaaagttaccggcattgttgagcacaaagatgccaccgacgagcagcgtcagattcaggagatcaacaccggcattctgatcgctaacggcgcagatatgaaacgctggctggcgaagctgaccaacaataatgctcagggcgaatactacatcaccgacattattgcgctggcgtatcaggaagggcgtgaaatcgtcgccgttcatccgcaacgtttaagcgaagtagaaggtgtgaataaccgcctgcaactctcccgtctggagcgcgtttaccagtccgaacaggctgaaaaactgctgttagcaggcgttatgctgcgcgatccggcgcgttttgatctgcgcggtacgcttactcacgggcgcgatgttgaaattgatactaacgttatcatcgagggcaacgtgactctcggtcatcgcgtgaaaatcggcaccggttgcgtgattaaaaacagcgtgattggcgatgattgcgaaatcagtccgtataccgttgtggaagacgcgaatctggcagcggcctgtactattggcccgtttgctcgtttgcgtcctggtgctgagttgctggaaggtgcacacgttggtaacttcgttgagatgaaaaaagcgcgtctgggtaaaggctcgaaagtcgggcatctgacttacctgggcgatgcggaaattggcgataacgttaacatcggcgcgggaaccattacctgcaactacgatggtgcgaataaatttaagaccattatcggcgacgatgtgtttgtcggttccgacactcagctggtggccccggtaacagtaggcaaaggcgcgaccattgctgcgggtacaactgtgacgcgtaatgtcggcgaaaatgcattagctatcagccgtgtgccgcagactcagaaagaaggctggcgtcgtccggtaaagaaaaagtaa

SEQ ID NO: 484054 - DNA, 420 bp, Shigella sonnei; identical to SEQ ID NO: 1843

SEQ ID NO: 484055 - DNA, 1383 bp, Shigella sonnei
atggctactggaaagattgtccaggtaatcggcgccgtagttgacgtcgaattccctcaggatgccgtaccgcgcgtgtacgatgctcttgaggtgcaaaatggtaatgagcgtctggtgctggaagttcagcagcagctcggcggcggtatcgtgcgtaccatcgcaatgggttcctccgacggtctgcgtcgcggtctggatgtaaaagacctcgaacacccgatcgaagtcccggtaggtaaagcgactctgggccgtatcatgaacgtactgggtgaaccggtcgacatgaaaggcgagatcggtgaagaagagcgttgggcgattcaccgcgcagcaccttcctacgaagagctgtcaaactctcaggaactgctggaaaccggtatcaaagttatcgacctgatgtgtccgttcgctaagggcggtaaagttggtctgttcggtggtgcgggtgtaggtaaaaccgtaaacatgatggagctcattcgtaacatcgcgatcgagcactccggttactctgtgtttgcgggcgtaggtgaacgtactcgtgagggtaacgacttctaccacgaaatgaccgactccaacgttatcgacaaagtatccctggtgtatggccagatgaacgagccgccgggaaaccgtctgcgcgttgctctgaccggtctgaccatggctgagaaattccgtgacgaaggtcgtgacgttctgctgttcgttgacaacatctatcgttacaccctggccggtacggaagtatccgcactgctgggccgtatgccttcagcggtaggttatcagccgaccctggcggaagagatgggcgttctgcaggaacgtatcacctccaccaaaactggttctatcacctccgtacaggcggtatacgtacctgcggatgacttgactgacccgtctccggcaaccacctttgcgcaccttgacgcaaccgtggtactgagccgtcagatcgcgtctctgggtatctacccggccgttgacccgctggactccaccagccgtcagctggacccgctggtggttggtcaggaacactacgacaccgcgcgtggcgttcagtccatcctgcaacgttatcaggaactgaaagacatcatcgccatcttgggtatggatgaactgtctgaagaagacaaactggtggtagcgcgtgctcgtaagatccagcgcttcctgtcccagccgttcttcgtggcagaagtattcaccggttctccgggtaaatacgtctccctgaaagacaccatccgtggctttaaaggcatcatggaaggcgaatacgatcacctgccggagcaggcgttctacatggtcggttccatcgaagaagctgtggaaaaagccaaaaaactttaa

SEQ ID NO: 484056 - DNA, 864 bp, Shigella sonnei
atggccggcgcaaaagagatacgtagtaagatcgcaagcgtccagaacacgcaaaagatcactaaagcgatggagatggtcgccgcttccaaaatgcgtaaatcgcaggatcgcatggcggccagccgtccttatgcagaaaccatgcgcaaagtgattggtcaccttgcacacggtaatctggaatataagcacccttacctggaagaccgcgacgttaaacgcgtgggctacctggtggtgtcgaccgaccgtggtttgtgcggtggtttgaacattaacctgttcaaaaaactactggcggaaatgaagacctggaccgacaaaagcgttcaatgcgacctcgcaatgatcggctcgaaaggcgtgtcgttcttcaactccgtgggcggcaatgttgttgcccaggtcaccggcatgggggataacccttccctgtccgaactgatcggtccggtaaaagtgatgttgcaggcttacgacgaaggccgtctggacaagctttacattgtcagcaacaaatttattaacaccatgtctcaggttccgaccatcagccagctgctgccgttaccggcatcagatgatgatgatctgaaacataaatcctgggattacctgtacgaacccgatccgaaggcgttgctggataccctgctgcgtcgttatgtcgaatctcaggtttatcagggcgtggttgaaaacctggccagcgagcaggccgcccgtatggtggcgatgaaagccgcgaccgacaatggcggcagcctgattaaagagctgcagttggtatacaacaaagctcgtcaggccagcattactcaggaactcaccgagatcgtctcgggggccgccgcggtttaa

SEQ ID NO: 484057 - DNA, 1542 bp, Shigella sonnei
atgcaactgaattccaccgaaatcagcgaactgatcaagcagcgcattgctcagttcaatgttgtgagtgaagctcacaacgaaggtactattgtttctgtaagtgacggtgttatccgcattcacggcctggccgattgtatgcagggtgaaatgatctccctgccgggtaaccgttacgctatcgcactgaaccttgagcgcgactctgtaggtgcggttgttatgggtccgtacgctgaccttgccgaaggcatgaaagttaagtgtactggccgtatcctggaagttccggttggccgtggcctgctgggccgtgtggttaacactctgggtgcaccaatcgacggtaaaggtccgctggatcacgacggcttctctgctgtagaagcaatcgctccgggcgttatcgaacgtcagtccgtagatcagccggtacagaccggttataaagccgttgactccatgatcccaatcggtcgtggtcagcgtgaattgatcatcggtgaccgtcagacaggtaaaaccgcactggctatcgatgccatcatcaaccagcgcgattccggtatcaaatgtatctatgtcgctatcggccagaaagcgtccaccatttctaacgtggtacgtaaactggaagagcacggcgcactggctaacaccatcgttgtggtagcaaccgcgtctgaatccgctgcactgcaatacctggcaccgtatgccggttgcgcaatgggcgaatacttccgtgaccgcggtgaagatgcgctgatcatttacgatgacctgtctaaacaggctgttgcttaccgtcagatctccctgctgctccgtcgtccgccaggacgtgaagcattcccgggcgacgttttctacctccactctcgtctgctggagcgtgctgcacgtgttaacgccgaatacgttgaagccttcaccaaaggtgaagtgaaagggaaaaccggttctctgaccgcactgccgattatcgaaactcaggcgggtgacgtttctgcgttcgttccgaccaacgtaatctccattaccgatggtcagatcttcctggaaaccaacctgttcaacgccggtattcgtcctgcggttaacccgggtatttccgtatcccgtgttggtggtgcagcacagaccaagatcatgaaaaaactgtccggtggtatccgtaccgctctggcacagtatcgtgaactggcagcgttctctcagtttgcatccgaccttgacgatgcaacacgtaagcagcttgaccacggtcagaaagtgaccgaactgctgaaacagaaacagtatgcgccgatgtccgttgcgcagcagtctctggttctgttcgcagcagaacgtggttacctggcggatgttgaactgtcgaaaattggcagcttcgaagccgctctgctggcttacgtcgaccgtgatcacgctccgttgatgcaagagatcaaccagaccggtggctacaacgacgaaatcgaaggcaagctgaaaggcatcctcgattccttcaaagcaacccaatcctggtaa

SEQ ID NO: 484058 - DNA, 534 bp, Shigella sonnei
atgtctgaatttattacggtagctcgcccctacgccaaagcagcttttgactttgccgtcgaacaccaaagtgtagaacgctggcaggacatgctggcgtttgccgccgaggtaaccaaaaacgaacaaatggcagagcttctctctggcgcgcttgcgccagaaacgctcgccgagtcgtttatcgcagtttgtggtgagcaactggacgaaaacggtcagaacctgattcgggtaatggctgaaaatggtcgtcttaacgcgctcccggatgttctggagcagtttattcaccttcgtgccgtgagtgaggctaccgctgaggtagacgtcatttccgctgccgcactgagtgaacaacagctcgcgaaaatttctgctgcgatggaaaaacgtctgtcacgcaaagttaagctgaattgcaaaatcgataagtctgtaatggcaggcgttatcatccgagcgggtgatatggtcattgatggcagcgtacgcggtcgtcttgagcgccttgcagacgtcttgcagtcttaa

SEQ ID NO: 484059 - DNA, 471 bp, Shigella sonnei; identical to SEQ ID NO: 459191

SEQ ID NO: 484060 - DNA, 240 bp, Shigella sonnei; identical to SEQ ID NO: 1849

SEQ ID NO: 484061 - DNA, 816 bp, Shigella sonnei
atggcttcagaaaatatgacgccgcaggattacataggacaccacctgaataaccttcagctggacctgcgtacattctcgctggtggatccacaaaaccccccagccaccttctggacaatcaatattgactccatgttcttctcggtggtgctgggtctgttgttcctggttttattccgtagcgtagccaaaaaggcgaccagcggtgtgccaggtaagtttcagaccgcgattgagctggtgatcggctttgttaatggtagcgtgaaagacatgtaccatggcaaaagcaagctgattgctccgctggccctgacgatcttcgtctgggtattcctgatgaacctgatggatttactgcctatcgacctgctgccgtacattgctgaacatgtactgggtctgcctgcactgcgtgtggttccgtctgcggacgtgaacgtaacgctgtctatggcactgggcgtatttatcctgattctgttctacagcatcaaaatgaaaggcatcggcggcttcacgaaagagttgacgctgcagccgttcaatcactgggcgttcattcctgtcaacttaatccttgaaggggtaagcctgctgtccaaaccagtttcactcggtttgcgactgttcggtaacatgtatgccggtgagctgattttcattctgattgctggtctgttgccgtggtggtcacagtggatcctgaatgtgccgtgggccattttccacatcctgatcattacgctgcaagccttcatcttcatggttctgacgatcgtctatctgtcgatggcgtctgaagaacattaa

SEQ ID NO: 484062 - DNA, 381 bp, Shigella sonnei
atgtctgtgtcgctcgtgagtcgaaacgttgctcggaagcttctgctcgttcagttactggtggtgatagcaagtggattgctgttcagcctcaaagaccccttctggggcgtctctgcaataagcgggggcctggcagtctttctgcctaacgttttgtttatgatatttgcctggcgtcaccaggcgtatacaccagcgaaaggccgggtggcctggacattcgcatttggcgaagctttcaaagttctggcgatgttggtgttactggtggtggcgttggcggttttaaaggcggtattcttgccgctgatcgttacgtgggttttggtgctggtggttcagatactggcaccggctgtaattaacaacaaagggtaa

SEQ ID NO: 484063 - DNA, 624 bp, Shigella sonnei
gtgctcaacaaactctccttactgctgaaagacgcaggtatttcgcttaccgatcaccagaaaaaccagcttattgcctacgtgaatatgctgcataaatggaacaaagcgtacaacctgacttcggtccgcgatcctaatgagatgctggtacgccatattctcgatagcattgtggtggcaccgtatctgcaaggtgaacggtttatcgatgtcggcaccggaccaggactgccaggcattccactctctatcgtgcgtcctgaagcccatttcactctgttggatagccttggtaaacgcgtgcgtttccttcgtcaggtgcaacatgagcttaaactggagaatattgagccagtacagagcagggtagaagagtttccttcagagccgccatttgatggcgtaattagccgcgcttttgcctctctgaacgatatggtgagctggtgccaccatcttcctggtgagcaaggccgtttctacgcgctgaaagggcaaatgccggaagatgaaatcgctttgttgcccgaagaatatcaggtcgaatcagtggttaaacttcaggttccagctctggatggcgaacgtcatctggtggtgattaaagcaaataaaatttaa

SEQ ID NO: 484064 - DNA, 1890 bp, Shigella sonnei
atgttttatccggatccttttgacgtcatcatcattggcgggggtcatgcaggcaccgaggccgcgatggccgcggcgcgtatgggtcaacagactctgcttttgacacacaatatcgacactctggggcagatgagctgcaacccggcgatcggcggtattgggaagggacatctggtaaaagaagtggatgcactcggcggtctgatggcgaaagcgatcgatcaagcgggtatccagtttaggatactaaacgcaagcaaaggaccggcggttcgcgctacccgagctcaggcggatcgtgtgctctaccgtcaggcggtacgtacggcgctggagaaccaaccgaacctgatgatcttccagcaggcggttgaagatcttattgtcgaaaacgatcgcgtggtcggtgctgttacccaaatgggactgaagttccgtgccaaagccgtcgtgctcaccgttgggacgttcctcgacggtaaaattcatatcggtctggataattacagcggtggtcgtgctggtgatccgccgtccattccgctttctcgccgtttgcgtgaactgccgctgcgcgttggtcgtctgaaaaccgggacaccaccgcgtattgatgctcgaactatcgactttagtgtgctggcgcaacagcatggcgataacccaatgccggtattctcgtttatgggcaatgcgtcccagcatccccagcaggtgccgtgttatatcactcataccaacgagaaaacccatgatgtgatccgcagtaacctcgatcgtagcccaatgtacgcaggggtgatcgaaggtgtcggcccacgctactgcccatcgatcgaagacaaagtcatgcgcttcgccgacagaaatcagcatcagatcttccttgaaccggaagggctgacctctaacgaaatttatccgaacggtatctccaccagcctgccgttcgatgtgcagatgcaaatcgtccgctccatgcaggggatggaaaacgcgaagatcgtgcgtccgggttatgccattgagtatgacttcttcgatccacgcgacctgaaaccgacgctggagagcaagtttatccaggggctgttctttgctggtcagattaacggcactaccggttacgaagaagccgctgcgcaaggtttgctggtcggtcttaacgctgcccgtctgtctgctgacaaagaaggttgggctccggcgcgttctcaggcgtatctcggcgtactggttgatgacctgtgcactttaggaaccaaagaaccgtatcgtatgtttacttcgcgcgcagaatatcgtctgatgctgcgcgaagataatgcggatctgcgtttgactgaaatcggtcgtgaactgggcctggtggatgacgaacgttgggcgcgctttaacgagaaacttgagaatatcgagcgtgagcgtcagcgtctgaaatcgacctgggtaaccccgtcggcggaagctgcagccgaagtgaatgctcacctgactgcgccgctttcccgtgaagccagtggtgaagatctgctgcgtcgtccggaaatgacttatgaaaaattaaccacgctgacgccgtttgcccctgcgttgacagacgaacaggcggcggaacaggttgagattcaggttaaatacgaaggttatatcgcgcgccagcaagatgagatcgaaaagcagctgcgtaacgagaacaccctgctacccgcgacactggattaccgccaggtatccggtctttctaacgaagtgatcgccaaacttaacgatcacaaaccggcctctatcggccaggcttcgcgtatttctggcgtcacgcctgcggctatctccattctgctggtgtggctgaaaaaacagggtatgctgcgtcgtagcgcataa

SEQ ID NO: 484065 - DNA, 444 bp, Shigella sonnei
atggcagatatcactcttatcagcggcagcaccctcggcggtgccgaatatgtagcagaacacctggctgaaaagctggaagaggcgggttttaccaccgaaacgctgcacggtccgctgttggaagatttatctgcctcggggatctggctgattatcagctccacccacggtgccggagatattccggacaacctttctcctttctatgaagcattgcaggaacagaagcccgatctttctgcggtccgctttggcgcaatcggtattggtagtcgtgaatatgacaccttttgtggggctatcgataaactcgaggcagaactcaaaaattccggtgcaaaacagacaggcgaaacactgaagatcaacattcttgatcacgacattccggaagatccggcagaagaatggctgggatcgtggattaatttactcaaataa

SEQ ID NO: 484066 - DNA, 459 bp, Shigella sonnei
atggaaaattatctgatcgacaatctggaccgtggcatcctggaagcattaatgggcaatgcgcgcaccgcttacgccgaactggcgaaacaatttggcgtcagtccggggacgattcacgttcgagtagagaaaatgaagcaggcggggatcattaccggggcgcgtattgatgtcagcccgaagcagctcggttatgacgtaggctgctttatcggcattatattaaagagcgccaaagactacccttccgcgctggcaaagctggaaagccttgctgaagtcactgaagcctattacacaacaggccactacagcatctttataaaagtaatgtgccgttcgatcgacgctctccagcatgtacttatcaacaagatccaaacaattgatgaaattcagtccaccgagacattgatcgtcctgcaaaacccgatcatgcgtaccatcaagccataa

SEQ ID NO: 484067 - DNA, 993 bp, Shigella sonnei
atgaaaaccgcttacattgccaaacaacgccaaattagcttcgtgaaatctcacttttctcgccaactggaagaacgtctggggctgatcgaagtccaggcgccgattcttagccgtgtgggggatggcacgcaggataacttgtcgggctgtgaaaaagcggtgcaggtaaaagtgaaagctctgcctgatgcccagttcgaagtggttcattcactggcgaagtggaaacgtcagaccttagggcaacacgacttcagcgcgggcgaagggctgtacacgcacatgaaagcccttcgccccgatgaagaccgtctttctccgttgcactcggtctatgttgaccagtgggactgggaacgcgtaatgggcgacggtgagcgtcaattctcgactctgaaaagcacggtagaggcgatctgggcgggaattaaagcaaccgaagctgcggttagcgaagagtttggcctggcaccgttcctgccggatcagatccacttcgtacacagccaggagttactgtctcgttatccggatctcgatgccaaagggcgtgagcgggcgatagcgaaagatcttggcgcggtattccttgtcgggattggcggcaagctgagcgatggtcatcgccacgacgtgcgcgcaccggattatgatgactggagcaccccgtcagagctgggtcatgcgggtctgaacggcgatattctggtgtggaaccctgtactggaagatgcgtttgagctttcttccatggggatccgcgtggatgccgacacgttgaagcatcagttggcgctgaccggtgatgaagatcgtctgcagctggaatggcatcaggcgctgctgcgcggtgaaatgccgcagaccatcggcggcggtatcggccagtctcgtttgaccatgctgctgctgcaactgccgcatatcggccaggttcagtgtggtgtatggccagctgctgttcgcgagaacgtcccttctctgctgtaa

SEQ ID NO: 484068 - DNA, 1452 bp, Shigella sonnei
atgctaacgctggatacgcttaatgtgatgctggccgtcagcgaagagggattgatcgaagagatgatcatcgcactgctggcctcaccgcagctggcggtcttctttgaaaaattcccacgcctgaaggcggcaatcactgatgatgttccccgctggcgtgaggcgctgcgcagtcggctgaaagatgcccgagtcccgccggaactcaccgaagaggtgatgtgctatcagcaaagccagctcctctccacgccgcagtttattgtgcagctaccacagatcctggacttactgcatcgtctgaattccccatgggcagaacaagcccggcagttggttgatgctaacagcacaataacttcagcgttacacacgctttttctccagcgttggcgtttaagtctgatcgtgcaagcaacgacgttaaatcaacagctattagaagaagaacgcgaacaactgttgagtgaagttcaagaacgcatgacgctgagcggacaacttgaaccgattctcgcagataacaatactgcagctggtcgtctgtgggatatgagcgccggtcagcttaaacgtggcgactatcagttgattgtgaaatacggtgaatttcttaacgaacagccggaactgaaacgcctggcagagcagctggggcgttctcgggaagccaaatcaataccgcgcaacgatgcgcagatggaaaccttccgcaccatggtgcgcgaaccggcgacggttcctgagcaggttgatggtctgcaacaaagcgatgatattttacgtcttctgccgccagaactggcgacactagggataacggaactggagtatgagttttaccgtcggctggtggaaaaacagttgctcacctatcgcctgcacggtgagtcgtggcgtgaaaaagtgatcgaacgtccggtggtacataaagattacgatgaacagccgcgcgggccgtttattgtctgtgtggatacttccggctcaatgggcggctttaatgaacagtgtgcgaaagcgttctgcctggccttgatgcgcattgctctcgctgaaaaccggcgctgctatattatgctattttccaccgagatcgtccgttatgagctttcaggcccccaaggcatcgaacaagcaatccgttttttaagccagcagtttcgtggcggcaccgatcttgccagttgttttcgcgccattatggaacgcttgcaaagcagggaatggtttgatgccgatgcggtggtgatttctgattttatcgctcagcggttgcctgacgacgtgacgagtaaagtgaaagagctgcagcgggtacatcagcatcgctttcatgccgtggcgatgtcggcacacggcaaacccggcatcatgcgcattttcgatcatatctggcgctttgataccgggatgcgaagccgcctgctcagacgctggcggcgataa

SEQ ID NO: 484069 - DNA, 1497 bp, Shigella sonnei
atggctcaccctcatttattagcggaaagaatttcccgcctgagcagttcgttggaaaaggggctttatgaacgtagccacgccatccgcttgtgtttattagcggcattaagtggtgaaagtgtgttcctccttggcccgccaggtattgccaaaagtttgatcgcccggcgcttaaaattcgcctttcagaatgcccgcgcgtttgaatatctgatgacccgcttctccacgccggaagaagtttttggtcccctttctattcaggcgctaaaagatgaagggcgctatgaacgtttaaccagcggttacctgccggaagcagaaattgtctttctggatgagatctggaaagcgggcccggcaattcttaataccttgctcaccgccattaacgagcgccagttccgcaacggtgcacacgtagaaaaaatcccgatgcgtctgctggtggcggcctccaacgagctgccggaagcagacagcagtctggaagcgttatatgaccgcatgctgattcgtctgtggttagataaagtgcaggataaagcgaatttccgctccatgctgaccagtcaacaggatgaaaacgacaatccggttcctgatgccttgcaggtcacagatgaagaatatgaacgctggcagaaagagattggtgaaattacgctgcccgatcatgtatttgagctgatttttatgctgcgccagcaactggataaattaccggatgcgccttatgtctcggatcgtcgctggaaaaaagcgatccgattattgcaggccagcgccttttttagcggtcgcagtgctgttgccccggtagatctcattttgctgaaagattgcctgtggtatgacgcgcaaagcctgaatttgatacaacaacaaattgatgtattgatgaccggtcatgcctggcaacagcaagggatgttgactcgccttggcgcgattgtgcaacgtcacctgcaactccagcagcaacaaagcgataaaacagccttaacggtaattcgtctgggcggcattttcagccgtcgtcagcagtatcaacttcctgttaacgttactgcttccactctgactctactgctgcaaaaaccgttaaaactgcatgatatggaagtggttcatatctcctttgagcgtagcgcgctggaacagtggctgagcaaaggtggtgaaattcgcggtaaactgaacggtatcggctttgcccagaaactgaatctggaagttgatagcgcccaacatcttgtcgttcgcgatgtaagtttacaaggcagtacgctggcacttcccggttcatcggctgaaggtctgcctggtgaaataaaacaacaactggaagagcttgaaagcgactggcgcaagcaacacgctttattcagcgaacagcaaaaatgtctgtttatccctggcgactggttaggtcgcattgaagccagcctacaggatgtcggtgcacagattcaccaggcacaacaatgctaa

SEQ ID NO: 484070 - DNA, 153 bp, Shigella sonnei; identical to SEQ ID NO: 461123

SEQ ID NO: 484071 - DNA, 735 bp, Shigella sonnei
atgtccaaactcgatctaaacgccctgaacgaactgccgaaggtagatcgtattctggcgctggcggaaactaacgccgaactggaaaaactggacgctgaaggccgcgtagcctgggcgctggataatctgcccggtgaatatgtactttcttccagctttggcattcaggcggcggtgagcctgcatctggtgaatcaaattcgcccggatattccggtgatcctcaccgatacgggttacttgttcccggaaacctaccgctttattgacgagttaacggacaaactcaagctcaacctgaaagtgtaccgtgctaccgaaagcgcagcctggcaggaagcacgctacggaaaactgtgggagcagggcgttgaaggcattgaaaagtacaatgacatcaacaaagtcgaaccgatgaaccgggctctgaaagaacttaacgcgcaaacctggtttgctggcctgcgccgtgaacaatccggcagtcgcgccaatttaccggtgctggcaattcagcgtggcgtatttaaagtgctgccgattatcgactgggataaccgaactatttatcagtacctgcaaaaacatggcctgaaatatcacccattatgggatgaaggatatttatcggtcggtgatacccatacaacccgtaaatgggaacctggcatgtcggaagaagaaacacgtttctttggcttaaaaagggaatgtggattgcacgaagggtaa

SEQ ID NO: 484072 - DNA, 1713 bp, Shigella sonnei
atgagcgaaaaacatccagggcctttagtggtcgaaggaaaactgacagacgccgagcgcatgaagcttgaaagcaactacctgcgcggcaccattgcggaagatttaaacgacggtctgaccggcggctttaagggcgacaacttcctgctgatccgcttccacggcatgtatcagcaggatgaccgcgacatccgtgccgaacgtgctgaacagaagctggagccgcgccacgcgatgctgcttcgctgtcgtctgccgggtggggtgattaccactaaacagtggcaggcgatcgacaaatttgccggtgaaaacaccatctatggcagcattcgcctgaccaaccgccagacgtttcagttccacggcattctgaaaaagaacgtcaaaccggtgcaccagatgctgcactcggtcggtcttgatgcgctggcgacagctaacgacatgaaccgtaacgtactctgcacctcgaacccttacgagtcgcagctgcacgcggaagcgtacgagtgggcgaagaagatttctgagcatctgttgcctcgtacccgcgcgtatgcggagatctggctcgaccaggaaaaagtcgccactactgatgaagaaccgatccttggtcagacctacctgccgcgtaagttcaaaaccacggtagtgatcccgccgcagaacgatatcgatctgcatgccaacgacatgaacttcgtggcaatcgccgaaaacggcaagctggtaggcttcaacctgctggtgggcggtgggctttctatcgaacacggcaacaagaaaacctacgcccgcacggcgagcgagtttggctatctgccgctggagcatacgctggcggtggccgaagccgtcgtgacaactcagcgtgactggggtaaccgaaccgatcgtaaaaatgccaaaaccaaatacacgctggagcgcgtgggggttgagacgtttaaagcggaagtggagcgtcgcgcggggatcaaatttgaaccgatccgtccatatgagttcaccggacgaggcgatcgtattggctgggttaagggcattgatgataactggcacctgacgctgtttatcgaaaatggtcgcatccttgattatccggggcgtccgctgaaaaccggcctgctggagatcgcgaagatccacaaaggcgatttccgcattacggcgaaccagaatctgatcatcaccggtgtaccggaaagcgagaaagcgaagatcgagaagatcgccaaagagagcgggttaatgaatgccgtcacgccgcagcgtgaaaactcgatggcctgcgtgtcattcccgacttgcccgctggcgatggcggaagcagagcgtttcctgccgtcttttatcgacaacatcgataatttaatggcgaaacatggtgtcagcgatgagcatatcgtgatgcgtgtaacaggctgcccgaacggttgtggtcgcgcgatgctggcggaagtgggcctggtgggtaaagcgccgggtcgctacaacctgcatcttggcggcaaccgcattgggacacgtatcccacggatgtataaagaaaacatcaccgagccggaaatcctggcgtcgcttgatgaactgatagggcgctgggcgaaagagcgcgaagcgggtgaaggcttcggcgactttacggtgcgtgcgggcatcattcgcccggtgctcgatccggcgcgcgatttgtgggattaa

SEQ ID NO: 484073 - DNA, 1800 bp, Shigella sonnei
atgacgacacaggtcccaccttccgcgttgcttccgttgaacccggagcaactggcacgccttcaggcggccacgaccgatttaacgcctacccagcttgcctgggtttctggctatttctggggcgtactcaatcagcagcctgctgcgcttgcagcgacgccagcgccagccgcagaaatgccgggtataactattatctccgcctcgcaaaccggcaatgcgcgccgggttgctgaagcattacgcgatgatttattagcagcaaaactgaacgttaagctggtgaacgcgggcgactataaattcaaacaaatcgccagcgaaaaactgctcatcgtagtgacgtcaacgcaaggggaaggggaaccgccggaagaagccgtcgcgctgcataagttcctgttctccaaaaaagcgccaaagctggaaaacaccgcgtttgccgtgtttagcctcggcgatagctcttatgaatttttctgccagtccgggaaagatttcgacagcaagctggcggaactgggtggtgaacgcctgctcgaccgtgtcgatgccgatgttgaataccaggctgctgccagcgagtggcgcgcccgcgtggttgatgcgcttaaatcgcgtgcgcctgtcgcggcaccttcgcaatccgtcgctactggcgcggtaaatgaaatccacaccagcccgtacagcaaagacgcgccgctggtggcgagcctttcggttaaccagaaaattaccgggcgtaactctgaaaaagacgttcgtcatatcgaaattgacttaggcgattcaggcctgcgttaccagccgggtgacgcgctgggtgtctggtatcagaacgacccggcactggtgaaagaacttgtcgaactgctgtggctgaaaggcgatgaacctgtcaccgtcgagggcaaaacgttgcctctgaacgaagcgctacagtggcacttcgaactgaccgtcaacaccgccaacattgttgagaactatgccacgcttacccgcagcgaaacgctgctgccgctggtgggcgataaagcgaagttacagcattacgccgcgaccacgccgattgtcgacatggtgcgtttctctccggcgcaactggatgccgaagcgctgattaacctgctgcgcccgctgaccccgcgcctgtattccatcgcctcctcgcaggcggaagtcgagaacgaagtacacgtcaccgttggtgtggtgcgttacgacgtggaaggccgcgcccgtgccggtggtgcctccagcttcctcgcggatcgcgtggaagaagagggcgaagtccgcgtatttatcgaacataacgacaatttccgcctgcccgctaacccgcaaacgccagtgattatgattggccccggtaccggcatcgcgccgttccgtgcctttatgcagcaacgcgccgccgacgaagcgccgggtaaaaactggctgttctttggcaacccgcactttacggaagatttcctctaccaggtggagtggcagcgctacgtcaaagagggcgtgctgacgcgtatcgatcttgcctggtcgcgcgaccaaaaagaaaaagtttatgtacaagacaaactgcgcgaacagggcgcggagctgtggcgctggatcaatgacggtgcccacatttatgtctgcggcgacgctaatcgcatggcgaaagacgttgagcaggcacttctggaagtgattgccgaatttggtggcatggacaccgaagcggcggatgaatttttaagtgagctgcgcgtagagcgccgttatcagcgagatgtctactaa

SEQ ID NO: 484074 - DNA, 366 bp, Shigella sonnei
atgatgtccaccacgttatttaaagatttcaccttcgaagccgctcaccgcttaccacacgtcccggaagggcataaatgtggtcgcctgcacgggcattcctttatggtgcgactggaaattaccggggaagtcgatccgcatacgggctggattatcgatttcgctgaactgaaagcggcgtttaagccaacttatgagcgcctcgatcaccattatctcaatgatattccaggtctggaaaacccaaccagcgaagttttagcaaaatggatttgggatcaggttaaacccgttgtgccgctgttaagtgcggtgatggtaaaagaaacctgcaccgcagggtgtatctatcgcggcgaatga

SEQ ID NO: 484075 - DNA, 1272 bp, Shigella sonnei
atggaagacgactgcgacattattattattggtgccggtattgcaggcaccgcttgcgcgttacgctgcgcgcgagcgggtttatccgttttgttactggaacgcgctgaaatccccggcagcaaaaatctttccggcgggcggttatatacccatgcactcgcggaactcctcccgcaatttcatctgaccgcgcctcttgaacgacgcatcactcacgaaagcctttccctgttaacgcccgatggcgtaacgacgttttccagcttacagcccggcggtgaatcctggagtgtattacgtgcacggttcgatccgtggctggttgccgaagccgaaaaagaaggtgtcgaatgcatccccggagcgacggtggatgcactgtatgaagaaaacggcagagtctgtggcgttatttgtggtgacgatattctccgcgcccgttatgtggtgctggcagaaggtgccaacagcgtcctggctgaacgtcacgggttagtgactcgtcctgctggcgaagcgatggcgttggggatcaaagaagtgctgtcgctggaaacatccgctattgaagaacgttttcatctggagaataacgaaggcgcagcgttgctgttcagcggcggaatctgtgatgacttacccggcggcgcatttctttatactaatcaacaaacgctctcgttagggattgtttgcccgctctcttcccttacgcaaagtcgtgttccggcaagcgagctgctgactcgctttaaagcgcatccggcagtgcgcccgcttatcaaaaacacggaatcactggagtatggtgcgcatctggagccagaaggtggcttgcacagtatgccggtgcaatacgccggtaacggctggctgctggtgggcgatgcgttgcgcagttgcgtcaataccggaatttccgtgcgcggcatggatatggcgctgactggcgcacaggcggcggcacaaacgctaataagcgcctgccagcaccgcgagccgcaaaatctgtttgcgctttatcatcacaacgtagagcgcagcctgctatgggatgttctacaacgttatcagcatgttccggcgcttttgcaacgccctggctggtatcgggcgtggcctgcgttaatgcaggatatttcccgcgatttatgggatcagggtgataaacctgttccaccgctgcgccagttattctggcgtcatttacgtcgtcatggcctgtggcatctggcgggcgatgttatcaggagtctgcgatgtctgtag

SEQ ID NO: 484076 - DNA, 261 bp, Shigella sonnei
atgtctgtagcccataatctctggcgcgttgctgatgcgccgcacattgttccggctgactccgttgagcgtcagatggtacaacggttgattaacgcctgtccggcaggtcttttttcgctcacaccggaaggtgacttacgcgttgattatcacggctgcctggagtgtggcacctgccgtttgctgtgcgacgaatccacactacaacagtggcgctatccgccttccggattcggcatcacctaccgctttggataa

SEQ ID NO: 484077 - DNA, 576 bp, Shigella sonnei
atgcccctcttacacctactccgccagaatccggtgattgctgccgttaaagataatgccagcctgcaactggctatcgattctgaatgccagtttatttccgtgttgtacggcaatatctgcaccatcagtaatatcgttaaaaagattaagaacgccgggaaatatgcttttattcatgttgatttgctggaaggcgcgtcaaataaagaagtcgttattcagtttttgaaactggtgaccgaggcggacggcattatcagtaccaaagcctcaatgttgaaagcggcaagagcggaaggttttttctgtattcatcgcctgtttattgttgattcaatttcgtttcacaacattgataagcaagttgcgcaatcgaatccggattgtattgagatcctgccaggctgtatgcccaaagtgctgggctgggtgacagagaaaatccgccaaccgctgattgccggtgggctggtgtgcgatgaagaagatgcgcgtaatgcgattaacgcgggtgtcgtggcgctttccaccacgaataccggggtctggacgttagcgaaaaaattactttga

SEQ ID NO: 484078 - DNA, 861 bp, Shigella sonnei
atgaatatcgcaattgtgacaataaatcaggagaatgccgcaatagcaagctggctggcggcgcaggatttcagcggttgtaccctggcgcactggcagattgaacctcagcctgtagtggcggaacaggtgctggatgcgttggtggaacagtggcagcgaacgcctgcggacgttgttctctttccgccgggaacgtttggcgatgaactgtcgacccggctggcctggcgtttacatggtgcaagcatctgccaggtgacttcgttagatattccaaccgtaagcgtgcgcaaatcccactggggaaatgcgctaacggcgacgctgcaaacagaaaaacgcccgctatgcctttccctggcgcgtcaggcgggagcagcgaaaaacgccacgttgccctctggaatgcaacaactgaacattgtcccgggtgcgcttccggactggctggttagcacagaggatctgaaaaatgttactcgcgacccattagctgaggccagacgggtgctggtggtggggcagggcggagaggcagataaccaggaaatcgctatgctggcagaaaagctgggagccgaagtgggctacagtcgggcgcgagtgatgaacggtggcgttgatgctgaaaaagtgattggtatttccggacatctgctggcacctgaggtgtgtattgttgttggcgcttctggcgcagcagcgttaatggcgggcgtacgcaatagcaagtttgtggtggcgattaatcatgacgccagcgctgcggtattttcacaggcagatgttggcgtggttgatgactggaaagtggtgctggaggcactggtgacaaacattcacgcagattgccaataa

SEQ ID NO: 484079 - DNA, 780 bp, Shigella sonnei
atgaacattctgttagcgtttaaagccgaaccggatgccggaatgctggcggaaaaagagtggcaggcggcggctcagggtaaaagcggaccggatatttcgctactgcgaagtttactcggtgctgatgaacaggccgctgccgcgctgctgttggcgcagagaaaaaacggtacgccgatgtctttaaccgcgttgagcatgggggatgaacgggcattgcactggctgcgctatctcatggctcttgggtttgaggaagctgtattgctggagacggcggcagatctgcgctttgcgccggaatttgtcgctcgccatattgccgaatggcagcatcagaatccgctggatctgataattaccggctgccaaagcagcgaagggcagaatgggcaaacgccatttttgctggcggaaatgctgggctggccctgcttcacccaggtggagcgtttcactctcgacgcgctgtttatcaccctcgaacagcgtactgaacatgggttgcgttgttgccgggttcgcttgcctgcggtgattgccgtgcgtcagtgcggtgaagtggccttgccagtaccgggaatgcgccagcgaatggctgcggggaaagcagaaattatccgtaaaactgttgctgccgaaatgccagcgatgcagtgtctgcaactggcaagagcagagcaacgacgcggagcgacgctgattgatgggcaaacggtagcagaaaaagctcaaaagctatggcaggactatttacgccaaaggatgcagccatga

SEQ ID NO: 484080 - DNA, 1410 bp, Shigella sonnei
atgacggggcgttgccttttcggcttctcaggcgagaagccgttcttattaccggacaatgaaggggtaaagatgaacacttcaccggtgcgaatggatgatttaccgcttaaccgttttcactgccgcattgctgcgctcactttcggcgcacacctgaccgacggttatgttctcggcgtcattggttacgccattattcagcttacgcccgccatgcaactgacgccgtttatggcgggaatgatcggcggctcggcgctccttggtttgttccttggcagcctggttcttgggtggatctccgaccatattggtcggcaaaaaatcttcaccttcagctttttgctgattacgcttgcttcgtttttacaattttttgccaccacgccagagcatcttattggactgcgcattttgattggcattggtctgggaggcgattattcagtaggtcacaccttgctggctgaattttccccgcgccgccatcgcggtattttgctgggcgcattcagcgtggtgtggaccgtaggctatgtgctggcaagtattgccggacatcactttatttccgaaaacccggaggcctggcgctggctactggcatcggcagctctgcccgcgttgttgattacgttattacgctggggaacgccagaatcaccacgctggctactgcgccaggggcgttttgcagaagctcacgctatcgtgcatcgctattttggtccccatgttttactgggcgatgaagtggtaacggcgacccataaacacatcaaaaccttgttctcttcgcgttactggcggcgcacggcgtttaacagcgtcttctttgtctgcctcgtaatcccatggtttgtgatttatacctggctgccaactatcgcccagactattggtctggaagatgcgctgactgccagcctgatgcttaatgcgttgttaattgtgggcgcgctgctgggattagttctgacgcacctgctggcacatcgcaaatttttgctgggaagttttttgctgctggcggcaacgctggtagtgatggcctgtttgccttccggcagttcattaacgctgctgctttttgttctcttcagcaccaccatttcggcagtcagtaatctggtgggcattttgcctgcggaaagttttcctactgacattcgctcgctgggcgtcggttttgccaccgccatgagtcgacttggcgcggcggtaagtactggcctgctgccgtgggtgctggcgcagtggggaatgcaagtcaccttattgctcctggcgacagtgttgttggttgattttgttgtgacctggctatgggcaccagaaactaaagccctcccgctggtggcggcgggaaatgtaggaggtgcgaatgaacattctgttagcgtttaa

SEQ ID NO: 484081 - DNA, 1455 bp, Shigella sonnei
atgtctttatctcgcgcagcgattgtcgaccaactaaaggaaattgttggtgcagatcgcgtaattaccgatgaaacagtattaaagaagaacagtattgaccgttttcgtaaatttccggatattcatggcatttatactttgccgattccggcagcggtcgtaaaactcggttccacagagcaagtatcccgtgtgctgaattttatgaatgcgcacaaaattaacggtgtgccgcgtaccggcgcttccgccactgaaggtgggctggaaaccgttgtggaaaactcggtggtgcttgacggctccgccatgaatcaaatcattaatattgatattgagaatatgcaggcgacggcgcaatgtggcgttccgctggaggtgctggaaaatgcgttgcgtgaaaaaggttacaccacggggcattctccgcagtcaaagccgctggcgcagatgggcggcttggtagcaacccgcagtatcgggcagttctccacactctacggcgcaatcgaagatatggtcgttggtctggaagcagtattggctgatggcaccgtcacacgcattaaaaacgtgccacgccgcgcggctggcccggacattcgccacatcatcatcggtaacgaaggtgcactttgctatatcactgaagtaacagtgaaaatctttaaattcaccccggaaaacaacctcttctacggctatatcctggaagacatgaaaaccgacttcaacatcctgcgtgaagtcatggtggaagggtatcgtccgtcgatcgctcgtttgtatgacgctgaagatggcacccaacacttcacccattttgcagacggaaaatgcgtgctgatctttatggctgaaggtaaccctcgcattgcgaaggcgacgggcgaagggattgcggaaatcgttgcccgctacccgcaatgccagcgcgtggacagcaagctgatcgaaacctggtttaacaacctgaactggggaccggataaagtggctgccgaacgtgtgcagatcctcaaaaccggcaacatgggctttaccactgaagtgtccggctgctggagctgcatccacgaaatctacgaaagcgttattaaccgtattcgtactgagttcccgcacgccgacgacatcaccatgctgggcggtcattcctctcatagctatcagaacggcaccaacatgtacttcgtctacgattacaacgtcgttgactgtaagccggaagaggaaatcgacaagtaccacaatccgctcaacaagatcatctgtgaagaaaccattcgcctcggcggttcgatggtgcaccaccacggtatcggtaaacatcgcgttcactggagcaaactggaacacggcagcgcgtgggcgttgctggaagggctgaaaaagcagttcgatcctaatggcattatgaatacgggtactatctatccgattgaaaaataa

SEQ ID NO: 484082 - DNA, 636 bp, Shigella sonnei
ttgaaagataacggcgaaacaaaggaaatgattgaaaaacagggtgttgaggtggacttcatgcaggtggatatcaccgcagaaggcgcgccgcagaagattatcgctgcttgctgtgagcgtttcggtacagttgatattctggtaaacaatgccggtatttgtaagctgaataaggtgctggacttcggtcgtgccgactgggatccgatgattgatgtgaacctgaccgccgcattcgagttaagctatgaagctgcaaaaattatgatcccgcagaaaagcggcaaaattattaatatctgttcattgttctcttacttaggtggacaatggtcacctgcatattctgccactaaacatgctcttgccggattcaccaaagcttattgtgatgaactaggtcaatataatattcaggtaaatggtattgctcctggctattatgcaacagatattacgctggcgacacgcagtaatccagaaaccaatcagcgcgttcttgatcatattccggcaaaccgttggggcgatactcaggatttaatgggcgcagctgtattcctcgcaagtccggcttcaaattatgtcaatgggcatttattagtggtcaatggtggttatttagtgcgctaa

SEQ ID NO: 484083 - DNA, 192 bp, Shigella sonnei
atgtcaatcgaatctctcaatgcgttctcaatggattttttctcactgaaaggtaaaaccgcaattgttaccggtgggaatagcggtttaggccaggcatttgccatggcgttggccaaagctggcgcaaatatctttattcctagtttcgtcaaagataacggcgaaacaaaggaaatgattgaaagataa

SEQ ID NO: 484084 - DNA, 1278 bp, Shigella sonnei
atgcaacacaactcatatcgccgttggataaccctcgcgataattagttttagcggcggcgttagttttaacctggcttatttacgttatatttttcaaattcccatggcgaaatttatgggattcagcaataccgagataggtttaataatgagtacctttggtattgcggctattattctttatgcccccagcggcgttattgccgataaattttcacaccgcaaaatgattacttccgcgatgatcattaccggattactgggtctgttaatggcaacgtatccaccgctgtgggtaatgctctgtattcaggtcgcctttgcgataacgacgattttaatgctgtggtcggtgtcgattaaagccgcctcgttgctgggcgatcatagtgagcaagggaaaattatgggctggatggaagggctgcgcggcgtcggtgtaatgtcgctggcggtgtttaccatgtgggtcttttctcgctttgcaccggatgacagcgccagcctgaaaacagtcattatcatctacagtgtggtttacatcttgttggggattctgtgctggttttttgttagcgataacaacaacctgcgcagtgccaataacgaagaaaaacagtcattccagcttagcgacatccttgccgttttgcgtatcagcaccacctggtattgcagcatggtgatttttggtgtcttcacaatctacgccattctgagttactccaccaactatctgaccgaaatgtacggcatgtcgctggtggcagcgagctacatggggattgtgatcaacaaaatcttccgcgcgctgtgcggcccacttggaggcattatcaccacctacagtaaagtgaaatcccctacccgcgtgattcaaatcctttccatcatcggtttgctggcgttgacagccctgctcgtcacgaactctaacccccaatcggtcgcgatggggattggcctgattttactgctgggattcacctgttacgcctcacgcgggctgtactgggcctgccccggcgaagcgagaacaccgtcttacattatgggcaccacggtaggtatttgttcggtgattggattcctgccggatgtcttcgtttacccgattatcggccactggcaagacaccctgcccgctgcagaagcctaccgcaatatgtggctgatgggcatggcggcgctcggcatggtgattgtctttacctttttgctgttccaaaaaattcgtactgctgatagcgcccccgcaatagctagcagcaagtaa

SEQ ID NO: 484085 - DNA, 1254 bp, Shigella sonnei
atgtcgaaaaaatacatcatagggattgatggcggaagtcagagcacaaaagtggtgatgtacgatctggaaggtaatgtggtttgcgaaggtaaaggcttattacagccgatgcacacgcctgatgccgatactgcagaacatcctgacgacgatttatgggcatcattatgttttgcaggtcacgatttgatgagccagtttgccgggaataaagaagatattgttggcatcggcctgggctccatccgttgctgccgtgcgttattgaaagccgacggcacgccagctgcgccgttgattagctggcaggatgcacgcgttacacgcccttacgaacatacgaatcctgacgtggcgtatgtaacctctttttcgggttatctgacgcatcgcttaaccggcgaatttaaagataatatcgccaactattttggtcagtggccggtggattataagacctgggcatggagcgaagatgccgcagtcatggagaagtttaatatcccccgtcatatgctgtttgatgtgcaaatgccaggcactgttcttgggcatatcacacctcaagccgcgctggcgacgcatttcccggcaggactgccggttgtttgtaccaccagtgataaaccggtagaagctctgggagccggattactggatgatgaaactgcggtaatttctcttggcacttacatcgcattgatgatgaacggcaaagccttgccgaaagatccggtggcgtactggccgattatgtcttctattccgcaaacattgctgtatgaaggttacggtattcgcaaaggcatgtggacggtgagctggctgcgcgacatgttaggcgagtcgttaattcaggatgccagggcgcaggatctttcaccggaagatttactcaacaagaaagcctctagtgtgccacctggctgtaatgggctgatgacggtgctggactggctgaccaatccgtgggaaccgtacaaacgcgggattatgatcggctttgattccagcatggattacgcatggatatatcgttcgatattggaaagcgtggcgctgacgctgaagaacaattacgacaatatgtgtaatgaaatgaatcactttgcgaaacatgtaatcattactggcggcggttcgaacaggatctgtttatgcagatttttgccgacgtgttcaaccttccggcacgccgtaacgccattaacggttgtgcaagcctgggggcagcgattaatacaggggtag

SEQ ID NO: 484086 - DNA, 378 bp, Shigella sonnei; identical to SEQ ID NO: 476066

SEQ ID NO: 484087 - DNA, 276 bp, Shigella sonnei
gtggcttctgtttctatcagctgtccctcctgttcagctactgacggggtggtgcgtaacggcaaaagcactgccggacatcagcgctatctctgctctcactgccgtaaaacatggcaactgcagttcacttacaccgcttctcaacccggtacgcaccagaaaatcattgatatggccatgaatggcgttggatgccgggcaactgcacgcattatgggcgttggcctcaacacgattttacgtcacttaaaaaactcaggccgcagtcggtaa

SEQ ID NO: 484088 - DNA, 672 bp, Shigella sonnei
atgcagtacccgattaacgagatgttccagaccctgcaaggtgagggttactttaccggcgtccccgccatttttattcgtttacagggatgcccggttggctgtgcctggtgcgacaccaaacacacctgggaaaagcttgaggatcgggaagtctcccttttcagcattctggcgaagaccaaagagagtgataagtggggggcggcgagcagtgaagacttgttggctgtcattagtcgccagggatacaccgcgcggcatgtggtgattacgggtggtgagccttgcattcatgatttgctaccactgactgatctgctcgaaaagaacggttttagctgccagatcgaaaccagtggtactcatgaggtacgctgcacaccgaatacctgggttaccgtatcgccaaagctgaacatgcgcggcggctatgacgtgttgtcacaggcactggagcgagccaacgaaatcaagcatccagtggggcgcgtacgcgatattgaagcactggatgaactattggcaacgctgaccgatgataaaccgcgagtcattgcactgcagccgattagccaaaaggatgatgccacacgtttgtgcattgaaacctgcattgcgcgtaattggcgtttgtcgatgcaaacacataaatatctaaatattgcctga

SEQ ID NO: 484089 - DNA, 1119 bp, Shigella sonnei
atgaataacgaggaaacattttaccaggccatgcggcgtcagggcgttacccggcgcagctttctcaaatattgtagtctggctgccacgtcgctgggattaggcgcgggaatggcaccaaagattgcctgggcgctggagaacaaaccccgcattccggtggtatggatccacggtctggaatgcacctgctgtaccgaatcttttatccgctccgctcacccactggcgaaggacgtcatcctttccctgatttccctcgattatgacgatactttgatggctgccgccggaacccaggcggaagaagtcttcgaagacatcatcacgcaatacaatggcaaatatatcctcgcagtagaaggtaatccgccgctgggcgagcaggggatgttctgtatcagcagcggtcgaccgtttattgagaaactcaaacgtgccgctgccggagccagcgcgattatcgcctggggaacctgcgcgtcctggggctgcgtgcaggccgcgtggcccaatccgacgcaggcaacgcctatcgacaaagtcatcaccgacaaacccattatcaaagtacctggctgcccgccgatcccggatgtgatgagcgccatcattacttacatggtgacctttgatcgcttgccagatgtcgacagaatgggccgtccgctgatgttctatggtcagcgaatccacgataaatgctatcgccgcgcccacttcgacgccggagagttcgtccagagttgggatgatgacgctgcccgcaaaggttactgcctgtacaaaatgggctgcaaagggcctaccacctataacgcctgttcctccacacgctggaatgatggcgtttctttcccaatccagtctggtcacggctgcctgggctgtgcggaaaatggtttctgggattgcggttcgttctacagccgcgtggtcgatattccgcaaatgggtactcattccaccgccgataccgtcggtttaaccgcgcttggtgtggtggcagcggctgttggtgtgcacgcagtcgccagcgccgttgaccagcgcagacgtcataaccagcaacctacagaaaccgaacatcagccaggcaatgaggataaacaggcatga

SEQ ID NO: 484090 - DNA, 1794 bp, Shigella sonnei
atgagcactcagtacgaaactcagggatacaccatcaataatgccggacgccgcctggtggtcgacccgattacgcgcatcgaaggccacatgcgctgcgaagtgaatattaacgatcagaatgtgatcaccaatgccgtctcctgcggcaccatgtttcgcgggctggagatcatcctacaagggcgcgacccgcgcgatgcgtgggcgttcgttgaacgtatctgcggcgtctgtactggcgtacacgccctggcttcggtttacgccatcgaagatgctatcggtattaaagtgccggacaacgccaatatcatccgcaacattatgctggcaacgctctggtgccacgatcatctggtgcacttctatcagcttgccgggatggactggatcgatgtgttagatgcgctgaaagccgacccgcggaaaacctccgaactggcgcaaagtctctcctcttggccgaaatcatcccctggctatttcttcgacgtacaaaaccgcctgaaaaaatttgttgaaggcgggcagttggggatcttccgcaatggctactgggggcacccgcagtacaaactgccgccagaagctaacctgatgggctttgcccactatctcgaagctctcgatttccagcgtgaaattgtcaaaatccacgcggtctttggcggtaaaaacccgcatccaaactggattgtcggcgggatgccttgcgccattaacattgacgaaagcggcgcggtcggggcggtcaatatggaacgcctgaacctggtgcagtcgattatcacccgcacggcggacttcattaacaacgtgatgatccccgacgccttagccatcggtcagttcaacaaaccgtggagcgaaatcggcacgggtctttctgataaatgtgtcctcagctacggtgcgttcccggatattgccaacgactttggtgagaaaagtctgctgatgcctggcggcgcggtgattaacggcgacttcaacaatgtgctgccagtggatttggttgatccgcagcaggtgcaggagtttgtcgaccacgcctggtatcgttatcccaacgatcaggtcgggcgtcatccattcgatggcattaccgacccgtggtacaaccccggcgatgtcaaaggcagcgataccaacattcagcagctgaatgaacaggaacgctactcgtggatcaaagcgccgcgctggcgcggtaacgcgatggaagtggggccgctggcacgcacgttaatcgcttatcacaaaggcgatgctgcgaccgttgagtcggtcgatcgcatgatgtcggcgctgaacctgccgctttccggtatccagtcaacgttgggccgcattttgtgccgcgcgcacgaagcacagtgggccgcaggtaagttgcaatatttcttcaacaagctgatgactaacctgaaaaacggcaatcttgccaccgcctccacggaaaaatgggaacctgcaacctggccgacagagtgccgtggcgtcggctttaccgaagcgccgcgcggggcgttaggccactgggccgccattcgcgatggcaagattgatctctaccagtgcgtggtgccgaccacctggaacaccagcccgcgcgatcccaaagggcagattggcgcttatgaagcggcgctgatgaacaccaaaatggcgatccccgagcaaccgctggagatcctgcgtactctgcacagctttgacccgtgcctcgcctgttcaacacacgtgctgggcgacgacggtagcgagctgatctccgtgcaggtgcgttaa

SEQ ID NO: 484091 - DNA, 369 bp, Shigella sonnei
atgcaacagaaaagcgacaacgttgtcagccactatgtctttgaagcgccagtccgcatctggcactggctgacggtgttatgcatggcggtgttgatggtcaccggatactttatcggcaagccgctaccttccgtcagcggcgaggcgacgtatctgttctatatgggctacatcaggttaattcacttcagcgccgggatggtttttaccgtggtcttgctgatgcggatctactgggcttttgttggcaatcgatactcccgcgagctgtttatcgtgccggtatggcgtaaaagctggtggcagggcgtgtggtatgaaatccgctggtatctgttctggcaaaacgtccgagtgccgatatag

SEQ ID NO: 484092 - DNA, 312 bp, Shigella sonnei
atgttcggctatttcctgatgtcggtctttatgatcatcaccggctttgcgctgtacagcgaacacagccagtacgctatttttgcgccgttccgttatgtggtggaatttttctactggacgggaggcaactcaatggacattcacagctggcatcggctggggatgtggctgattggcgcgtttgtgatcggtcatgtctatatggcgctgcgtgaagacatcatgtccgacgacacggtgatctccaccatggtcaacggctaccgtagccacaaatttggcaaaataagtaacaaggagcgttcatga

SEQ ID NO: 484093 - DNA, 588 bp, Shigella sonnei
atgagcgagcaacgcgttgtggtaatggggctgggcaacctgctgtgggccgatgaaggtttcggcgtgcgggtggcggaacggttgtatgcccattaccactggcccgagtatgtggagattgtcgatggcggtactcagggactgaacttgctggggtatgtcgaaagcgccagccatctgttgattctcgatgccattgactacgggctggaacctggaacgctgcgaacctatgccggagaacgtattccggcttatctcagcgcgaagaaaatgagcctgcaccagaacagtttctccgaagtgctggcgctggcagatatccgcggacatctgccagcacatattgccctcgtcggtctgcaacccgcaatgctcgacgactacggcggcagcctgagcgaactggcacgggagcaactgcccgcagcggaacaggcggcgctggcgcagctggctgcatggggaattgtgccgcaaccggctaatgaatcgcgctgtctcaattatgactgtctgtcgatggaaaattacgaaggcgttcgcttgcgccagtacaggatgacactggaggagcagggatga

SEQ ID NO: 484094 - DNA, 339 bp, Shigella sonnei
atgagcaacgacacgccatttgatgcgttgtggcaacgaatgctggcgcgcggctggacgccggttagtgaattccgtcttgacgactggcttacgcaagcgccagacggcgtggtgttattaagcagtgacccgaaacgcacgccagaggtcagcgataatccggtaatgattggcgaattactgcgcgagtttcccggctacacatggcaggtggcgattgctgaccttgaacagagcgaagccatcggagatcgctttggcgtctttcgctttcccgccacattagtgtttaccggcggaaactatcgcggtgtgctgaatggtattcacccgtga

SEQ ID NO: 484095 - DNA, 858 bp, Shigella sonnei
atgagcgaaacttttttccatctgctggggccaggaacgcaaccgaacgatgacagtttcagcatgaatccactgccgatcagctgtcaggtgaatgatgaaccgagtatggcggccctggagcaatgtgctcacagcccgcaggtgattgcgctgttaaacgagttacaacatcaactaagtcaacgccagccgccgttgggcgaggtgctggcagtcgatctgttaaatctcaacgccgacgatcgtcactttatcaatacgcttctcggggaaggggaagtgtcagtgcgcattcagcaggctgacgacagcgaaagtgaaatacaggaggcgatcttctgcggattatggcgggtgcgcaaacgtcgcggcgaaaagttgctggaggacaaactggaggccggctgcgcgccgctggcgttgtggcaggcggccacgcaaaatctcttgccgacagattcgctgttaccgccgcccattgatggcctgatgaatggcctaccgttggcgcatgagttactggcgcatgtacgtaaccccgacgcgcagccgcacagcattaatctgacgcaattacccatcagcgaggctgatcggctttttctctcacgtctctgtgggccgggaaatattcagattcgtaccattggctatggcgagagctatatcaacgccacggggttacgccatgtctggcatttacgctgtacggacaccttaaaaggtcctttactggaaagttatgaaatctgcccaataccggaagtggtgctggcagcgccagaagatttggtcgactctgcgcagcggcttagcgaggtatgtcagtggctggcggaagctgcaccgacgtaa

SEQ ID NO: 484096 - DNA, 1545 bp, Shigella sonnei
atgtgggatgtcattgatttatcgcgctggcagtttgctctgaccgcgctgtatcactttttatttgtaccccttaccctggggctgatttttttgctggctatcatggaaaccatttacgtggtcaccggcaaaacaatctaccgcgatatgacgcgcttctggggtaagctcttcggtatcaactttgctcttggcgtggctaccggcctgaccatggagtttcagtttggtactaactggtcattctattccaactatgtgggcgatatttttggcgcaccgctggcgatggaagcattaatggccttcttcctcgaatccacctttgtcgggcttttcttcttcggctggcagcggctgaataaataccagcacctgctggtgacgtggctggtggcgttcggttcaaatctctctgcattgtggatattgaatgccaacggttggatgcaatacccgaccggtgcgcattttgatatcgacaccctacgtatggagatgaccagcttcagcgagctggtctttaacccggtcagccaggtgaaatttgtgcacaccgtaatggcgggctacgtgaccggggccatgtttattatggcgatcagcgcctggtatttactgcgcggacgggagcgcgatgttgcattacgctcgtttgccatcggttccgtcttcggtactctggcgattatcggcacgctacaactcggagacagttctgcgtatgaagtcgcgcaagtacaaccggtaaaactggcggcgatggaaggggagtggcaaacggaacctgctcctgcaccgttccatgtggttgcctggccggaacaggatcaagagcgtaacgcctttgccatcaaaattcccgcgctgttagggatcctcgccactcactcattagataaaaccgtgccgggtctgaaaaatttgatggctgaaacctacccacgcttgcaacgcggacgtatggcctggctgttaatgcaggaaatatcgcaaggcaatcgtgagccgcatgtgttgcaggcattccgggaactggaaggtgacctgggctacggcatgttgctctcccgctatgcgccggatatgaatcatgtcacagccgcacagtaccaggcggcgatgcgtggcgcgatacctcaggttgcgccggtattctggagtttccgcatcatggtgggctgtggttccctgccgctactggtgatgctgattgcgcttgtccagacgctgcgtggcaaaatcgaccagcatcgctgggtgctgaaaatggcgctctggagtttgccgttgccgtggattgcgattgaagccgggtggtttatgaccgagtttggtcgtcagccgtgggcgatacaggacatcttaccgacatactccgcgcactccgctttaaccacaggacaactggctttctcactgatcatgatcgtagggctttacaccctgttcttaatcgccgaagtctacctgatgcagaaatatgcccgtctggggccgagcgcgatgcagagtgaacaaccgacgcagcaacaggggtaa

SEQ ID NO: 484097 - DNA, 1137 bp, Shigella sonnei
atgtttgattatgaaacattgcgcttcatctggtggctgctgattggcgtgatcctggtggtctttatgatctccgacggatttgacatggggatcggctgtctgctgccgctggtggcgcgtaatgatgatgaacgccggatagtgataaacagcgttggtgcacactgggaaggcaaccaggtctggttgatcctcgctggtggggcattatttgccgcctggcccagagtgtatgcagcggcgttttccggcttttatgtggcgatgatcctggtgctgtgctcactgttcttccgcccgctggcctttgattatcgcggaaaaatcgccgatgcacgctggcgtaaaatgtgggacgccggtctggtcatcggcagtctggtgccgccggtagtcttcggtatcgccttcggcaacttgttgctcggcgtgccgtttgccttcacaccgcaattacgcgtggagtatctcggcagcttctggcaactgctgacgccattccctttattgtgcggattgctcagccttgggatggtgattttgcaaggtggcgtctggttacaactgaaaactgttggtgtgattcatctgcgttcacagctggccaccaaacgcgctgcactgttggtgatgctgtgctttttgctggcgggttactggctgtgggtcggtattgatggctttgtactgctcgcccaggatgctaacggtccttccaatccgttaatgaaactggtggcagtgctacctggtgcctggatgaataatttcgtcgaatcgcccgttttgtggatcttcccgctgctggggttcttctgcccattgctgacggtgatggcgatttatcgtggtcgcccgggttggggatttttaatggcgtcattgatgcaatttggcgtgattttcacggcaggcatcacgctgttcccctttgtcatgccgtcaagcgtgagtccaatctccagcctgacgttgtgggacagcacttccagtcagctgacgctgagcattatgttggtaatcgtgctgatatttttgcccattgtgttgctctacactctctggagctactacaaaatgtggggacgcatgacaacagaaactctccgccgtaacgaaaacgagttgtactaa

SEQ ID NO: 484098 - DNA, 1299 bp, Shigella sonnei
atgaaagcgatcttaatcccatttttatctcttctgattccgttaaccccgcaatctgcattcgctcagagtgagccggagctgaagctggaaagtgtggtgattgtcagtcgtcatggtgtgcgtgctccaaccaaggccacgcaactgatgcaggatgtcaccccagacgcatggccaacctggccggtaaaactgggttggctgacaccgcgcggtggtgagctaatcgcctatctcggacattaccaacgccagcgtctggtagccgacggattgctggcgaaaaagggctgcccgcagtctggtcaggtcgcgattattgctgatgtcgacgagcgtacccgtaaaacaggcgaagccttcgccgccgggctggcacctgactgtgcaataaccgtacatacccaggctgatacgtccagtcccgatccgttatttaatcctctaaaaactggcgtttgccaactggataacgcgaacgtgactgacgcgatcctcagcagggcaggagggtcaattgctgactttaccgggcatcggcaaacggcgtttcgcgaactggaacgggtgcttaattttccgcaatcaaacttgtgccttaaacgtgagaaacaggacgaaagctgttcattaacgcaggcattaccatcggaactcaaggtgagcgccgacaatgtctcattaaccggtgcggtaagcctcgcatcaatgctgacggagatatttctcctgcaacaagcacagggaatgccggagccggggtggggaaggatcaccgattcacaccagtggaacaccttgctaagtttgcataacgcgcaattttatttgctacaacgcacgccagaggttgcccgcagccgcgccaccccgttattagatttgatcaagacagcgttgacgccccatccaccgcaaaaacaggcgtatggtgtgacattacccacttcagtgctgtttatcgccggacacgatactaatctggcaaatctcggcggcgcactggagctcaactggacgcttcccggtcagccggataacacgccgccaggtggtgaactggtgtttgaacgctggcgtcggctaagcgataacagccagtggattcaggtttcgctggtcttccagactttacagcagatgcgtgataaaacgccgctgtcattaaatacgccgcccggagaggtgaaactgaccctggcaggatgtgaagagcgaaatgcgcagggcatgtgttcgttggcaggttttacgcaaatcgtgaatgaagcacgcataccggcgtgcagtttgtaa

SEQ ID NO: 484099 - DNA, 2181 bp, Shigella sonnei
atgacaactaaaaatatgaatacgccaccaggcagcactcaggaaaatgagatcgatctgcttcgtctggtcggcgagttatgggatcaccgtaagtttattatcagcgtgaccgcgttattcacgctgatcgctgtcgcttactcgctgttaagcacaccaatttatcaggcagatactctggtccaggttgagcaaaaacagggcaacgccattctcagcggcctgagcgatatgatccctaactcatcgcccgagtctgcaccggagatccaactgctgcaatcgcgcatgattctcggtaaaaccattgctgaactgaatctgcgcgacatagttgagcagaagtattttccgattgtgggtcgcggctgggcgagattaaccaaagaaaaaccaggtgagctggcgatcagctggatgcatattccacaactgaatggtcaggatcagcaactgacactcacggttggggaaaacggccactatacactggaaggtgaagagttcaccgtcaatggtatggtcggccagcgtctggaaaaagatggcgttgcgctgactatcgcggacattaaggccaaaccaggaacacagtttgtcctgagccagcgtaccgaactggaagcgattaacgcattgcaggaaacctttaccgttagcgaacgcagtaaagaaagcgggatgctggaacttaccatgactggtgatgatccccagttgattactcgtattctgaacagcatcgctaacaactatttgcaacagaatatcgctcgccaggcggcgcaggattcacaaagccttgaattcttacagcgccagttacctgaagtgcgcagcgagctggaccaggcggaagaaaaactcaacgtttatcgccagcagcgcgattcggttgaccttaacctggaagccaaagccgttcttgagcagattgtgaacgttgataatcaactcaatgagctgaccttccgcgaggcagagatctcccagctgtataagaaagatcacccaacttatcgtgcgctgctggaaaaacgccagacgctggagcaagaacgcaaacgcctgaataagcgggtatcggcaatgccttccacccaacaggaagtgttgcgtttaagtcgtgacgtagaagcgggccgtgcggtatatctgcaattacttaaccgccagcaggagttgagtatttcgaaatccagtgccattggtaacgtgcggattatcgacccggcagtcactcagccgcagccagtgaaaccgaaaaaagcgttgaatgtggtgcttggttttattcttggcctgtttatttctgtgggtgccgtgctggcgcgtgcgatgttgcgtcgtggtgtagaagccccggaacaactggaagagcacggcatcagcgtttatgccactatcccaatgtccgagtggctggataaacgcacccgtctgcgtaagaaaaatttattttctaatcagcagcgccatcgtactaaaaatatccccttcctggcggtggataacccggcggattctgctgtggaagccgtacgtgcgctacgaaccagtctgcatttcgctatgatggagacggagaataacattctgatgatcaccggtgcgacgccagacagtggtaaaacgtttgtcagttcaactctggcagcggtgatcgcccagtccgatcaaaaagtgttatttattgatgccgacttacgccgtggttattcgcataacctgtttaccgtgagtaatgaacatggcttgtcggaatatctggcaggtaaagatgagctcaacaaagtgatccagcattttggcaaaggaggctttgatgtgattactcgcggtcaggtgccacctaacccgtctgaactgctgatgcgcgatcggatgcgtcaattactggaatgggcgaacgaccattacgatctggtgattgtcgatacgccgccgatgctggcggtgagtgatgccgcggtcgtggggcgttctgttggcaccagcctgctggttgcgcgttttggcttgaacaccgccaaagaggtgagtttgtcaatgcagcgtctggaacaggcaggcgtcaatattaaaggcgctatcctcaatggtgtgattaaacgcgccagcaccgcttacagttacggctataactattacggttatagttactccgagaaagagtaa

SEQ ID NO: 484100 - DNA, 447 bp, Shigella sonnei
atggcccaactaaaatttaactcaatcctggtggtttgtaccggcaacatttgccgttcgcccattggcgagcgcttgctgcgtaaacgtctgccgggcgtaaaagtcaaatcggcaggtgttcatggtctgataaaacaccctgcagatgcgacagcggcagatgttgccgctaatcatggcgtatctcttgaaggacatgccggacgtaagctcactgctgagatggcacgaaattacgatctgattctggcaatggagtcggaacatattgctcaggttaccgcaattgctcccgaggtccgcgggaagacaatgctgtttgggcaatggctggaacagaaagagatcccggatccctatcgtaaaagtcaggacgcatttgaacatgtctacggtatgttggagcgcgccagtcaggaatgggcgaagcgcctcagccgataa

SEQ ID NO: 484101 - DNA, 1140 bp, Shigella sonnei
atgaaaaagaacatttttaagttttcggtactgacattggctgttctgtctttgacagcatgtacccttgttcctggtcagaatttatcgaccagtaacaaggatgtcattgaactacctgacaatcagtatgacctggacaaaatggtcaatatctatcccgtcacgccaggattgattgatcagttgcgcgccaaaccgattatgtcgcaggctaacccggagctggagcagcaaatcgcaaactatgaatatcgtatcgggattggtgatgtgttgatggttacggtctgggatcacccggaactaaccacccccgcagggcaataccgtagcgccagtgataccggcaactgggttaacgccgatggtgcgattttctacccctatattggtcgcctgaaagtggccgggaaaacacttacccaggtacgcaacgagattacagcgcgtctcgattcagtcattgaaagcccgcaagtcgatgtcagcgtcgcggcgttccgatcgcaaaaagcgtacgtcaccggcgaagtcagcaaatcgggtcagcagccgattaccaatattcctctgaccatcatggatgcgattaacgccgcgggcggtctgaccgcagatgcagactggcgcaacgtggtgctcacccagaatggcgtaaagaccaaagtgaacctctatgcgctgatgcagcgtggcgacttgcgccagaacaaactgctgcacccgggcgatattttatttattccgcgcaacgatgatctgaaagtcttcgtgatgggtgaagtgggtaaacagagcacgctgaaaatggaccgcagcggtatgaccctggcggaagcgctgggtaacgctgagggtatgaatcaggatgtcgctgatgcgacggggatttttgttattcgtgcaacgcaaaacaagcagaatggcaaaatcgccaatatttatcagctgaatgcgaaggacgcatcggcaatgatactcggaacggaattccagcttgaaccttacgacattgtttatgtcactaccgcgccgctggctcgttggaaccgtgtgatttctctgctggtaccgacgatttccggggtgcatgacctgacagagacttcacggtggattcaaacatggcccaactaa

SEQ ID NO: 484102 - DNA, 2097 bp, Shigella sonnei
atgaagaagaattcttatcttttaagctgcctggccattgccgtctccagtgcctgtcatgctgaagtattaacctacccggatccgctgggttcgtcgcaatcagactttggcggcacaggattgttgcagatgccaaatgcgcgcatcgcaccggaaggtgaattcagcgtcaactaccgggataacgatcaataccggttctactccacctccgtggcgctgttcccatggctggaaggcaccattcgttatacggatgtgcgcacacgcaaatatagccagtgggaagatttcagcggcgatcagtcatacaaagacaaatcattcgattttaaacttcgcctgtgggaagaaggttactggctaccgcaagtggcgtttggtaaacgtgatattgctggtacgggtctgtttgacggtgagtatctggtggccagcaagcaagcggggccatttgatttcaccctcgggatggcatggggctacgccggtaatgcgggcaatattaccaacccgttttgccgggtgagcgataaatattgtcatcgcgcagagtctcacgatgcgggcgatatcagctttagcgatatctttcgtagcccggcttccatctttggcggcattgagtatcaaacgccgtggaatcccctgcgtctgaaactcgaatacgatggcaacaattaccagaatgatttcgctggcaaactgcctcaggcaagccatttcaacgtcggcgcagtttatcgcgctgccagctgggcagatctcaacctgagttatgaacgcggtaacacgttgatgtttggcttcacgttacggaccaatttcaacgatctgcgccctgccctgcgcgatacgccaaaaccggcatatcaacctgcgcctgaatctgaaggattgcagtacaccacagtagcgaaccaacttaccgcgctgaagtacaacgcaggttttgaagcaccggaaattcagctgcgcgataagacgctgtatatgtctggtcaacaatacaaataccgtgattctcgcgaagcggtcgatcgtgccaaccggattctggtgaataacctgccgcaaggcgttgagaagattagcgtgacgcaaaagcgcgagcatatggcgatggtgactaccgaaaccgacgtagccagcctgcgcaaacagctggctggtacagcgcctggtcaatcagagcaacttcaacaacaacgtgttgaagcagaagatctttctgcctttggtcggggctaccgtattcgtgaagatcgctttagctactctttcaacccaacactttcacagtcgctgggcggcccggaagatttctatatgttccagctggggctgatgtccagtgcccgctactggtttaccgaccacctgctgcttgatggcggtattttcaccaatatttacaacaactacgacaagtttaagtcttcgctgttgcccgcggactctaccctgccccgcgtgcgcacgcatatccgtgattacgttcgcaatgacgtttatctcaacaacttgcaggcgaactactttgccgacttaggcaatggtttctatggccaggtgtatggcggttatctggaaacgatgtacgccggtgtcggttccgagctgctttatcgcccgctagatgccagctgggcgctgggtgtggacgttaactacgtgaagcaacgtgactgggacaacatgatgcgcttcaccgattattccacgccaactggtttcgtgacggcttactggaacccgccgacgctcaatggcgtactgatgaaacttagcgttgggcaatatctggcaaaagataaaggggcaacgatcgacgtcgccaaacgctttgacagcggcgtggcggtaggggtatgggcggcaatcagtaacgtatctaaagatgactacggcgaaggcggctttagtaaaggtttttatatctcgattccgttcgacttgatgaccattggacctaaccgcaaccgcgcggtggtttcgtggacaccattgacgcgtgatggtggacaaatgctgtcacgcaaataccagctctatccaatgacggcagagcgagaagtaccggttggacaataa

SEQ ID NO: 484103 - DNA, 747 bp, Shigella sonnei
atgaataaattacagtcgtatttcattgccagcgtactttacgtaatgacaccccatgcctttgcgcaaggaacggtgactatttatctgcctggcgaacaacagacactttccgttggccccatggaaaatgttgtccagttggtgacacaaccgcaactgcgcgatcgcctctggtggcctggtgccttgctgaccgactctgcggcgaaagctaaagcgcttaaagactaccaacatgtcatggcacagcttgcttcctgggaagcagaagctgacgacgatgtggcggcaacgattaaatccgtgcgccagcagttactcaatctcaatatcactggtcgcttaccggtcaaactggaccctgattttgtacgagtggatgagaacagcaatcccccgttggtcggggactatacgctctataccgtacagcgtccggtgactattactctgctgggtgcggtttctggggccgggcaattgccctggcaggcaggccgtagcgttaccgattatctgcaagatcacccccgccttgcaggcgcggacaagaataacgttatggtgattacgcctgagggtgagactgtcgtcgcccctgttgccctgtggaataaaagacatgtggaaccaccgcctggcagccagctttggttgggcttttctgcgcatgtactgcccgaaaaatatgctgatttaaatgaccagattgtgtctgttttaacgcaacgtgttcctgactga

SEQ ID NO: 484104 - DNA, 645 bp, Shigella sonnei; identical to SEQ ID NO: 458530

SEQ ID NO: 484105 - DNA, 306 bp, Shigella sonnei
atgaaacacaagctttctgcaatccttatggccttcatgttgacgacgccagctgcgtttgctgcctctgaagcaacaaacgggaccgaggcaacgacgggtactactggcaccacaacgaccactaccggcgcaaccacgactgctactaccactggtggcgtggctgctggcgctgtcggcacggcgacagttgtcggtgtggcaacggctgttggtgtggcgacgttggcagttgttgcagcaaatgacagtggcgatggcggttctcataacacctcaaccaccacgtccactacacgctaa

SEQ ID NO: 484106 - DNA, 213 bp, Shigella sonnei; identical to SEQ ID NO: 458528

SEQ ID NO: 484107 - DNA, 2673 bp, Shigella sonnei
atgcgtcagaaagagacaacggccacgacccgcttttcactcctaccggggagcattacccgcttctttttactgttgatcattgtgttactggtgacgatgggggtaatggtacaaagcgccgttaacgcctggctgaaagataaaagttaccagattgtcgacattacccacgcaatccaaaagcgcgtcgatacctggcgttacgtgacctggcagatctacgacaacattgccgcgacgacctccccctcctccggcgaaggtttacaagagacgcgcctgaaacaggatgtctactatctggagaaaccacgccgcaaaacggaagcgttaatctttggctctcacgacaactcaacgcttgagatgactcagcggatgtccacttatctggatacattgtggggtgcagaaaatgtaccgtggtcgatgtattacctgaatggtcaggataacagtctggtactgatctcaaccctgcccctcaaagatctcacctccggatttaaagaatcgaccgtcagtgacattgttgattcacgtcgtgcagaaatgttgcaacaggccaacgccctcgatgaacgcgaaagtttttctaacatgcgccgcctggcctggcagaacggtcattactttaccttgcgtaccacgttcaaccagccgggacatctggcaacggtcgtggcttttgatctgccgattaatgatttgatcccaccgggtatgccgctggacagtttccgccttgagccagacacgacggcaacgggagacaatgataatgagaaagaaggaacggatagcgtcagtatccactttaacagtacgaagattgaaatctcctcggcactcaactctaccgatatgcgcctggtctggcaggttccttatggcaccttattgctggatacgttgcaaaacattctgctgccactgctgctgaacatcggtttgctggcgctggcgttatttggctataccacattccgccatttctccagtcgcagtacagaaagtctacccaacacggcggtcaataacgaattgcgcattttacgggcaatcaatgaaaagatagtctcactgctgccgctcggcctgctggttcacgatcaggaatcgaaccgcactgtcataagtaacaaaattgccgatcatttgctgccgcatttgaatctgcaaaacatcaccaccatggcggaacagcatcaggggattattcaggcgacgatcaataacgagctgtatgagatccgcatgttccgcagccaggtcgcgccgcgcacacaaattttcattattcgcgatcaggatcgcgaagtgctggtaaacaagaaactcaagcaggcgcagcgtctgtatgagaaaaaccagcagggccggatgacctttatgaaaaacattggcgatgcgctgaaagaacctgcacagtccctggcggagagcgcggctaaactcaacgccccggaaagcaaacaactggcgaatcaggcagatgtgctggtgcggctggtcgatgaaatacagttagcgaacatgcttgcggacgatagctggaaaagtgagacggtgctgttctccgtgcaggatttaattgatgaagttgtgccttcagtgttgcctgccatcaagcgtaaaggtctgcaactgctgattaacaatcatctgaaagcacacgatatgcgccgcggcgatcgcgatgccttacgacgtattttgctgctactgatgcaatatgccgtgacctcaacgcaattgggaaaaatcacccttgaggttgatcaggatgagtcctctgaagaccgcctgacattccgcattctggacaccggagaaggcgtaagtattcatgaaatggataatttgcacttcccgtttatcaaccagacccaaaacgatcgttatggaaaggcggacccgctggcattctggctgagcgatcaactggcacgtaaactgggcggtcatttaaacatcaaaacgcgggatgggcttggtacacgctactctgtgcatatcaaaatgctcgccgctggcccggaagttgaagaggaagaagagcgtttactggatgatgtctgcgtaatggtggatgttacttcggcagaaattcggaatattgtcactcgccagttagaaaattggggtgcaacctgtatcacacccgatgaaagattaattagtcaagattatgatatctttttaacggataatccgtctaatcttactgcctctggcttgcttttaagcgatgatgagtctggcgtacgggaaattgggcctggtcaattgtgcgtcaacttcaatatgagcaacgctatgcaggaagcggtcttacaattaattgaagtgcaactggcgcaggaagaggtgacagaatcgcctctgggcggagatgaaaatgcgcaactccatgccagcggctattatgcgctctttgtagacacagtaccggatgatgttaagaggctgtatactgaagcagcaaccagtgactttgctgcgttagcccaaacggctcatcgtcttaaaggcgtatttgccatgctaaatctggtacccggcaagcagttatgtgaaacgctggaacatctgattcgtgagaaggatgttccaggaatagaaaaatacatcagcgacattgacagttatgtcaagagcttgctgtag

SEQ ID NO: 484108 - DNA, 651 bp, Shigella sonnei
atgaacaatatgaacgtaattattgccgatgaccatccgatagtcttgttcggtattcgcaaatcacttgagcaaattgagtgggtgaatgttgtcggcgaatttgaagactctacagcactgatcaacaacctgccgaaactggatgcgcatgtgttgattaccgatctctccatgcctggcgataagtacggcgatggcattaccttaatcaagtacatcaagcgccatttcccaagcctgtcgatcattgttctgactatgaacaacaacccggcgattcttagtgcggtattggatctggatatcgaagggatcgtgctgaaacaaggtgcaccgaccgatctgccgaaagctctcgccgcgctgcagaaagggaagaaatttaccccggaaagcgtttctcgcctgttggaaaaaatcagtgctggtggttacggtgacaagcgtctctcgccaaaagagagtgaagttctgcgcctgtttgcggaaggcttcctggtgaccgagatcgctaaaaagctgaaccgcagtattaaaaccatcagtagccagaagaaatctgcgatgatgaagctgggtgtcgagaacgatatcgccctgctgaattatctctcttcagtgacgttaagtccggcagataaagactaa

SEQ ID NO: 484109 - DNA, 2850 bp, Shigella sonnei
ttgaaataccttgcttcttttcgtacaaccctgaaagcctcgcgctacatgttcagagcattggcgttagtgctctggctgttgattgctttttcatccgttttttacatcgttaatgcgttacatcagcgagaatcggaaattcgtcaggaatttaatctgagttccgatcaggctcagcgctttattcaacgcacctctgatgtgatgaaagagctgaagtacatcgccgaaaatcgcttatcggcagaaaacggtgtgctttccccgcgtggacgagaaacgcaggcggatgtgcctgcgtttgaaccgctgtttgccgactccgattgttccgcaatgagtaacacctggcgaggttctctggagtcattggcgtggtttatgcgctactggcgcgataatttttctgcggcttacgatctaaaccgggtatttttaatcggcagcgataacctctgcatggccaatttcggtctgcgtgatatgccagtggaacgcgataccgcgttgaaagctttgcatgaacgcatcaataaatatcgaaatgcaccacaagatgatagcggcagtaacctctactggatcagcgaaggtccgcgccctggcgtcgggtatttttacgcgttgacgccagtttatctggcgaaccggttgcaggcgcttttgggtgtcgagcagaccatccggatggagaactttttcttaccgggtacgttgccgatgggggttaccattcttgatgaaaatggtcataccctgatttcgcttaccggaccagaaagtaaaattaagggcgatcctcgctggatgcaggaacgctcctggtttggctatacggaagggttccgggagctggtgctgaagaaaaatctgccaccctcatcgctaagcatcgtgtattcggtgccggttgataaggtgctggaacgcattcgcatgttgatccttaacgcaattttgctgaatgtgcttgccggagctgcattgtttactctcgcacggatgtacgagcgacgtattttcattccggcggaaagcgacgccctgcgactggaagaacatgagcagttcaatcgcaagattgtcgcctccgcgccagtgggtatctgcattttgcgtaccgctgatggcgtcaatattttaagtaacgaactggcgcatacctatctcaatatgcttacgcatgaggaccgccaacgactgacgcaaattatctgtgggcagcaggtcaattttgttgatgtcctgaccagcaacaataccaatctgcaaatcagcttcgtccattcgcgctatcgtaatgaaaacgtggccatttgtgtgctggtggatgtttcttcgcgcgtgaagatggaagagtcgttgcaggagatggcacaagcagcggaacaggcgagccagtcaaaatcgatgttccttgccaccgtcagtcatgagctgcgaacgccgctgtatggcattatcggtaacctggatctgttgcaaaccaaagagttaccgaaaggcgtcgatcggctggtgacggcaatgaacaactcttccagcctgttgttgaaaattatcagcgatattctcgatttctcgaagattgaatcggaacagttgaagatcgaaccgcgtgagttttcaccgcgtgaagtgatgaaccacatcaccgccaactatttaccgctggtggtacgcaagcagttaggcttgtactgctttattgaaccggatgtgccagtggccttaaatggcgacccgatgcgtttacagcaggtcatctccaacctgttgagtaacgccataaaattcaccgataccggctgtatagttttgcatgtccgcgctgatggcgattatctctctatccgtgttcgcgataccggcgtggggattccggcgaaagaagtggtgcgcttgtttgatcccttcttccaggtcggaacgggcgtacagcgaaacttccaggggaccggtctgggtctggcgatttgtgaaaaactgatcagcatgatggacggcgatatctcggtagattcagaaccgggaatgggcagccagtttaccgtgcgtattccgttgtacggcgctcagtacccgcagaaaaaaggcgtggaagggttgagtggtaaacgctgctggctggcggtccgcaatgcgtcgctctgtcagttcctggaaaccagtttgcagcgcagcggcatcgtcgttacaacatacgaagggcaggaaccgactcccgaagatgtgttaattactgacgaggtagtgagtaaaaaatggcagggtagagcggtagtgaccttctgtcgtcgccatattggtattccgctggagaaagcgccaggggagtgggtacacagtgtggctgccccgcatgagctaccggcattgttggcgcgtatttatttgatcgagatggagagcgacgatcctgctaacgctctgccgtcgacggacaaagcggtcagcgataatgacgatatgatgattctggtcgtggatgatcatccgattaaccgacgtctgctggcagatcagttgggatcgttgggctatcaatgtaaaaccgcgaatgatggtgtcgatgcgcttaatgtacttagcaagaatcatattgatatcgtgcttagcgacgtcaacatgccaaatatggatggttaccgcttgacgcaacgcattcgtcagttgggactgacgttgccggtaatcggagtaactgctaatgcgttggctgaagagaagcagcggtgtctggagtccggtatggacagctgcctgtcgaagccggtaacgctggatgtgataaaacagacgctgacggtatatgccgagagggtcaggaaatcgcgggaatcgtag

SEQ ID NO: 484110 - DNA, 1827 bp, Shigella sonnei
atgcattatatgaagtggatttatccacgccgcttacgcaatcaaatgatcctgatggcaatcctgatggtcattgtcccaacgcttactattggttatatcgtagaaacggaaggacgttcagcagtcttatctgaaaaagagaaaaaactttctgccgtggtcaacctgcttaatcaggcactaggcgatcgctatgatctctacatcgacttaccacgtgaggagcgtatccgcgcattaaatgcagaacttgcccccattaccgaaaatatcactcacgccttccctggcataggtgctggttattacaacaaaatgctggatgcgataatcacctacgcgccttcagcgctatatcagaataatgtcggcgttaccattgccgcagatcaccctggtcgcgaagtcatgcgtacaaatacccctttggtttattcaggcaggcaggtgcgcggcgatattttgaattcaatgctccccattgagcgtaatggtgaaatcctcggctatatctgggccaatgaattaaccgaagatattcgccgccaggcctggaaaatggatgtgaggattatcattgtgctcaccgccgatttgctgataagcctgctattgattgtccttttctcccgtcgcctgagcgccaatattgatatcatcaccgatggcctctcgactctggcacaaaatattcccactcgattaccacaattgcccggtgaaatggggcaaatcagtcagagtgttaataacctcgcccaggcactgcgtgaaacgcggacacttaacgatctgattattgaaaacgctgccgatggcgtcattgccattgaccgccagggtgatgtaaccaccatgaacccagcagcagaagttatcactggctatcaacgccatgaactggtagggcagccttactccatgttgttcgacaatactcagttctacagtccagtactggatacgctggaacatggcaccgaacatgtggcgctggagatcagttttccaggtcgtgaccgcaccattgaactcagtgtcactaccagtcgtattcataacacgcacggtgaaatgataggtgctttggtgattttctctgatttaactgcccgcaaagaaacccagcgccgcatggcgcaagcagaacgcctcgccacactgggtgagctgatggctggcgtcgcgcatgaagtacgtaatccgttaacggctattcgtggttatgtacagatcttgcgccaacaaaccagtgacccaatacatcaggaatatctgtccgtagtactcaaagaaatcgattcaattaacaaagttattcagcaattgctcgaattttcacgtccacgccacagtcaatggcaacaagtcagcctcaatgcattggttgaagaaactctggtactggtacaaaccgccggcgtacaagcgcgggtcgacttcataagcgaactggataatgaattaagcccgattaacgccgatcgtgaactgctcaaacaggtactactgaatatcctgatcaatgccgtccaggctatcagcgcacgagggaaaattcgcattcaaacctggcaatacagcgactcacaacaggccatttcgatagaggacaacggctgtggcattgatctctcgctgcaaaaaaagatcttcgatccctttttcaccaccaaagcctcaggaaccgggcttggtctggcgttaagtcaacgcatcattaatgcccatcagggtgatattcgcgtcgccagtttgccgggctacggcgcaaccttcacgcttattttaccgatcaacccgcagggaaatcagactgtatga

SEQ ID NO: 484111 - DNA, 1386 bp, Shigella sonnei
atgactgctattaatcgcatccttattgtggatgatgaagataatgttcgccgtatgctgagcaccgcttttgcactacaaggattcgaaacacattgtgcgaacaacggacgcacagcattacacctgtttgccgatattcaccctgatgtggtgttgatggatatccgcatgccagagatggacggcatcaaggcactaaaggagatgcgcagccatgagacccggacacccgttattctgatgacggcctatgcggaagtggaaaccgccgtcgaagcgctacgctgcggagccttcgactatgttattaaaccgtttgatctcgatgagttgaatttaatcgttcagcgcgctttacaactccagtcaatgaaaaaagagatccgtcatctgcaccaggcactgagcgccagctggcaatgggggcacattctcaccaacagcccggcgatgatggacatctgcaaagacaccgccaaaattgccctttctcaggccagcgtcttgattagcggtgaaagcggcaccgggaaagagttgattgccagagcgattcactacaattcgcggcgggcaaaggggccgttcattaaagtcaactgcgcggcgctgccggaatcgttgctcgaaagtgaactgtttggtcatgaaaaaggtgcatttactggtgcacaaaccttgcgtcagggattatttgaacgagccaacgaaggtactctgctcctcgacgaaattggcgaaatgccgctggtactacaagccaaattactacgcattctacaggaacgggaatttgaacggattggcggccatcagaccataaaagttgatatccgcatcattgctgccaccaaccgtgacttgcaggcaatggtaaaagaaggcaccttccgtgaagatctcttttatcgccttaacgttattcatttaatactgccgcctctgcgcgatcgccgggaagatatttccctgttagctaatcactttttgcaaaaattcagtagtgagaatcagcgcgatattatcgacatcgatccgatggcaatgtcactgcttaccgcctggtcatggccgggaaatattcgagagctttctaacgttattgaacgcgccgtcgtgatgaattcaggcccgatcattttttctgaggatcttccgccacagattcgtcagccagtctgtaatgctggcgaggtaaaaacagcctctgtcggtgagcgtaatttaaaagaggaaattaaacgcgtcgaaaaacgcatcattatggaagtgctggaacaacaagaaggaaaccgaacccgcactgctttaatgctgggcatcagtcgccgtgcattgatgtataaactccaggaatacggtatcgatccggcggatgtataa

SEQ ID NO: 484112 - DNA, 663 bp, Shigella sonnei
atgaaaacaaaattgatgacattacaagacgccaccggcttctttcgtgacggcatgaccatcatggtgggcggatttatggggattggcactccatcccgcctggttgaagcattactggaatctggtgttcgcgacctgacattgatagccaatgataccgcgtttgttgataccggcatcggtccgctcatcgtcaatggtcgagtccgcaaagtgattgcttcacatatcggcaccaacccggaaacaggtcggcgcatgatatctggtgagatggacgtcgttctggtgccgcaaggtacgctaatcgagcaaattcgctgtggtggagctggacttggtggttttctcaccccaacgggtgtcggcaccgtcgtagaggaaggcaaacagacactgacactcgacggtaaaacctggctgctcgaacgcccactgcgcgccgacctggcgctaattcgcgctcatcgttgcgacacacttggcaacctgacctatcaacttagcgcccgcaactttaaccccctgatagcccttgcggctgatatcacgctggtagagccagatgaactggtcgaaaccggcgagctgcaacctgaccatattgtcacccctggtgccgttatcgaccacatcatcgtttcacaggagagcaaataa

SEQ ID NO: 484113 - DNA, 651 bp, Shigella sonnei
atggatgcgaaacaacgtattgcgcgccgtgtggcgcaagagcttcgtgatggtgacatcgttaacttagggatcggtttacccacaatggtcgccaattatttaccggagggtattcatatcactctgcaatcggaaaacggcttcctcggtttaggcccggtcacgacagcgcatccagatctggtgaacgctggcgggcaaccgtgcggtgttttacccggtgcagccatgtttgatagcgccatgtcatttgcgctaatccgtggcggtcatattgatgcctgcgtgctcggcggtttgcaagtagacgaagaagcaaacctcgcgaactgggtagtgcctgggaaaatggtgcccggtatgggtggcgcgatggatctggtgaccgggtcgcgcaaagtgatcatcgccatggaacattgcgccaaagatggttcagcaaaaattttgcgcagctgcaccatgccactcactgcgcaacatgcggtgcatatgctggttactgaactggctgtctttcgttttattgacggcaaaatgtggctcaccgaaattgccgacgggtgtgatttagccaccgtgcgtgccaaaacagaagctcggtttgaagtcgccgccgatctgaatacgcaacggggtgatttatga

SEQ ID NO: 484114 - DNA, 1323 bp, Shigella sonnei
atgattggtcgcatatcgcgttttatgacgcgttttgtcagccgatggcttcccgatccactgatctttgccatgttgctgacattgctaacattcgtgatcgcgctttggttaacaccacaaacgccgatcagcatggtgaaaatgtggggtgacggtttctggaacttgctggcgtttggtatgcagatggcgcttatcatcgttaccggtcatgcccttgccagctctgctccggtgaaaagtttgctgcgtactgccgcctccgccgcaaagacgcccgtacagggcgtcatgctggtcactttcttcggttcagtcgcttgtgtcatcaactggggatttggtttggttgtcggcgcaatgtttgcccgtgaagtcgcccggcgagtccccggttctgattatccgttgctcattgcctgcgcctacattggttttctcacctggggtggcggcttctctggatcaatgcctctgttggctgcaacaccgggcaacccggttgagcatatcgccgggctgatcccggtgggcgatactctgttcagtggttttaacattttcatcactgtgacgttgattgtggtgatgccatttatcacccgcatgatgatgccaaaaccgtctgacgtggtgagtatcgatccggaactactcatggaagaggctgattttcaaaagcagctaccgaaagatgccccaccatccgagcgactggaagaaagccgcattctgacgttgatcatcggcgcactcggtatcgcttacctggcgatgtacttcagcgaacatggcttcaacatcaccatcaataccgtcaacctgatgtttatgattgcgggtctgttgctacataaaacgccaatggcttatatgcgtgctatcagcgcggcagcacgcagtactgccggtattctggtgcaattccccttctacgctgggatccaactgatgatggagcattctggtctgggtggactcattaccgaattcttcatcaatgttgcgaacaaagacaccttcccggtaatgaccttttttagttctgcactgattaacttcgccgttccgtctggcggcggtcactgggttattcagggacctttcgtgatacccgcagcccaggcgctgggcgctgatctcggtaaatcggtaatggcgatcgcctacggcgagcaatggatgaacatggaacaaccattctgggcgctgccagcactggcaatcgccggactcggtgtccgcgacatcatgggctattgcatcactgccctgctcttctccggcgtcattttcgtcattggtttaacgctgttctga

SEQ ID NO: 484115 - DNA, 1185 bp, Shigella sonnei
atgaaaaattgtgtcatcgtcagtgcggtacgtactgctatcggtagttttaacggttcactcgcttccaccagcgccatcgacctgggggcgacagtaattaaagccgccattgaacgtgcaaaaatcgattcactacacattgatgaagtgattatgggtaacgtgttgcaagccgggttggggcaaaatccggcacgtcaggcactgttaaaaagcgggctggcagaaacggtgtgcggattcacggtcaataaagtgtgtggttcgggtcttaaaagtgtggcgcttgccgcccaggcaattcaggcaggtcaggcgaagagcattgtggcggggggtatggaaaatatgagtttagcgccctacttactcgatgcaaaagcacgctctggttatcgtcttggagacggacaggtttatgacgtaatcctgcgcgatggcctgatgtgcgccacccatggttatcatatggggattaccgccgaaaacgtggctaaagagtacggaattacccgtgaaatgcaggatgaactggcgctacattcacagcgtaaagcggcagccgcaattgagtccggtgcttttacagccgaaatcgtcccggtaaatgttgtcactcggaagaaaaccttcgtcttcagtcaagacgaattcccgaaagcgaattcaacggctgaagcgttaggtgcattgcgcccggccttcgataaagcaggaacagtcaccgctgggaacgcgtctggtattaacgacggtgctgccgctctggtgattatggaagaatctgcggcgctggcagcaggccttacccccctggctcgcattaaaagttatgccagcggtggcgtgcctcccgcattgatgggtatggggccagtacctgccacgcaaaaagcgttacaactggcggggctgcaactggcagacattgatctcatcgaagctaatgaagcatttgctgcacagttcctcgccgttgggaaaaccctgggctttgattctgagaaagtgaatgtcaacggcggggccatcgcgctcgggcatcctatcggtgccagtggtgctcgtattctggtcacactattacatgccatgcaggcacgcgataaaacgctggggctggcaacactgtgcattggtggcggccagggaattgcgatggtgattgaacggttgaattaa

SEQ ID NO: 484116 - DNA, 777 bp, Shigella sonnei
atgcgaaagatttttcttccgttgttactggtggcactttcgcctgtcgctcacagtgaaggtgtgcaggaagtcgagattgacgcaccgctctctggctggcatccggcagagggcgaagatgccagtttttcacaatcgatcaattacccggcgtcgtccgtcaacatggcagatgatcaaaatatctcagcgcagatccgcggcaaaataaagaattatgctgcggcgggtaaagttcagcagggccggctggtggtcaacggtgccagtatgccgcagagaattgaatccgatggttcatttgcacgcccttatattttcactgaaggcagcaacagcgtgcaggtcatcagcccggatgggcaaagccggcaaaaaatgcagttttactcaacgtcgggtataggaacgattcgtgcacgtttacggctggttctctcgtgggatacggacaataccgatctcgatctccatgttgtcacgcccgatggcgaacacgcctggtacggtaacaccgtgctgaaaaacagtggtgcactggatatggatgtcacgacggggtacggacccgagattttcgccatgccagcaccagttcacgggcgctatcaggtgtatatcaactactatggtgggcgcagcgaaacggaattgacgaccgcccaactgacgctgatcaccgatgaaggatcggtcaatgagaaacaggaaacatttattgtaccgatgcgtaatgctggcgagctgacgctggtgaaaagttttgactggtga

SEQ ID NO: 484117 - DNA, 1650 bp, Shigella sonnei
gtgaactggcgcagaatcgtctggctattggcgttggttactctgccaacgcttgcggaggagacgccgttacaactggtgctgcgcggtgcgcagcacgatcaactgtatcagctgtcgtcatcaggcgtgaccaaagtctcagcattacctgactcgctcaccacgccgttagggagtttgtggaaactgtatgtttacgcctggctggaggatacccatcaaccggagcagccctaccagtgtcgcggaaactccccggaagaggtttattgttgtcaggctggggagagcataacgcgcgataccgcgctggtacgttcctgtgggctctattttgcgccgcagcggttgcatattggcgcagatgtgtgggggcaatactggcaacagcgtcaggcacctgcgtggttagcgtctcttacaacgctgaagccagaaacctcggtaacggttaaatcgctgctcgattcattagcgacgttacctgcgcaaaacaaagctcaggaagtcttactggatgtggtgctggacgaggcgaaaatcggtgtcgcatccatgctcggtagtcgggtacgggtgaaaacctggagctggtttgccgatgataaacaggaaatccgccagggtggttttgctggctggttaaccgatggtacaccgctgtgggttactggcagtggcaccagcaaaacggtactaacccgttatgcgacggtgcttaatcgggttttgccagtgccgacgcaggttgccagtgggcaatgtgtagaggtggagctgtttgcccgctatccgctgaagaaaatcacagcggaaaagagtacgacggcagtaaaacccggcgtacttaatgggcgctatcgtgtgacgtttactaatggtaaccacattacgtttgtcagccacggtgagacgaccttactgagcgaaaagggcaaactgaaattgcagtcgcatctcgatcgtgaagagtacgttgccagagttctggatcgcgaggcgaaaagtacgccacctgaggcagcgaaagccatgaccgtggcgatacgtacttttttacagcaaaacgccaatcgggaaggtgattgcctgaccatccccgacagcagcgccacgcagcgtgtttctgcttcgccagcgaccacgggggcgcgaacgatgaccgcttggacgcaggatctcatctatgcaggcgatccggttcattatcatggcagtcgcgctaccgaagggacactttcctggcggcaagccacggcccaggcggggcagggggagcgttacgaccagatactcgcgtttgcttatcccgacaacagccttagccgctggggagctccacgctcaacctgccagttattacccaaagcgaaagcctggctggcgaaaaaaatgccgcagtggcggcgtatattacaaggcgagacggggtacaacgaaccagacgtgtttgcggtctgtcgtttagtctcaggtttcccctataccgatcggcagcagaaacggctgtttattcgtaacttctttacgcttcaggatcggctggatttaacccatgagtatctgcacctggcctttgatggttatcccaccgggcttgatgagaactatatcgaaacgctgacccgacaattattaatggactaa

SEQ ID NO: 484118 - DNA, 1707 bp, Shigella sonnei
atgcgccagacgctgacgctgcacaaaggggcgaattatatttcgctggcgcagaacattcagcaatctggcttgttaagcgcagaactgcaacaaaatgggcaagtgcaggacagcattagcacaaaactgtcttttgtggataacagctggcccgttgaacagcagaaaaatgtcatgctcggcggtggcgagaacgcgctgatgttgcccgagcaggctagcaatatccggctacaaagtagcgaaacgccgcaggagattttccgcaacaatcttgatgcgttagtcgatggaccatggggtggcgtgatcaacaccggtagccgtctgatcccgctcagtctcgcctggcgttcgcttgccgatcatcaaagtgccgccgctaacgacattcgtcagatgattcaggataaccgtctgcggctgatgcaactggcggggcccggagcgcgctttacctggtggggtgaagatggcaatggtgacgccttccttacggcatgggcatggtacgccgactggcaggccagccaggcgctcggcgtaacgcaacaaccggaatactggcagcatatgctcgacagttatgccgagcaggcggataacatgccgttattgcatcgggcgctggtgctggcgtgggcacaggagatgaatctgccgtgcaaaacgttgttgaaagggttggatgaagctatcgcccggcgcggaactaaagatgaagatttctctgaggaagacatccgcgatatcaatgacagcctgatcctcgatacaccggaatctccactggcagatgcggtggcaaacgtcttaaccatgacgttgctgaaaaaagcgcagttgaagtccacggtgatgccacaggttcagcaatatgcgtgggataaagcggcaaacagcaatcagccgctggcgcacacggttgtgctgctcaatagcggtggtgacgctacccagacggccgctattttaagtggtttgaccgctgagcaatccactattgagcgcgcgctggccatgaactggctggcgaaatatatggcgacaatgcctccagttgttttgcctgcgcctgcgggcgcatgggctaaacataagttaactggagggggcgaagactggcgttgggttggtcagggtgtgccggacattctctcttttggtgacgaattatcgccgcaaaatgtgcaggtccgctggcgtgaaccggcaaaaacggctcaacaaagtaacattccggtgaccgttgaacgccagttgtatcggcttatccccggtgaagaagagatgagctttactctgcagccggtgaccagcaatgagattgacagcgatgcgctgtatctcgatgaaattacgcttaccagcgagcaggatgcagttctgcgctatggtcaggtggaagtaccgctcccgccgggagccgacgttgagcgcacaacatggggcatttcagtcaataaacccaacgccgcgaaacagcaggggcaattgctggaaaaagcgcgtaatgaaatgggcgaactggcctatatggtgccggtgaaagaactgacgggaacggtcactttccgccatttgctgcgcttctcgcaaaaagggcaattcgttctgcctcctgctcgttatgtgcgttcctatgcacctgcgcagcaaagtgttgcggcagggagtgaatggaccgggatgcaggtgaaataa

SEQ ID NO: 484119 - DNA, 246 bp, Shigella sonnei; identical to SEQ ID NO: 401911

SEQ ID NO: 484120 - DNA, 1077 bp, Shigella sonnei
atgcagcggaaaaaatacgatcccaatttgcctagaaacttaacatatcgaaggagagacaaagcatattactggcgcaaccctctgacgaaagaagaatttacactaggtaaaatttcaagaagagatgcagtaacgcaggcaattgaagcaaatcattatatatacaaaaactactctcccgctgccttaattgaaaaacttaaagggttcgactcatttactatggcagactggattgaacgttacaaaacgattcttataaggagaaaagtgtccagaaatacttataaaattcgggcaaatcaactggagacaataaaagaaaaattgggagagattttactgacagaaataaccactcgccatattgccgagtttcttgatttgtggattgaaggagggaaaaacacaatggcaggatcaatgcgttctgtgttgtctgatatgtttcgcgaggccattgttgaaggacgtatatctcaaaatccagtcacgccaacaagagcaccgaaaatagtagttacaagagaacgactgaaactaaagatatacaactgcatcagggaggcagcagatcaacttccggcatggttcccattagctatggatttagcccttgtaacaggacaacgtcgcgaagacataacgaatatgcggttcagtgatatttatgatgatcgtctccacgtcaggcaaattaagacaggaatgatgattgctatccccctgtcactcagccttcctgtcgctggtctacggcttggtacagtagttgaacgatgccgcctggtaagccggggagattatctaatcagtgccgggattagaaaaaacagccctgacggcagcattcacccggatggcctgacaaaaaaatttgtcgcagccagaaaattcacaggtatccagttcagtgaaaacccaccaacttttcacgagatcagaagcctggctggacgattgtacaaagaaacatgtggagaagaatttgctcagcgtctacttggccacacatcggagaagacaacaaaaatgtatcttgatgagagagaaaaaacgtacttactgctctga

SEQ ID NO: 484121 - DNA, 342 bp, Shigella sonnei
atgatgaaaaaaagtattctggcgtttctgttactcaccagttctgcagcggcgctggctgcaccgcaggtgattaccgtcagtcgttttgaagtgggtaaagacaaatgggcgtttaatcgcgaagaggtgatgctgacttgccgaccgggtaatgctttgtatgttattaatccgagtaccctcgtgcagtatcctttaaacgatatcgcacaaaaggaagttgccagtgggaagaccaatgcccaacccatttcggtgattcagattgatgatcctaacaatcccggcgaaaaaatgagtctggcaccgtttatagaacgagctgaaaaactctgttaa

SEQ ID NO: 484122 - DNA, 873 bp, Shigella sonnei
atgctggcgtttacctggatcgcgctgcgatttatccatttcacctcgctgatgctggtttttggcttcgcaatgtacggtgcctggctggcccccttgacgattcgtcgcttgctggcgaagcgttttctgcgtttacaacagcacgctgccgtctggagtttgatcagtgccactgcaatgctcgccgttcagggcgggttgatgggaacgggatggacagatgtattttcgccaaacatttggcaggctgttttgcaaacgcagtttggtggcgtctggttatggcaaattgttctcgccctcgtaacgttgatcgtcgcccttatgcaaccgcggaatatgccacgtttgctgtttatgctcactaccgcgcaatttattctgctggcgggaatggggcatgcgacactgaatgaaggggtaacggcgaaaatccatcagactaatcacgcgattcacctgatttgtgcggcggcgtggtttgggggattactgccggtgctctggtgtatgcaactcatcaaaggccgttggcgacaccaggctattcaggcgctgatgtgtttttcatggtgcgggcattttgcggtgatcggcgtactggcaagcggcgtgcttaatgcattgttgattaccggatttccccccacgcttacgacttactggggccaactcttattgctcaaagccatcctggtgatgattatggtggtcattgcgctggctaatcgttatgttcttgtaccgcgcatgaggcaggaggaagatcgtgcggcaccctggtttgtgtggatgactaaactcgaatgggcgataggtgcggtagtgctggtgatcatcagcctgcttgcgactctcgaacctttttga

SEQ ID NO: 484123 - DNA, 375 bp, Shigella sonnei
atggcttcaactgcacgctcccttcgctacgcgctggcaatcctgaccacttcgttggtgacacctttcgtctgggcacatgcgcatttaacgcatcagtatcctgcggcaaacgcgcaagtgacagctgcaccgcaggcaatcactttaaacttctcggaaggtgtggaaacaggattcagtggtgcaaaaatcacggggccaaaaaacgaaaatattaaaacattaccggcgaagcgaaatgagcaggaccaaaagcaactgattgttccactggccgattcgctgaaacccggaacctacaccgttgactggcatgttgtttcggtggacgggcataaaacgaaaggacactacacctttagcgtgaaataa

SEQ ID NO: 484124 - DNA, 231 bp, Shigella sonnei
atgctgaagaatctggctaaactggatcaaacagaaatggataaagtgaatgtcgatttggcggcggccggggtggcatttaaagaacgctacaatatgccggtgatcgctgaagcggttgaacgtgaacagcctgaacatttgcgcagctggtttcgcgagcggcttattgcccaccgtttggcttcggtcaatctgtcacgtttaccttacgagcccaaacttaaataa

SEQ ID NO: 484125 - DNA, 657 bp, Shigella sonnei
atgtcgttctggaaagttgcagcagcgcaatatgagcctcgtaaaacctcactcaccgaacaagtagctcatcatctggagtttgtgagggccgccgccaggcaacaatgtcagctgttagtttttccatcgctttctttactggggtgtgattattcgcgacgtgcccttcctgccccacccgatctctcactgttagacccgctttgttatgccgcaacgacctggcgaatgaccatcattgccggccttcccgttgaatataacgatcgctttattcgtggaattgcggtgttcgcaccgtggcgaaaaacgcctgggatctaccatcagagtcatggtgcatgtctgggccgtcgttccagaaccatcacggtggtcgatgaacaaccggaaggtatggatatggacccgacctgttcactgtttacgacagggcaatgtctgggagaacccgacctgctggcgtcggcccgtcgcttacaatttttttcacatcagtactcgattgctgtgctgatggcaaatgcccgtggtaacagtgcactatgggatgaatatggtcgtctcatcgttcgcgccgatcgtggttcattattgttagtcggtcagcgttcatcacagggttggcaaggcgatatcattccattacgctag

SEQ ID NO: 484126 - DNA, 663 bp, Shigella sonnei
atgttgcgcattatcgatacagaaacctgcggtttgcagggagggatcgttgagattgcctctgttgatgtcattgacggaaaaatcgtcaaccccatgagccacctggtgcgccccgatcgtcctattagtccacaagcgatggcgattcatcgcatcaccgaagccatggtcgccgataaaccgtggattgaagatgtgatcccacactattacggcagtgaatggtatgtcgcgcacaacgccagctttgaccgccgcgtactgcctgagatgcccggtgagtggatttgcaccatgaaactggcccgtcgcttgtggccaggaatcaagtacagcaatatggcgttatataaaacacggaagctcaatgtacagacgccgccgggcctgcatcatcaccgcgcgttgtatgactgttatatcaccgccgcgttgcttatcgatattatgaacacctccggctggacggcagaacagatggccgatatcaccggacgtccgtcgttgatgacgaccttcacctttggcaaataccgtggcaaagcggtttccgacgttgccgaacgcgatccgggctatctgcgctggttatttaataacctggacagcatgagcccggagctgcgtttaacactgaaacattatctggaaaatacttaa

SEQ ID NO: 484127 - DNA, 2061 bp, Shigella sonnei
atgctaccaaaagccgcccgcattccccacgccatgacgcttcatggcgatacgcgcatcgataattactactggctgcgggatgatacgcgttctcagccagaagtcctggactacctgcaacaagaaaatagttacggtcatcgggtgatggcctcacaacaagccttgcaggatcgcatcttaaaggaaatcatcgaccgcattccgcaacgagaagtttctgcgccctacatcaaaaatggctaccgctatcggcatatttatgaaccaggctgtgaatatgctatctaccagcgtcaatcggcattcagtgaagagtgggatgagtgggaaatattgctcgatgccaataagcgcgcagctcatagtgagttttattcgatgggcggaatggcgattacgcccgataacaccattatggcgctggcagaagattttctttcccgacgccagtacggcattcgttttcgtaatctggaaactggtaactggtacccggaactgctggataacgttgaacccagctttgtctgggcaaatgactcctggactttctactatgttcgcaagcatccggtgacgctgctgccttatcaggtctggcgtcacgccatcggtacgccagcatcgcaagataaactgatctacgaagaaaaagacgatacctattacgtcagcctgcataaaacgacctcgaagcactatgtagtcattcatttggccagcgccaccaccagtgaagttcgcctgctggacgcggaaatggccgatgccgagccgtttgtttttctgccgcgccgcaaagatcacgaatacagccttgatcactaccagcatcgtttttatctgcgttccaaccgccacggcaaaaactttggcttataccgtacccgtatgcgtgatgagcaacagtgggaagagttaattccgccatgcgaaaacatcatgctggaagggtttacgctgtttaccgactggctggtggttgaagagcgtcagcgcgggttaaccagtttgcgccaaattaaccgcaagacccgggaagtcattggtattgcctttgatgatccagcctatgtgacctggattgcctacaatccagaacctgaaaccgcgcgattgcgttatggttattcttccatgaccacaccagacactttgtttgaactggatatggataccgatgagcgtcgtgtattaaaacaaacggaagttcctggttttgatgcggcgaattaccgcagtgaacacctgtggatagtcgcccgtgatggcgtcgaagttccggtttcgttggtctaccatcgcaaacattttcgcaaaggacacaacccgttgctggtgtatggctatggttcttacggcgcaagtattgatgccgatttcagttttagccgcttgagtttgttagatcgtggctttgtctacgccattgtccatgttcgcggcggtggtgagctggggcaacaatggtacgaagacggaaaatttctgaagaagaaaaatacgtttaatgattatcttgatgcctgcgatgcattgttaaaactgggctatggctctccttcgctttgttatgcgatgggcgggagtgcggggggcatgttgatgggcgttgcaattaatcaacgcccggaattattccacggcgttatcgcccaggtaccgtttgttgatgttgtaacaacgatgcttgatgaatcaattcctcttaccactggtgagtttgaagagtggggtaacccgcaggatccgcaatattacgagtacatgaaaagctacagcccgtatgacaacgtcaccgcacaggcttatccgcatttactggtaacgaccggtttacacgattctcaggtgcaatattgggaaccggcaaaatgggtcgctaaattgcgcgagctgaaaaccgataaccatcttttattgctctgtaccgacatggactcaggccatggcggtaaatctggccgctttaaatcgtacgaaggcgtagcgatggaatatgcttttctggtcgcgctggcgcagggaacattacccgctacgcctgcggattaa

SEQ ID NO: 484128 - DNA, 660 bp, Shigella sonnei
atggctaactggttaaatcaactgcaatccctgcttgggcaaagcagttcttctacctcctcgtctgcggatcagggattgggcaaactgttagtgccaggcgcattaggcggactggctgggctgctggtcgcaaataaatcagcacgtaaacttcttacgaaatatggcaccaacgcgttactggttggcggcggagcggtagcgggtacggtgctgtggaataaatacaaagataaaattcgcgcggcgcatcaggacgaaccgcagtttggcgcgcaaagtacgccgctggatgagcgtacagaacgtttgatccttgcgctggtctttgccgctaaaagtgatggtcatattgatgccaaagaacgtgcggcaatcgaccagcaattgcgtgaagccggcgtggaagagcaggggcgtgtactcattgagcaggcaatcgaacaaccgctggatccacaacgcctggctaccggggtccgcaatgaagaagaggcgctggaaatctatttcctgagttgcgcggctattgatattgaccattttatggaacgcagttacctgaatgcactgggtgacgcgctgaaaatcccccaggatgttcgtgacggcattgaacgcgatctcgaacagcaaaaacgcactttggcggaataa

SEQ ID NO: 484129 - DNA, 207 bp, Shigella sonnei
atgctgattgcccgatgcgacgctgttgcgtcttctcaggcctacgattgtggtgcgttctggggcggacaaggcactcgcgccgcatccaccaacggtcaatcgaattatcagaagccattaacgccgctgatattccgccattcccgctttgcagtccacgctgacctggtaatgaatatcggcacttttaccacgcacggttag

SEQ ID NO: 484130 - DNA, 357 bp, Shigella sonnei; identical to SEQ ID NO: 459531

SEQ ID NO: 484131 - DNA, 291 bp, Shigella sonnei; identical to SEQ ID NO: 261317

SEQ ID NO: 484132 - DNA, 1179 bp, Shigella sonnei
atgacgttattaggcactgcgctgcgtccggcagcaactcgcgtgatgttattaggctccggtgaactgggtaaagaagtggcaatcgagtgtcagcgtctcggcgtagaggtgattgccgtcgatcgctatgccgacgcaccagccatgcatgtcgcgcatcgctcccatgtcattaatatgcttgatggtgatgcattacgccgtgtggttgaactggaaaaaccacattatatcgtgccggagatcgaagctattgccaccgatatgctgatccaacttgaagaggaaggactgaatgttgtcccctgcgctcgcgcaacgaaattaacgatgaatcgcgagggtatccgtcgcctggcggcagaagagctgcagctgcccacttccacttatcgttttgccgatagcgaaagccttttccgcgaggcggttgctgacattggctatccctgcattgtaaaaccggtgatgagctcttccggcaaggggcagacgtttattcgttctgcagagcaacttgctcaggcatggaagtacgctcagcaaggcggtcgcgccggagcaggccgcgtaattgttgaaggcgtcgttaagtttgacttcgaaattaccttgctaaccgtcagcgcggtggatggcgtccatttctgtgcaccggtaggtcatcgccaggaagatggcgactaccgtgaatcctggcaaccacagcaaatgagcccgcttgcccttgaacgtgcgcaggagattgcccgtaaagtggtgctggcactgggcggttatggtctgtttggtgtcgagctgtttgtctgtggtgatgaggtgattttcagtgaggtctcccctcgtccacatgataccgggatggtgacgttaatttctcaagatctttcagagtttgccctgcatgtacgtgccttcctcggacttccggttggcgggatccgtcagtatggtcctgcagcttctgccgttattctgccacaactgaccagtcagaatgtcacgtttgataatgtgcagaatgccgtaggcgcagatttgcagattcgtttatttggtaagccggaaattgatggcagccgtcgtctgggtgttgcgctggcgaccgctgagagtgttgttgacgccattgaacgcgcgaagcacgccgccggacaggtaaaagtacagggttaa

SEQ ID NO: 484133 - DNA, 642 bp, Shigella sonnei; identical to SEQ ID NO: 459528

SEQ ID NO: 484134 - DNA, 1812 bp, Shigella sonnei
atgaatccacaattgttatgcgtaacaaatcgaatcattgaacgttcgcgcgagactcgctctgcttatctcgcccggatagaacaagcgaaaacgtcgaccgttcatcgttcgcagttggcatgcggtaacctggcacacggtttcgctgcctgccagccagaagacaaagcctctttgaaaagcatgttgcgtaacaatatcgccatcatcacctcctataacgacatgctctccgcgcaccagccttatgaacactatccagaaatcattcgtaaagccctgcatgaagcgaatgcggttggtcaggttgcgggcggtgttccggcgatgtgtgatggtgtcacccaggggcaggatggaatggaattgtcgctgctaagccgcgaagtgatagcgatgtctgcggcggtggggctgtcccataacatgtttgatggtgctctgttcctcggtgtgtgcgacaagattgtcccgggtctgacgatggcagccctgtcgcttggtcatttgcctgcggtgtttgtgccgtctggaccgatggcaagcggtttgccaaataaagaaaaagtgcgtattcgccagctttatgccgaaggtaaagtggaccgcatggccttactggagtcagaagccgcgtcttaccatgcgccgggaacatgtactttctacggtactgccaacaccaaccagatggtggtggaatttatggggatgcagttgccaggctcttcttttgttcatccggattctccgctgcgcgatgctttgaccgctgccgctgcgcgtcaggttacacgcatgaccggtaatggtaatgaatggatgccgatcggtaagatgatcgatgagaaagtggtggtgaacggtatcgttgcactgctggcgaccggtggttccactaaccacaccatgcacctggtggcgatggcgcgcgcggccggtattcagattaactgggatgacttctctgacctttctgatgttgtaccgctgatggcacgtctctacccgaacggtccggccgatattaaccacttccaggcggcaggtggcgtaccggttctggtgcgtgaactgctcaaagcaggcctgctgcatgaagatgtcaatacggtggcaggctttggtctgtctcgttatacccttgaaccatggctgaataatggtgaacaggactggcgggaaggggcggaaaaatcactcgacagcaatgtgatcgcttccttcgaacaacctttctctcatcatggtgggacaaaagtgttaagcggtaacctgggccgtgcggttatgaaaacctctgccgtgccggttgagaaccaggtgattgaagcgccagcggttgtttttgaaagccagcatgacgttatgccggcctttgaagcgggtttgctggaccgcgattgtgtcgttgttgtccgtcatcaggggccaaaagcgaacggaatgccagaattacataaactcatgccgccacttggtgtattattggaccggtgtttcaaaattgcgttagttaccgatggacgactctccggcgcttcaggtaaagtgccgtcagctatccacgtaacaccagaagcctacgatggcgggctgctggcaaaagtgcgcgacggggacatcattcgtgtgaatggacagacaggcgaactgacgctgctggtagacgaagcggaactggctgctcgcgaaccgcacattcctgacctgagcgcgtcacgcgtggggacaggacgtgaattattcagcgccttgcgtgaaaaactgtccggtgccgaacagggcgcaacctgtatcactttttaa

SEQ ID NO: 484135 - DNA, 1476 bp, Shigella sonnei
atggcggtaacgcaaacagcccaggcctgtgacctggtcattttcggcgcgaaaggcgaccttgcgcgtcgtaaattgctgccttccctgtatcaactggaaaaagccggtcagctcaacccggacacccggattatcggcgtagggcgtgctgactgggataaagcggcatataccaaagttgtccgcgaggcgctcgaaactttcatgaaagaaaccattgatgaaggtttatgggacaccctgagtgcacgtctggatttttgtaatctcgatgtcaatgacactgctgcattcaaccgtctcggcgcgatgctggatcaaaaaaatcgtatcaccattaactactttgccatgccgcccagcacttttggcgcaatttgcaaagggcttggcgaggcaaaactgaatgctaaaccggcacgcgtagtcatggagaaaccgctggggacgtcgctggcgacctcgcaggaaatcaatgatcaggttggcgaatacttcgaggagtgccaggtttaccgtatcgaccactatcttggtaaagaaacggtgctgaacctgttggcgctgcgttttgctaactccctgtttgtgaataactgggacaatcgcaccattgatcatgttgagattaccgtggcagaagaagtggggatcgaagggcgctggggctattttgataaagccggtcagatgcgtgacatgattcagaaccacctgctacaaattctctgcatgattgcgatgtctccgccatctgacctgagcgcagacagcatccgcgatgaaaaagtgaaagtactgaagtccctgcgccgcatcgaccgctccaacgtacgcgaaaaaaccgtacgcgggcaatatactgcgggcttcgcccagggcaaaaaagtgccgggatatctggaagaagagggcgcgaacaagagcagcaatacagaaaccttcgtggcgatccgcgtcgacattgataactggcgctgggccggtgtgccattctacctgcgtactggtaaacgtctgccgaccaaatgttctgaagtcgtggtctatttcaaaacacctgaactgaatctgtttaaagagtcgtggcaggatctgccgcagaataaactgactatccgtctgcaacctgatgaaggcgtggatatccaggtactgaataaagttcctggccttgaccacaaacataacctgcaaatcaccaagctggatctgagctattcagaaacctttaatcagacgcatctggcggatgcctatgaacgtctgctgctggaaaccatgcgtggtattcaggcactgtttgtacgtcgtgatgaagtggaagaagcctggaaatgggtagactccattactgaggcgtgggcgatggacaatgatgcgccgaaaccgtatcaggccggaacctggggacccgttgcctcggtggcgatgattacccgtgatggtcgttcctggaatgagtttgagtaa

SEQ ID NO: 484136 - DNA, 150 bp, Shigella sonnei; identical to SEQ ID NO: 472236

SEQ ID NO: 484137 - DNA, 870 bp, Shigella sonnei
atgaatatgctggaaaaaatccagtctcagctggaacatttgagcaaatcagagcgcaaagttgccgaggtcattctggcttcgcccgataacgcgatccattcgagtattgctgctatggcactggaagccaatgttagcgaaccgacggtgaatcgtttctgtcgcagcatggacacgcgcggttttcctgattttaaacttcatctggcacagagtctggcgaatggcactccctatgttaatcgcaatgtcaatgaagatgacagcgttgaatcatacacagggaaaatatttgagtccgcaatggcaacgcttgatcatgtccgtcattcactggataaatctgccatcaaccgcgccgtcgacttgctcactcaggcaaaaaaaatcgcctttttcggattaggctcttcagccgccgttgcccacgatgcgatgaataagttctttcgttttaatgttccggtggtgtactccgatgatatcgtgctgcaacgcatgagttgtatgaattgtagcgacggagacgtggtggtgctgatttctcacactggaagaacaaaaaatctggtcgagctggcgcagctggctcgcgaaaacgacgcaatggtgattgccctcacctctgcgggtaccccgctcgcccgggaagcaacgctggcaattaccctcgacgtaccggaagatactgacatttatatgcccatggtttctcgacttgcacagctgaccgtgatagatgtgctggcgacaggatttactttgcgacgcggtgcaaaattcagagataacttgaagcgggtcaaggaagcgctgaaggaatcgcgttttgataagcagttacttaatttaagtgacgatcgctaa

SEQ ID NO: 484138 - DNA, 1443 bp, Shigella sonnei
atgtccagaaggcttcgcagaacaaaaatcgttaccacgttaggcccagcaacagatcgcgataataatcttgaaaaagttatcgcggcgggtgccaacgttgtacgtatgaacttttctcacggctcgcctgaagatcacaaaatgcgcgcggataaagttcgtgagattgccgcaaaactggggcgtcatgtggctattctgggtgacctccaggggcccaaaatccgtgtatccacctttaaagaaggcaaagttttcctcaatattggggataaattcctgctcgacgccaacctgggtaaaggtgaaggcgacaaagaaaaagtcggtatcgactacaaaggcctgcctgctgacgtcgtgcctggtgacatcctgctgctggacgatggtcgcgtccagttaaaagtactggaagttcagggcatgaaagtgttcaccgaagtcaccgtcggtggtcccctctccaacaataaaggtatcaacaaacttggcggcggtttgtcggctaaagcgctgaccgaaaaagacaaagcagacattaagactgcggcgttgattggcgtagattacctggctgtctccttcccacgctgtggcgaagatctgaactatgcccgtcgcctggcacgcgatgcaggatgtgatgcgaaaattgttgccaaggttgaacgtgcggaagccgtttgcagccaggatgcaatggatgacatcatcctcgcctctgacgtggtaatggttgcacgtggcgacctcggtgtggaaattggcgacccggaactggtcggcattcagaaagcgttgatccgtcgtgcgcgtcagctaaaccgagcggtaatcacggcgacccagatgatggagtcaatgattactaacccgatgccgacgcgtgcagaagtcatggacgtagcaaacgccgttctggatggtactgacgctgtgatgctgtctgcagaaactgccgcagggcagtatccgtcagaaactgttgcagccatggcgcgcgtttgcctgggtgcggaaaaaatcccgagcatcaacgtttctaaacaccgtctggacgttcagttcgacaatgtggaagaagctattgccatgtcagcaatgtacgcagctaaccacctgaaaggcgttacggcgattattaccatgaccgaatcgggtcgtaccgcgctgatgacctcccgtatcagctctggtctaccaattttcgccatgtcgcgccatgaacgtacgctgaacctgactgctctctatcgtggcgttacgccggtgcactttgatagcgctaatgacggcgtagcagctgccagcgaagcggttaatctgctgcgcgataaaggttacttgatgtctggtgacctggtgattgtcacccagggcgacgtgatgagtaccgtgggttctactaataccacgcgtattttaacggtagagtaa

SEQ ID NO: 484139 - DNA, 843 bp, Shigella sonnei
atgcatcatattaaaacagccgcggatcttaattgttttttaaattcaatggttgctgtttcgcaaccaactgttgataaaattatttttggtgctgaggcgacacttattaataaaattgggacctgctggattgcctcaatggatgttttaagaaaggctgtttttgaaggtgtcaatatcattattacacatgagcctacattttattcttatgctgatctggagggtgacgatcttgagttttcatgggccagaaaaataatggattatactcgcggtgaactcagttatttaaaaataattgagcaaaaaaaggagtttttgcataaaaataatttggtaatcattcgttgccatgatgtcatggatcgagagcctacgttcggaatgtctaaggctttggctcagcagttagaactagatgttacaaatattgttgcttctgatgagatgtactgtgtatatgctatagaccctgacagtgccattaacattaccaaacgttttgccaaaaatttgaaaatatataatcttcctggcattcaattttatggagataaagccagagtagtcagaactgttggcattggggcaggctgtttttgtgatccaatacaatatatggaatatcaggctgattattatattacgattaacgattcaattaaaacatgggtgcagacacaatactccaaagatagtggcttaccgatggcagttattggacatagtgttgcagaggaagcgggtatgcgacgtcttgcaagctatttagatctccattcaggctatccctgtattcattttacagggggctgtgattatgattggattgaataa

SEQ ID NO: 484140 - DNA, 573 bp, Shigella sonnei
ttgtgcgctgtagcggaactggctgatgcagaaggtacttacctcggtacgggtgttcgggttccaggggatctcaaaggactccggcagataacgcacggtgtcgcacaggaccaggctctggtcggtacttttttgcgcgtgctcctcataaaagaagatgccttcctccgccgccatccggcacaggaaatcgtaatcagtttcgccgtactggacacaaaactcacgggaaggatgcggctcgctgaacagcggactccactcggtcacaccgttttccttcaggatcgtcgcgaggatgctttcgatgtcctcattctggaagatacggaagttctggcgcagccctgtgcgccacagcggtgggcataccttcatgctgtacagcatctggtttttgtcgttctcccccagttcaaaccaggtcaccacacctttcacccggcgctgtacgtcatcgccctgccatatcgtcaggtaggccattttgtccagtacctgcggaaattcaagggagagaaactgctggctgaccagagagagctcgagggaaaagagcgaagagagtga

SEQ ID NO: 484141 - DNA, 519 bp, Shigella sonnei
atgccaacaccgtgttatatctccatcactggtcagacccagggaaatattactgcaggtgcatttaccgctgattctgtcggcaacatctatgtgcaggggcacgaagacgagatgctggtgcaggaattcctgcataacgttactgtcccgaccactcctcagtccggtcagcctgcgggtcagcgtgctcacaagcctttcatttttaccgtggcgctgaacaaagcggttccgctgatgtacaacgcactggcctccggcgaaatgctgccaaccactgaacttcactggtggcgtacctctgtggagggcaaacaggagcattatttcactacccgcctgactgattcgacgattgtcgatatgaaactgcatatgccgcattgccaggacccggcgaaacgcgagttcacccagttgctcgaggtttcactggcctaccgcaaaattgaatgggaacacgtcaaatctggcacctccggtgccgacgactggcgcgcaccactggaagcataa

SEQ ID NO: 484142 - DNA, 501 bp, Shigella sonnei
atgagcaaaaaatttgaaggcagcgtcgcgccccgcgagcgtattaatatatcgtatgtcccaaaaacagatggccagacggctgaagtggaacttccgcttaacatgctcgttgtcggcgataccggaaatacgcaggaaacatccccactggatgaacgtcaggcagtttccgttaacaagcacaatttcggtgcagtgatggctgaagcagccattggcctcaattttactgtccccgccacgctgaagggaagcacaacagacgatgaactgaatgtggcgctgaatatcaaatcactggatgatttttcaccagatagcgtggcccggcaggttccggaagtgaataaattgctggaactgcgtgaagcactgactgcactgaaggggccgatgggtaaccttccggcattccgtacccagctccaggcattgctggaaaatgaagagtcccgcgagcagttgctcaaagaaatcggtctggtgagcaataaataa

SEQ ID NO: 484143 - DNA, 225 bp, Shigella sonnei
atgacggcacacaaaaatatctccgggacataccacctctctgttgcagacattctgcaggtggtttaccaggtatgtttcagcccgtccgttgaaatcaaccaggatggtgtggctgcgctgattacaacactggatcgccgtatcagtgatctattggatgagattatccatttttgtgagtttcagcagagcgcgtcgcactggcagcgcgtacttcactga

SEQ ID NO: 484144 - DNA, 891 bp, Shigella sonnei
atgtctttacaggaagaggaactcgtttccagtcatgccgggcagcctgagcaggcatcgtcgctgcttgatcaaatcatggcacagacccgtattcagcccggttcggaaggttatgacgttgccctccagggtgtgacagcctttattgccagcatcctgcaatccactgcatctgccgaaccggtcaataaactggccgtggacagcatgattgcagatattgatgaacgcatcagccgccagatggatgtcatcatccatgcgcctgcctttcagcaggtcgagtcgttctggcgctcactgaaaaccatggtggatcgcgttgatttccgtgaaaacatcaaggtcaacgtgcttcatgtcaccaagcaggaacttctggaagactttgagtttgcgccagaaattattcagtccggattttataagcacgtttattcgtccggtttcggacagtttggcggtaaacccatcgctgccgtgctgggcgcttatgagttcaaaaataccgcgcctgacatgaaactgctgcaatacgtcagtgccgtgggcgcaatggcgcacgcaccgttcctgtcctccgtttccccggagtttatggggctgaactcgtggaccgaactgcctaatatcaaagatctttatgccatctttgaaggtccggcctacaccaaatggcgcgccctgcgtgactcggaagattcgcgctatttagggcttacggcaccccgcttcctgcttcgccagccctattcaccaacagataaccctgttaagaactttaactattacgaagatgtcagccagaaccacgaagattatctgtggggtaatacggcctggatgctggcatgcaatatcgcagacagttttgccaaataccgctga

SEQ ID NO: 484145 - DNA, 534 bp, Shigella sonnei
atgcatctgttcgaaacgatggggcagattcaggccaaaatcccaaccgaggtgctggtcaccgatcgccgcgaatttgaactggctgaagagggttttatcacccttaccatgcgtaaagactctgataatgcagcctttttctctgcaaactcggtacaaaaaccgaagcactttccgggaaaagatgcagaaaccaactataagctgggtacgcagcttccttatctcttcatcatcaatcggttagcgcactacatcaaggtgttgcagcgtgaacaactggggtcatggaaagaaaggagcgacttagaaagagagcttaatacctggatccgtcagtatgttgccgaccaggaaaacccgcctgctgacgtgcgcagccgcaaacctctgcgcgctgccaaagttgaggttatggatgtagaaggcgaacccggctggtaccaggttgcgctaagcgtgagacctcattttaaatttatgggggcaaattttgagctttccctggttggccggttagacagggagtaa

SEQ ID NO: 484146 - DNA, 414 bp, Shigella sonnei
atgataccggatcgggaaagaaccacaggttctctttttgagcgtatggaagcctcttcggccagaaaccggcagggaggcagtattcattcgctcaggcaatccattcgccagaacctacgaaacattcttaatacccggtccggtagttgccggggtgcgcctgagctgggcattgatgaaccggaaggggctgaaaacttccgcgaatccatgagtcgggccatcgagcaatgtatagaacgctatgaaccccggatctcacacgctgaagtgcaggcagtggtttcatccgcctccagcccgctggatatgacgtttcatattacagcctgggtgacatttaacgaaacgcatgaggtgcttgaatttgatatggcaccgaatggcagccagcattaccgggtggactga

SEQ ID NO: 484147 - DNA, 1851 bp, Shigella sonnei
atggaatttgaagaacgctatttccgggaagaactcgattacctgcgccagcttagcaagctgctggcaacggaaaaaccccatctggcccgcttcctggccgaaaaagatgcagatccggatattgaacgcctgctggaaggggtggcttttcttaccggcaatctccgccagaaaattgaggatgaattcccagaactgacgcacgggcttattaagatgctatggcctaattacctgcgtccggttccggcaatgacccttattgaatatacgccggatatggataagtcttctgtaccggtgttaatcccccgtaatgagcagtttacaaccaacgccggggaaatcagagttgatgaagtgctgccctctgatgctaaaaaggaggagccgcctccctgtaccttcaccctctgccgggatatctggctgctgcccgttcgcctggagcagattgaaaaccgcagtacgacccgtaatggtgttatcaacatcaccttttcggtcgcaccgggaacggacttccgcacgctggatctgaacaaacttcgcttctggctcggcaatgacgacaactatacccgtgaccagctttatttatggttctgcgaatacttgcagggtgccgacctgactgtgggtgaacagcatattcgcctgcctgagtttatgctaaaagctgtcggttttgagccgcaggatgccatgctgccctggccgaaaaacgtccacagcggctaccggatccttcaggagtatttctgttaccccgatgcgtttctcttttttgatctttgtggttgtccggctttgcctgacggattgcaggcggaattctttaccctgcaactgcgtttttcgcgccctttgcccgtggacatccggctgcgccgcgattccctgcgcctgtattgcgcacctgccattaatttatttatccaccatgcagaagccatcacgctggacaaccggcgggcagactatccgctggttcccagccgccattacccacaacattacgatgtattttccgttaacagtgtggtgagccaggtccaggatatgttcaggaaaaaagatctggggcgtcctgtttcgacgcaggccgcgcgccagtggccagcctttgaaagtttcagccatcagatagaatacagccggaagcgggaagtggtgtactggcatcaccggaccaaaacatccctgttccatcgcggctttgatcatacccttgcctttatacatgctgatggcagttatccgtcagacgaatctctgctcagtaatgaagtggtttcggtatcgctgacctgtaccaaccgtgagcttccgtcacaaattcgttccggcgatatcaccggcacaaccggaaaaaatgcggctgttgcttcatttcgcaacattacccgcccgacgcaaccactctggccggtcattgatggcagcctgcactggcccctactctccgccatgaacctgaattatctgtcattactggatacggacgcgctgaagcaggtcatcgccaactttgatcgccacgcaatccatcatccgcagacggcacggctgtcacaacaaaagctggatgccattgagcgtctggagacccgccccgttgatcgcctgtttacgggtattcccgtccgggggctggcttccacgctgtatctgcacccggagccgtttgtctgtgaaggggaaatgtatctgctcggtacggtgctttcgcattttctgtcgctgtacgccagcgttaactcattccacatgctgaccgttgtgaacacagaaagccaggagacatggaaatggacggaaagaatcgggcagcatcctcttatctga

SEQ ID NO: 484148 - DNA, 1083 bp, Shigella sonnei
atggacggaaagaatcgggcagcatcctcttatctgagtccgggaaatcccccggcagataaagagcagaatgatccgctggcacaggttttccataatgcctgctcttacaatttttttgcgatggcggagctgttgcaccgcctggcaaagggtgaaaaggggacgccagaattatccctgcgcgacgatccggcacaggaaaccctgcgtttcagcgccgatgccagccttgccttcccgtgcagtgatatcagtgcgctgaaacgggatacgtcaggggcattcaggatgaccaccacctttatggggttacaggggagccagtcgcctctccccggttattacctcgctcacctggcctggaaagcggtacatgaacaaagtccggtaggtgattttctggatatgttcagccaccgcctgacccagtttgtctggcatatctggcgtaagtaccgctatcacatcagttttcgtaacggcggtgtggatgcgttctcgcagcgcatgtactcccttgtcgggctgggccaccgccagcttcgcgataagctggcgattaatcacagcaaaatgctggcgtattccgggatcctggcaaatccgggacgatccccggaaattatctgtggcctggtgtcccactgctttgatttgtcagaagtgacactgcaaaactggcaacgtcgcaaggtggatattgaaccggatcagcaaaatagtctggggagctattctcttaaaaatggcgaaaaactggcgggaagatcggtactgggcaactttgttctgggtacacgagtgcccgatctcagcggaaaattccagctcagtattaccagcctgacccgaaaacagttcctctcttttctgccgtccggcgaaaacttcctgccactgacgatgttcgtgtccttcatcctgcgcgatcagcttgcctgggacttacatctggggctggcgccggagcaggtgggcgcaatgcgcctgggcgataacaaaagtgcgctgctgggctggaccagcttcctcggcacaccggaagaacgaccctcagtcaccatcagggtacggtcgtaa

SEQ ID NO: 484149 - DNA, 1281 bp, Shigella sonnei
atgccggaagagaaactacagacgctttcattgcaggtcattaacggcagtgagctggaaagcgggcgggcggcgcgctgtctgttcacacagcagggaaatgtcggccatggccccgaatgccactggtcggtacaggatcgtcagcagagcattccggcccaggcttttaccgttatcctgcacgatggcacattttgtctgcgcccgcagacggcacaactgtggctgaatcaggcaaaagtcacagcaacatcagacctaatacagttgcgccagggcgatgagatccagatcggacggctgatggtgagggttcatctgaaccggggagatattccccattacgatgaggaaatggccactcccgaaaccatcgttaccaatcgcgatatgctcacggataccctgctatcaacggagggtgcgccacactatccgggaatgactcaccggcaccagcttgcagacaccgtggtaaacggtttttctgccgatccactccaggctcttcagtccgaaagcctgattaccacgggcgatccgctttcaggcattgcggctgtccggccatcggcaccgctgtccgatccggcaagtaatggggggatcaatactccgtttatggatctgccgcccatttatgccagccccggcgatcgtaatgacgacgtctctgcggcagaaatggcgcaacgccacgttgcggtcacccccttactgcgcggtcttggcggctcgcttaccatgagcaattccgacgatgcggatgattttctggaggaggccggacgaacgttacaggccgcaataaaaggtctgctcgatttgcagcagcagcgtaacagcctctcagacaaacatttgcgcccgctggaagataacccgctgcgcctgaacatggattacgccaccgcgctcgacgtaatgtttgccgaaggtaaaagctcggtacatctggcggctcccgccgccgtcagtgaaagcctgcgcaatgtccgccaccacgaagaagctaaccgggcagcgattgtggagtcgcttcgtgtcctgctggatgctttctcaccacaaaatctgctgcgccgctttgtgcagtaccgccgcagccatgaactgcgccagccgctggatgatgccggagcatggcaaatgtacagccattattacgaagaactggcctccgatcgccagcaggggtttgagatgctgtttaacgaggtctacgcccaggtctatgaccgggtgcttcgtgaaaaacagcgggagccggaagcatga

SEQ ID NO: 484150 - DNA, 525 bp, Shigella sonnei
atgaacaggaaggcgtttctggcctgcgtgctgatgtgcgtcatattaaccggctgcgaaacggcgaaaaaaatcagtgaggtgatcaaaaacccggatatccaggtcgggagcctgaaggagcaaccttcggaaataaccgtcaccctgctgaccgaaccggacaccaataccaatgcggaaggtgaatcagccgccgtggatgtgcaactggtgtacctgactgacgactcaaaattgctggcagccgactatgaccagatagccagcacgccgctaccggatgtgctgggtaaaaactatatcgaccaccaggatttcaacctgttgccggacaccatcaaaaccctgccgccggtaaagctggatgagaaaacgcagtttattggtgtcgtggcctatttctccgatgaccaggccactgaatggaaacaaatcgagacggtggaaggaatcggccaccattaccgcctgctggtgcatgtacgtcaaagcagcatcgaaatgaaaaaagaggatgaataa

SEQ ID NO: 484151 - DNA, 1332 bp, Shigella sonnei
atggcaaccacccgcaacaaggtgatgtggcaggaagggatgctgatgcgtccacaccatttccagcagcagcagcgttacaacgactacctggataaccagcgtttccgggccatgaatgatttatcctggggatttaccgaactcaccctcaacaatgaactgctggcgcagggtaagatcatgattgacagcgcgtcaggcacactgcccgacggcaccgtcttttctatccccgaccaggacgcactgcccgatccgctgcacccgcaaaattttccggacgaaagaagccgcaatatctacctcgctctgccggtcgccagtgatgtgagaaatgaaatcagcgacggacggcgaatcgggcgttaccggctgaattatgccgatgtccgggatttgcattcagaagaaggtgacgcgcgaacattgacgctgggtcaactgacgccgcgcattatgagcggtgcagaagatatgagcgcctatattacgctcccgctttgccgtatcagcgatcgccatgccgatggctccctgacgttggatgacgattttatcccctcctgccagaatattcaggtcagtaagaaactgcgtgtttatctcaaagaggtacagggggccattggcggacgggcaagcgatctggcaaaccgtattggctctccggcgcagagcggcatcgcggatgtggcggaatttatgatgttgcagttacttaaccgtaaccagacccggtttacccatcacgcccgtcgatcccagctccacccggaagatttctaccttgatcttgccgggttgctgggtgaactgatgacctttaccgagccgtcgcgcctgccctgcccgcttgatgtgtatgatcatcatgacctgaccaaaatatttaaaacgctgttaccggaagtcaaacgggcgctgcataccgtactgtcgccaagagccgtcaatctgccgctgcatctgcgtgacggtatctggcaggccgatatccatgacacagaactgctgcaatctgccacctttgtgctggccgtggcggcaaacatgccggtcgatcagatccagcgccagtttatccagcagtcgaaaatttcctcgccggaaaaaatccgcaatatggtcagtgtgcagatccccggtattccattgcgtgcccttatggtggctccccgccagcttccttaccattccgggttcagctatttcgaactcgacaagagtggccaggcctggacagaaatggctgccgccggggccgttgcactgcatgtttccggcagtttcccggatctgaacatgcaactgtgggcgataagagggtaa

SEQ ID NO: 484152 - DNA, 762 bp, Shigella sonnei
atggatgaggggtcactgtctctgccaccatttaccggacacgacgaaaaaagccagcgcaactaccatctcgcgcttcgtggcaacagcctgaatccgatgatcgacgcggccacgccgctactcggtatggtaatgcgcctttcaaccatgaacagccagacgatgccggagcatctttttgctcaggtggtgacagatgttcaggccgtggagcaactgcttcaggagcagggctacgaaccgggcgtgattatctcgtttcgctacatcctctgcacgtttattgatgaagcggcgctcggtaacggctggtcaaacaagaacgagtggatcaagcagtcattgctggtccatttccacaacgaagcctggggtggcgagaaagttttcatcctgctggagcgcctgatccgtgaacccaaacgttaccaggatctgctggaatttctctggatctgtttttctctgggatttcgcgggcgctacaaagtggcagcacaggatcagggggaatttgagcagatctaccgccgtctgtaccacgttctgcataaactgcgcggcgatgcccctttcccgctgttacaccaggacaaaaaaacccagggcgggcgttatcagctcatcagtcgcctgactgttaaacatattttttgtggtggcgttgtcgtgctggcgttgttttacctgttctatctgttgcggctggacagccagacgcaggacatcctgcaccagctaaacaaattacttcgataa

SEQ ID NO: 484153 - DNA, 300 bp, Shigella sonnei
atgatccagattgatcttcccacgctggtaaaacggctgaacctgttctcccgccaggcgctggagatggccgcctctgaatgtatgagtcagcaggcagcggaaattaccgtcagccatgtgctcattcagatgctcgccatgccacgcagtgacctgcgggttattacccgccagggcgatattggcatggaagagttgcgccaggcgctgacggtagagaactacacaaccgcccgttctgcggacagctacccggcgttttccccgatgctggttgagtggcttaaagagggctag

SEQ ID NO: 484154 - DNA, 744 bp, Shigella sonnei
atgagcaggttgcgcgttttccggcagacaggatggtttatcgcgggcctgatgacgggcttacccgccactgccgcgcccgcagaagcatcgtcaatggccggtgtggcggtcgccgtcgccaccacgaccccgccggatgcgacagccacgttacaggccatgcagtcctgtcggcgggagtccgcggcgctggagcggcttgactgctatgaccgcctgctggcaccgctgtccccgtcagggtttgacggggcgctggtcaaagccggttttgtgggcgaggcctggacccgcgccacagagcaggaaaaacgccgcgagggcaacaccacagaactgctggtgacgcaggtgccgggggagcgcccgacggtggtgataaccaccccggctatcggtcatgttccgccacgcccggtgctgatgttcagttgcgtggacaatatcacccggatgcaggtggcgctgatgcaccctctggatgtccatgatatcgccgtcactctgaatgccgacaaccgggcattgcgcagccactggtttgtgcgcgagaacggcaccctgctggagtccagccgggggttatccgggattgatgaaattaagcaactgttcggcgcaaaaacgctgacggtggataccggcgcagacaatgccgccggaaagctgacctttaacattgacgggctggcaagggcgattgctcccctgcgcgatgcctgccactgggcgggagaataa

SEQ ID NO: 484155 - DNA, 1413 bp, Shigella sonnei
atggcaatggacttacgcgatccgaatgtctggatatcgcacctgctggaaaacctgccggaagagaaactggcatcggcgctgaaagatgacaacccgaactgggagtatatcgacggcgaaatcgtcaagctgggatcgctggcccacagtcaactggatatcccggaactccagcgccgggggctggtcattctggcttcggagagtaaggattttcgtctgctggcgcatctgctaagaaccctgcaacacgccggtgatcctcatctcgcattgcgcctgctggcgctgtatgtggagcattactgggcggtggctgcgccgcagaatatggcgcataaaaaacgctttgccagccaggtcattaaacgctttgaaacaggtattgaagttttttcacagaacgccgccacagcgcagcgcgatgcgctgtcaggggaactggcaaaactggcgcaatgctggcagtcacataacgccccggaactggcacaggctactgatgatctttttgccctgtaccagcgtgcgtttaatcgtgcggcaccggctcctgtccccactccggcggcctccggtagttcaccacagaccaccgccacgtctgaaagcggcgtgacgcaacccagtgctccggctccccaaatcgtcatcgacagtcacgacgacaaagcctggcgcgacacgctgttaaaagtggcggccattttatgtgaacgccagccggattcaccgcagggctaccgtctgcgccgccatgcgctttggcagaacatcaccagtacgccccaggcggaaagcgatagccgtactccactggctgcggtctccgccgatatggtggcagattaccatgctcagctcggtagtgccgatatggcgctgtggcagcaggtggagaaaagcgtactgctggctccttactggctggatggtcactgcctttctgcacagacggcgctgcgtctgggttacaaacaggtggcagacgccatccacgatgaggtcatccgcttccttgagcgtctgccccagcttaccgggctgctgtttaatgaccacacaccgtttatcagtgagcagacgaaacaatggctggcagcttcgcccgacgccaaagttgcaccggttgcgcaaatcggtgaggaatcgaaggcagccagagcctgttttgctgagcagggtctggaggcggcgctgcgatatctggacatgctacccgaaggcgatccccgcgatcagtttcaccgccagtaccttgccgcacagttgacggaagaggcggggctggtacagcttgcgcagcagcagtaccggatgttgttcaggatgggattgcagatgatggtggcagactgggagccgtccctgcttgagcagctagaacaaaaattcacggcagaacaataa

SEQ ID NO: 484156 - DNA, 1680 bp, Shigella sonnei
gtgttcagattaccaacaccccgactactcagcggactcaaatcagccctgcgaccggcgatgccccggtttaaagtctctgctttctggctgctgatactggcgtggatttttctgctggtgtggatctggtggaaaggcccgatgtggacgctgtatgaagaacagtggctcaaaccactggcgaaccgctggctggcaacggcggcgtgggggattattgccctggtgtggcttaccgtccgggtgatgaagcgcctgcaacagcttgaaaaaatgcaaaagcaacagcgcgaggaagccgttgatccgctcagcgtggaactgaacgcccagcagcgttatcttgaccgctggctgctgcgcctgcaacgccatctcgacaaccgccgtttcctgtggcagttgccgtggtatatggtcatcggcccggcgggcagtggcaaaacgacactgctgcgcgaggggtttccgtccgacattatttatgccccggagggcgcacgcggcgcagaacaacgcctgtacctcacgccccatgtcggtaaacaggcggtgatctttgatatcgacggcacactctgcgctcccgctgatgcggatatcctgcatcgccgtctgtgggaacatgccctcggctggctgaaagaaaagcgcgcgcgccagccgctgaacgggattattctgacactcgatttacccgatctgctgaccgcagacaaacgccgccgcgagcatctgttacagacgctgcgcagccgcttacaggatatacgccagcatcttcactgccagttaccggtttacgtggtactgacccggcttgatttattacagggttttgccgccctgttccagtcactcaacagacaggatcgcgatgcgattctgggcgtcacgttcacccgccgtgcccatgaaaatgatgactggcgaacagagttgaatgctttctggcagacatgggtggatcgaatgaatctggcgttgccggatctgatggtcgctcagactcacacccgcgcgtctttattcagtttttcccgccagatgcagggaagccgtgaaccgctggtgtcactgcttgagggtctgcttgatggcgaaaatatgaacgtgatgctgcgtggtgtctatctcacctcttcgcttcagcgtggacagatggatgatatattcacccagtctgccgcccgccagtaccggctgggcaataacccactggcgtcctggcccctggtggacaccgcgccttatttcacccgcagcctgttcccgcaggcattactcgcagagcctaatctggcaacagagagccgcgcctggctgatacgttcccgtcgccgcctgacggttttctctgccacaggcggcgtggcagcactgctgctcatcaccggctggcatcactattacaacggtaactatcagtccggcatcaccgtgcttaagcaggccaaagcctttatggacgtgccgcctccgcagggggaagatgactttggcaacctgcaactgccgctcctgaacccggtacgcgatgccacactggcctatggcgactggggcgaccgcagccgtctggccgatatgggactgtaccagggacgacgtatcgggccttatgtggtagactggccccctgaatctccagacaaccagtatcacttaaataagtga

SEQ ID NO: 484157 - DNA, 963 bp, Shigella sonnei
atggcaatttcatcgcgtaacacacttcttgccgcactggcattcatcgcttttcaggcacaggcggtgaacgtcaccgtggcgtatcaaacctcagccgaaccggcgaaagtggctcaggccgacaacacctttgctaaagagagcggggcgagcgtggactggcgtaagtttgacagcggagccagcatcgtgcgggcgctggcttctggcgacgtgcaaatcggcaacctcggttccagcccattagcggttgcagccagccaacaggtgccgattgaagtcttcttgctggcgtcaaaactgggtaactccgaagcgctggtggtaaagaaaactatcagcaaacccgaagatttgattggcaaacgcattgccgtaccgtttatctccaccacccactacagcctgctggcggcgctgaaacactgggggattaaaccagggcaagtggagattgtgaacctgcagccgcccgcgattatcgccgcatggcagcggggtgatattgatggtgcttatgtctgggcaccggcggttaacgccctggaaaaagacggcaaggtgttgaccgattctgaacaggtcgggcagtggggtgcgccaacgctggacgtctgggtggtgcgcaaagattttgccgagaaacatcctgaggtcgtgaaagcgttcgctaaaagcgccatcgatgctcagcaaccgtacattgctaacccagacgcgtggctgaaacagccggaaaacatcagcaaactggcgcgtttaagcggcgtgccggaaggtgacgttccggggctggtgaaggggaatacctatctgacgccgcagcaacaaacggcagaactgaccggaccggtgaacaaagcaatcatcgacaccgcgcagtttttgaaagagcagggcaaggtcccggctgtagcgaatgattacagccagtacgttacctcgcgcttcgtgcaataa

SEQ ID NO: 484158 - DNA, 768 bp, Shigella sonnei
atgctgcaaatctctcatctctatgccgattatggcggcaaaccggcactggaagatatcaacctgacgctggaaagcggcgagctactggtggtgctggggccgtccggctgcggtaaaaccaccctgctgaatctgattgccggttttgtgccttatcagcatggcagcattcaactggcgggtaagcgtattgagggaccgggagcagagcgcggggtggtttttcagaatgaagggctactaccgtggcgcaatgtacaggacaacgtggcgttcggcctgcaattggcaggtatagagaaaatgcagcgactggaaatcgcgcaccagatgctgaaaaaagtggggctggaaggcgcagaaaaacgctatatctggcagctttccggtggtcaacgtcagcgggtggggattgcccgcgcgctggcggcgaatccccagctgttattactcgacgaaccgtttggtgcgctggacgccttcacccgcgaccagatgcaaactctgctgctgaaactctggcaggagacgggcaagcaggtgctgttgattacccacgatatagaagaagcggtgtttatggcgactgaactggttctgctttcatccggccctggccgtgtgctggagcggctgccgctcaactttgctcgccgctttgttgcgggagagtcgagccgcagcatcaagtccgatccacaattcatcgccatgcgcgaatatgttttaagccgcgtatttgagcaacgggaggcgttctcatga

SEQ ID NO: 484159 - DNA, 828 bp, Shigella sonnei
atgagtgtgctcattaatgaaaaactgcattcgcggcggctgaaatggcgctggccgctctcgcgtcaggtgaccttaagcattggcacgttagcggttttactcactgtatggtggacggtggcggcgctgcaactgattagcccgctgtttttgccgccgccgcaacaagtactggcaaaactgctcaccattgccggaccgcagggatttatggacgccacgctgtggcagcatctggcagccagcctgacgcgcattgtgctggcgctactcgcggcggtggtgatcggtattccggtcgggatcgccatggggctaagcccgacggtgcgcggcattctggatccggtaatcgaactttatcgtccggtgccgccgctggcttatttgccgctgatggtgatctggtttggtattggtgaaacctcgaagatcttattgatctatttagcgatttttgcaccggtggcgatgtcggtgctggcgggggtgaaaagcgcgcagcaggttcgcattcgtgccgcccagtcgctgggtgccagccgtgcgcaggtgctgtggtttgtcattttgcccggcgcgctgccggaaatcctcaccggattacgcattggtctgggtgtgggctggtctacgctggtagcggcggagctgattgccgcgacacgcggtttaggatttatggttcagtcagcgggtgaatttctcgcgactgacgtggtactggcggggatcgcggtgattgcgattatcgcctttcttttagaactgggtctgcgcgcgttacagcgccgtctgacgccctggcatggagaagtacaatga

SEQ ID NO: 484160 - DNA, 852 bp, Shigella sonnei
atgagtgaacgtctgagtattaccccgctggggccgtatatcggcgcacaaatttcgggtgccgacctgacgcgcccgttaagcgataatcagtttgaacagctttaccatgcggtgctgcgctatcaggtggtatttctgcgcgatcaagctattacgccgcagcagcaacgcgcgctggcccagcgttttggcgaactgcatattcaccctgtttaccctcatgccgaaggggttgacgagatcatcgtgctggatacccataacgataatccgccggataacgacaactggcataccgatgtgacatttattgaaacgccacccgcaggggcgattctggcagctaaagagttaccttcgaccggcggtgatacgctctggaccagcggtattgcggcctatgaggcgctctctgttcccttccgccagctgctgagcgggctgcgtgcggagcatgatttccgtaaatcgttcccggaatacaaataccgcaaaaccgaggaggaacatcaacgctggcgcgaggcggtcgcgaaaaatcctccgttgctacatccggtggtgcgaacgcatccggtgagcggtaaacaggcgctgtttgtgaatgaaggctttactacgcgaattgtcgatgtcagcgagaaagagagcgaagccttgttaggctttttattcgcccatatcactaaaccggagtttcaggtgcgttggcgctggcaaccgaatgatattgcgatttgggataaccgcgtgactcagcactatgccaatgccgattacctgccacagcggcggattatgcatcgggcgacgatccttggggataaaccgttttatcgggcggggtga

SEQ ID NO: 484161 - DNA, 975 bp, Shigella sonnei
atgacagacttaatccaacgccctcgtcgcctacgcaaatctcctgcgctgcgcgctatgtttgaagagacaacacttagccttaacgacctggtgttgccgatctttgttgaagaagaaattgacgactacaaagccgttgaagccatgccaggcgtgatgcgcattccagagaaacatctggcacgcgaaattgaacgcatcgccaacgccggtatccgttccgtaatgacttttggcatctctcaccataccgatgaaaccggcagcgacgcctggcgggaagatggactggtggcgcgtatgtcgcgcatctgcaagcagactgtgccagaaatgatcgtcatgtcagacacttgtttctgtgaatacacttctcacggtcactgcggtgtgctgtgcgagcatggcgtcgacaacgacgcgactctggaaaatttaggcaagcaagccgtggttgcagctgctgcaggcgcagacttcatcgccccttccgccgcgatggacggccaggtacaggcgattcgtcaggcgctggacgctgcaggctttaaagatacggcgattatgtcgtattcgaccaagttcgcctcttccttttatggcccgttccgtgaagctgccggaagcgcattaaaaggcgaccgcaaaagctatcagatgaacccaatgaaccgtcgcgaggcgattcgtgaatcactgctggatgaagcccagggcgcagactgcctgatggttaaacctgctggagcgtacctcgacatcgtgcgtgagctgcgtgaacgtactgaattgccgattggcgcgtatcaggtgagcggtgagtacgcgatgattaagttcgccgcgctggcgggtgctatagatgaagagaaagtcgtgctcgaaagcttaggttcaattaagcgtgcgggtgcggatctgattttcagctactttgcgctggatttggctgagaagaagattctgcgttaa

SEQ ID NO: 484162 - DNA, 2889 bp, Shigella sonnei
atgcactcctggaaaaagaaacttgtagtatcacaattagcattggcttgcactctggctatcacctctcaggctaatgcagctacttataacaccttcgggtatcacgatgacgcagccaccatctacaattggggtgacagcactaaaattgatcacgattatctgacttacggtggttatgtatatgaccacgcagctgatggttactttgataccactttcagcggcgacactgtaaatggtgtaatttctacttattatctgaaccacgattatggcacagataccggtaatacactgaacatctccaactcaattgttcatggtatggttacatcttaccaggttggttatggcgactacgtctggaccaacggtagcgattatactggccacgactgggttgatggcgacatcttcactctgaacatcgctaattctactattgacgatgattttgacgccttctacttcaccgatacttatctggatgcagacggtaaaacatctaagacagattatgatcgtttggtaaccgctggtcttggtaccgctgtgactctggatgttgaaagtaacatcaacatcagcaacaactcccatgttgcaggtattactttggttcaacacgacctcggtaatgcgacctacaataccgaaggtcatcagtgggacaacaacatcgttgttaatgactctactgtaacttctggttcatggactgaagacgaacaatcagatcgtggtcatttcggcaattctgttgaaccaagtgactacggcaatggcgcatctcctgctgatgatgttgcgttagccttcatcgatgatgacacttctgattatcgtatggtcaacaacgttacgttcaacaactctcagttgcttggtgacgttgtatttgacagtacctggaacgctaactttgacgcgacgggtcacctgattgacaactctaccactgcttacactcatggcggttgggcaactgacgatcagaacgtcgatcacctgaacctgactctgaacaacaccaaatgggttggttcagcgaatattgattatgacgttgttgttgctgacgaagccttctacgacgttgcaccaaacagcctgaacccgtacgcttcttactctgaagatggctggaatcgtgttgataacgctaacgcattccagagcggcgtattcgatgttgttctgaacaacggttctgattgggaaaccacgaaaacttccctgatcgataccctggcgatcaacagcggttctcaggttaacgtgagtgcagattcttctctgacttctgacaccatcactctgaacggtggttcttcaatggaagttaacggtgaagttaacaccgatcacctgaccattgataccttctcaaccgttaacttcggtgaagatactgcttcagcttgggcatatgcaccgctgtatgccaataccattaccgttactaacggtggtgtgctggatgtaaacaccaacatgaatgacatctccagcgtatttgcaactgatactctggaactgaccagtggcaacgttaaagataacaacggtaatgtttacgcaggtgtgtttgacattcatagtaatgattacatcctgaatgcagacctcgtcaacgatcgtaccaacgacaccagcaaagctaactacggttatggtgttattgcgatgaactctgatggtcacttgaccgttaatggtaacaacgacattaacaatggcgacgaagttgacaacagctctgcagacaacgttgtagctgcaaccggtaactacaaagttcgtatcgacaactccactggcgctggtgcgattgctgattacgcaggtaagcagctcatctatatcgatgataccaaaaccaacgcgaccttctctgctgctaacaaagctgacctgggtgcatacacctatcaggctgaacagcgcggtaacaccgttgttctgcaacagatggagctgaccgactacgctaacatggcgctgagcatcccgtctgcgaacaccaatatctggaacctggaacaagacaccgttggtactcgtctgaccaactctcgtcatggcctggctgataacggcggcgcatgggtaagctacttcggtggtaacttcaacggcgacaacggcaccatcaactatgatcaggatgttaacggcatcatggtcggtgttgataccaaagttgacggtaacaacgctaagtggatcgtcggtgcggctgcaggcttcgctaaaggtgacatgaatgaccgttctggtcaggtagatcaagacagccagactgcctacatctactcttctgctcacttcgcgaacaacgtctttgttgatggtagcttgagctactctcacttcaacaacgacctgtctgcaaccatgagcaacggtacttacgttgacggtagcaccaactccgacgcttggggcttcggcttgaaagccggttacgacttcaaactgggtgatgctggttacgtgactccttacggcagcgtttctggtctgttccagtctggtgatgactaccagctgagcaacgacatgaaagttgacggtcagtcttacgacagcatgcgttatgaactgggtgtagatgcaggttataccttcacctacagcgaagatcaggctctgactccgtacttcaaactggcttacgtctacgacgactctaacaacgataacgatgtgaacggtgattccatcgataacggtactgaagggtctgcggtacgtgttggtctgggtactcagttcagcttcaccaagaacttcagcgcctataccgatgctaactacctcggtggtggtgacgtagatcaagactggtccgcgaacgtgggtgttaaatatacctggtaa

SEQ ID NO: 484163 - DNA, 624 bp, Shigella sonnei
atgttatctgtagttaaacctcttcaggaatttggtaagctcgataaatgtttgtccagatacggtacgcgcttcgagtttaataatgaaaagcaagttatattttccagtgatgtcaataacgaagatactttcgttattttagagggagttatctctctgcgtagagaagaaaacgtacttatcggtattacccaggccccttatattatggggctggctgatggtttaatgaaaaacgatataccatacaaattaatatcagaaggaaattgtacgggatatcatctaccagccaaacaaaccattacgcttattgaacaaaatcaactctggcgagacgctttttactggttagcttggcaaaatagaattctggaattacgcgacgtgcagctcattgggcataattcctacgaacaaatccgcgcaacattattatcaatgattgactggaatgaagaattgcgatcacgtattggtgtgatgaattatatccatcaacgtacacgcatatcgcgttctgtcgtcgcagaagttctcgctgctttgcgtaaaggcggctatatcgaaatgaataaaggcaaactggtcgctatcaaccgtttgccttcagagtattaa

SEQ ID NO: 484164 - DNA, 1158 bp, Shigella sonnei
ttgaaacgtagtctgcttttttctgccgtgctgtgtgcggcgtcattgacctccgtccatgcggcgcagccgatcactgaaccggagtttgcctctgatattgtcgatcgttatgccgatcatattttttacggcagcggtgcaacggggatggcgctggttgttatcgacggtaaccagcgcgtctttcgtagttatggcgaaacgcgacctggtaataacgttcgcccgcagctggattcggtcgtgcgtattgcttccctcaccaaactaatgaccagtgaaatgctggtgaaattgctcgaccaggggaccgtaaagttaaacgatccgctaagtaaatatgctccgccaggcgcacgcgtgccgacctacaatgggacgcccattaccctagtgaatctggcaacccataccagcgccctgccccgtgaacagcccggtggcgcggcacatcgtccggtgtttgtctggccaacgcgcgagcaacgctggaaatacctttctacggcgaagctgaaagccgcgccaggcagtcaggcggcgtactctaaccttgcgttcgacctgctggcagatgcactggcgaatgcgtccggcaagccttatacccagttgtttgaagagcagattacccgtccattggggatgaaagacaccacctacaccccctcaccggatcagtgccgccgtttaatggttgctgagcgcggtgccagtccgtgcaataacacgctggcggcaattggcagcggcggcgtctattccacgcctggcgatatgatgcgctggatgcagcagtatttgtcatctgatttttatcagcgcagtaaccaggcagatcgcatgcagacgttgatttatcagcgcgcgcagtttacgaaagtgattggcatggatgtccccggcaaagcggatgcgcttggtttaggctgggtatatatggccccgaaagagggtcgtccggggattattcagaagacaggcggtggtggcggtttcattacctatatggcgatgatcccgcagaagaatattggcgcgtttgtggtggtcactcgttcgccgttgacgcgctttaaaaatatgagcgatggcatcaatgatctggtgaccgagctaagcgggaataaaccgttggttatccccgcatcctga

SEQ ID NO: 484165 - DNA, 1221 bp, Shigella sonnei
atgtttaagtcttttttcccaaagccgggagcgttttttctctcggcctttgtttgggcattgattgccgttatcttctggcaagccggtgggggagactgggtggcgcgtatcaccggcgcttccgggcagatcccgattagcgccgcgcgtttctggtcgttggatttcctgattttttacgcttactacattgtttgcgtaggactttttgcatttttctggtttatctacagcccgcaccgttggcaatactggtcaatactcggtactgcactgatcatcttcgtcacctggtttttggtggaagtcggggtcgccgtcaacgcctggtatgcaccgttctatgatctgattcaaaccgcgctaagttcgccgcataaagtcactatcgaacaattttaccgcgaagtgggcgtctttctggggattgcgctgatcgcggtggtgatcagtgtactgaacaacttctttgtcagtcactatgtgttccgctggcgtacggcgatgaacgaatattacatggcgaactggcaacaactgcgtcatatcgaaggtgccgcacagcgtgtgcaggaagacaccatgcgttttgcttcaacgctggagaatatgggcgtcagttttatcaacgccatcatgacgttgatcgccttcctgccggtgctggtaacgctctccgcgcatgtgccggagctgccgattatcgggcacattccgtatggtctggtgattgccgctatcgtctggtcgctgatggggaccggatggctggcagtggtagggatcaaactgccggggctggagtttaaaaaccagcgagtagaggccgcctaccgtaaagagctggtttatggtgaagacgatgccacgcgcgcgacgccgcctacggtacgcgagctgtttagcgccgtacggaaaaactattttcgcctctattttcactatatgtatttcaacatcgcccgcattctctatttgcaggtcgataacgttttcggtttgttcttgctgtttccgtcaattgttgccggtacgattacgctcggcctgatgacgcagattaccaacgtttttggtcaggttcgcggtgctttccagtacctgattaactcatggaccacactggttgagttgatgtctatctacaaacgtctgcgcagctttgaacatgagctggatggtgacaaaattcaggaagtaacccataccttgagctaa

SEQ ID NO: 484166 - DNA, 1095 bp, Shigella sonnei
atgtcgcgcgtcaatcatctatcttcgctgtcattgttggcggttctggttttagcggggtgtagtagtcaggctccgcaaccgttgaaaaagggcgaaaaagcgatagatgtagcgagcgtcgtgcggcagaagatgcctgcgagcgtgaaagaccgcgatgcctgggcgaaagatctcgccatcacctttgaaagtcaggggctggcaccgacgctggaaaacgtctgctcggtgctggcggtggcgcagcaggagtcaaattatcaggcagatccggccgttccgggcttaagcaagatcgcctggcaagagattgaccgtcgtgctgaacggatgcacattcctgcttttctggttcataccgcgctaaaaatcaaatcgccaaacggcaaaagttatagcgaacggttagattcggtgcgtacagaaaagcaattgagcgcgatttttgacgatctgatcagcatggtaccaatggggcagacgctgtttggttcgcttaatccggtgcgcaccggtgggccgatgcaggtcagcattgcttttgccgaacagcataccaaagggtatccgtggaaaatggacggtacagttcgtcaggaagtcttcagtcgccgcggcgggttgtggtttggtacttaccatttactgaattatcccgccagctatagcgcaccgatataccgctttgctgattttaacgctggctggtacgccagccgtaatgccgcgtttcagaacgcagtcagtaaggccagcggcgtgaagctggcactggacggtgatttaattcgttacgacagtaaagaacccgggaaaaccgaactggcaacgcgcaaactggcgggaaaactggggatgagcgacagcgaaattcgccgtcagttagagaaaggtgacagcttctcttttgaggagacggcgctgtacaagaaagtttatcaacttgccgaagcgaaaacgggtaaatcactaccccgcgaaatgttgcctggcattcaactggaaagcccgaaaatcacccgcaacctgactacggcctggtttgcgaagcgcgtagacgaacggcgggcgcgttgtatgaaacagtga

SEQ ID NO: 484167 - DNA, 309 bp, Shigella sonnei; identical to SEQ ID NO: 40979

SEQ ID NO: 484168 - DNA, 213 bp, Shigella sonnei; identical to SEQ ID NO: 82

SEQ ID NO: 484169 - DNA, 1095 bp, Shigella sonnei
atggaaaaactgcgggtaggaatcgtttttggtggtaaatcagcggaacatgaagtgtctctgcaatcggcaaaaaacattgtcgatgccattgataaaagtcgcttcgacgttgtgctgctgggcattgataaacaagggcaatggcacgtcagcgatgccagcaattatctgctaaatgcagacgatcctgcccatattgcgttgcgcccttcggcgaccagccttgcgcaggtgccaggtaaacatgagcatcagcttatcgacgcgcaaaacggtcagccgttgccgacggtggatgtcattttcccgattgtccacggtacgctgggcgaagatggttccttgcagggaatgctgcgggtcgccaatttaccgtttgtaggttctgatgttctggcttcagcagcctgtatggataaagatgtcaccaaacgtctgctacgcgatgccgggctgaacattgcgccatttattaccctgacgcgcgctaatcgtcacaacatcagttttgccgaagtggagtctaaactggggttaccactgtttgtaaaaccggctaatcagggctcttctgttggtgtcagcaaagtaaccagtgaagaacagtacgcaattgccgtcgatctggcgttcgagttcgatcataaagtgatcgttgagcaagggatcaaaggtcgtgagatcgaatgcgcagttctgggcaacgacaatccgcaagccagcacctgtggcgagatcgtactcaccagcgatttctatgcctacgacaccaagtacattgacgaagatggcgcgaaagtggtagttccggcagccattgcaccagagatcaacgataagatccgggcgattgccgttcaggcttatcagacgttgggatgcgcaggcatggcgcgtgtagacgtgtttttaaccccagagaacgaagtggtgatcaacgagatcaacacactgcctggcttcaccaacatcagtatgtatccgaagctgtggcaagccagcggtctgggttacaccgatctgatcacacgtttgattgagctggcgctgaagcgtcacgctgcggataacgcattgaaagccacaatgtaa

SEQ ID NO: 484170 - DNA, 261 bp, Shigella sonnei; identical to SEQ ID NO: 40982

SEQ ID NO: 484171 - DNA, 1416 bp, Shigella sonnei
gtgaaacaaagcactattgcactggcactcttaccgttactgtttacccctgtgacaaaagcccggacaccagaaatgcctgttctggaaaaccgggctgctcagggcgatattactgcacccggcggtgctcgccgcttaacgagtgatcagaccgccgctctgcgtgattctcttagcgataaacctgcaaaaaatattattttgctgattggcgatgggatgggggattcggaaattactgccgcacgtaattatgccgaaggtgcgggcggcttttttaaaggtatcgatgccttaccgcttaccgggcaatacactcactatgcgctgaataaaaaaactggcaaaccggactacgtcaccgactcggctgcatcagcaaccgcctggtcaaccggtgtcaaaacctataacggcgcgctgggcgtcgatattcacgaaaaagatcacccaacgattctggaaatggcaaaagccgcaggtctggcgaccggtaacgtttctaccgcagagttgcaggatgccacgcccgctgcgctggtggcacatgtgacttcgcgcaaatgctacggtccgagcgcgaccagtgaaaaatgtccgggtaacgctctggaaaaaggcggaaaaggatcgattaccgaacagctgcttaacgctcgtgccgacgttacgcttggcggcggcgcaaaaacctttgctgaaacggcaaccgctggtgaatggcagggaaaaacgctgcgtgaacaggcacaggcgcgtggttatcagttggtgaacgatgctgcctcactgaattcggtgacggaagcgaatcagcaaaaacccctgcttggcctgtttgctgacggcaatatgccagtgcgctggctagggccgaaagcaacgtaccacggcaatatcgataagcccgcagtcacctgtacgcctaatccgcaacgtaatgacagtgtaccaaccctggcacagatgaccgacaaaaccattgaattgttgagtaaaaatgagaaaggatttttcctgcaagttgaaggtgcgtcaatcgataaacaggatcacgctgcgaatccttgtgggcaaattggcgagacggtcgatctcgatgaagccgtacaacgggcgctggaattcgctaaaaaggagggtaacacgctggtcatagtcaccgctgatcacgcccacgccagccaggttgttgcgccggataccaaagcgccgggcctcactcaggcgctaaatactaaagatggcgcagtgatggtgatgagttacgggaattccgaagaggattcacaagaacataccggcagtcagttgcgtattgcggcgtatggtccgcatgccgccaatgttgttggactgaccgaccagaccgatctcttctacaccatgaaagccgctctggggctgaaataa

SEQ ID NO: 484172 - DNA, 321 bp, Shigella sonnei
atgaaaataacattactggttaccttgctttttggtctggtttttttaaccaccgtcggcgctgccgagagaaccttaaccccacaacaacagcgtatgacctcctgtaatcagcaggcgacggcgcaggcgttgaaaggggatgctcgtaagacctacatgagtgattgcctgaagaacagcaagtctgcgcctggtgaaaaaagtttgacgccacagcagcaaaagatgcgcgaatgtaataatcaagcaacgcaacaatctctgaaaggtgatgatcgtaataagtttatgagtgcctgcctcaagaaagccgcctga

SEQ ID NO: 484173 - DNA, 852 bp, Shigella sonnei
atgttcccaaaaataatgaatgatgaaaactttttcaaaaaagcggcggcgcatggggaggaacctcctttaactcctcaaaacgaacatcagcggtccgggctgcgcttcgcccgtcgcgtcagactaccccgtgcggttggcctggctggcatgttcttaccgattgcttcaacgctggtttcgcacccgccgccgggctggtggtggctggtgttggtcggctgggcgttcgtctggccgcatttagcctggcagatagcgagcagggccgtcgatccgcttagccgggaaatttacaacttaaaaaccgatgcagtattagcgggaatgtgggtaggcgtaatgggcgtaaacgtgctgccttccaccgctatgttgatgattatgtgtctgaatttgatgggggcaggcggcccccgtctgtttgtcgcgggtctggtgttgatggtggtttcctgccttgtcaccctcgagcttacgggcattaccgtgtcgttcaatagtgcgccgctggaatggtggctctcccttcccattattgtcgtttatcctctgctgtttggctgggtcagctaccagacggcaaccaaactggcggaacataaacgcaggttgcaggtcatgagtactcgcgacggcatgacgggcgtgtataaccgacgtcattgggaaactatgttacgcaatgaatttgataactgtcggcggcataatcgcgatgcaacgttactgattatcgatatcgaccatttcaagagcatcaacgatacctggggtcatgatgtgggcgatgaagcgattgtggcgcttacccgacagttacaaattaccctgcgcggtagcgggtaa

SEQ ID NO: 484174 - DNA, 1962 bp, Shigella sonnei
atgcggttgtttattgccgaaaaaccgagtctggcgcgcgccattgctgatgtcctgcccaaaccgcaccggaaaggcgatggctttatcgagtgcggtaatggtcaggtggtgacctggtgtatcggtcacctgcttgagcaggcgcagccagacgcctacgacagccgctatgcgcgctggaatcttgcggatttgccgattatcccggaaaagtggcaattacagccccgaccctccgtgaccaaacaacttaacgtcatcaaacgcttcctgcatgaagccagcgaaatcgttcacgccggggacccggatcgtgaagggcaactgctggtggatgaagtgctggactatctgcaactggcaccggaaaagcgccagcaggtgcagcgttgcttgataaacgacctgaacccgcaggcggttgagcgggcgctcgaccgtcttcggtccaacagtgagtttgtgccattgtgcgtttctgcgctggcgcgagcgcgtgccgactggctgtacggcatcaatatgacccgtgcgtataccattctcggtcgcaatgccggttatcagggcgtactttccgtgggacgcgtgcagacacccgtgctcgggctggtggtgcgccgcgatgaagagattgaaaacttcgtggcgaaagacttctttgaagtcaaagcacatatcgtgacacctgccgatgagcggtttaccgctatctggcaaccgagcgaagcgtgtgaaccgtaccaggatgaagaagggcgcttgttacatcgtccactggcggagcatgtggttaaccgcattagtggtcaaccagcaattgtcaccagctataacgataaacgggaatcagaatccgcgccgctgcctttttcgctttcggcgttgcagattgaagcggcaaaacgctttggtctgagcgcgcagaacgtgcttgatatctgccagaagctgtacgaaacgcacaagctaatcacttatccgcgttccgattgtcgctatttgccagaagaacattttgccggacgccacgcggtgatgaatgccatcagcgttcatgcaccagatctgttgctgcagccagtggtagatccagatatacgcaaccgctgttgggatgacaaaaaggtcgatgcacaccacgccatcatcccgaccgcacggagttcagccatcaacctgacggagaacgaagcgaaggtctataacctgattgcccgtcagtacttgatgcagttctgcccggatgtggtgttccgcaagtgtgttatcgaactggacattgccaaaggcaaatttgtcgctaaagcgcgttttcttgctgaagcaggctggcgcacgctgttaggcagcaaagagcgcgatgaagaaaacgacggtacgccattgcctgtggtggcgaaaggcgatgagttgctgtgtgaaaaaggtgaagtggtagagcggcaaacccagccgccgcgccattttaccgatgcaacactgctttcggcgatgaccgggatcgcgcgctttgtgcaggacaaagatctgaaaaagatccttcgtgcgaccgatggtctggggacagaagcaacccgtgccgggattattgaactgctgttcaagcgtggttttctgacccaaaaagggcgctatatccactctaccgacgccggaaaagcgttattccattcgctgccagaaatggcgacgcgaccggacatgaccgcgcactgggaatcggtgctgacgcaaatcagcgaaaagcagtgtcgctatcaggactttatgcagccgctggtggggacgctatatcagcttattgatcaagccaaacgtacgccggtgcggcagtttcgcggcattgtggctccgggcagtggtggcagtgctgataagaaaaaggctgcaccgcgtaaacgtagtgcgaaaaaaagtccgccagcagatgaagtcggaagcggggcgatagcgtaa

SEQ ID NO: 484175 - DNA, 1044 bp, Shigella sonnei
atgagcgagaactcgattcgtttgacccaatacagccacggagctggttgcggctgtaaaatttccccaaaagtgttggaaaccatcctgcacagtgagcaggcgaagtttgttgatccgaatttgcttgtgggtaatgagacccgcgacgatgcggcggtgtacgatctgggcaatggcaccagcgttatcagtaccaccgacttctttatgccgatcgttgataatcctttcgattttggccgcattgcggcgactaacgccatcagcgatatcttcgcgatggggggcaaaccgattatggcgattgcgatcctcggctggccgattaacaaactttccccggaaattgcccgcgaagtaaccgaaggtggacgctatgcatgccgtcaggcgggtattgcgctggctggcggtcactccatcgatgcgccggagccgatttttggtctggcggtaacggggatcgtaccgaccgagcgggtgaagaaaaacagtaccgcacaagccggatgcaaactgttcctgacgaaaccgctggggatcggcgttcttaccacggctgagaaaaaatcactgctgaaaccagaacatcagggactagcgacggaagtgatgtgccggatgaacatcgcaggcgcgtcctttgccaacatcgaaggcgtaaaagcgatgaccgacgttacgggttttggtctgctgggccatttgagcgaaatgtgtcagggcgcaggtgtgcaggcgcgcgttgactatgacgcgatcccaaaattgccgggggttgaagagtacattaagttgggcgcagtgcctggcggcaccgaacgtaactttgccagctacggtcatctgatgggtgaaatgccgcgtgaagtgcgcgatttgctgtgcgatccgcaaacttctggcggtttgctgctggcggtcatgccggaagcagaaaatgaggtcaaagctacagccgccgagtttggcattgaactgacggcaattggcgaactggtgccagcgcgcggcggtcgtgccatggttgagattcgttaa

SEQ ID NO: 484176 - DNA, 552 bp, Shigella sonnei
atggatgcactcgaactattgatcaatcgccgtagcgcctcccgcctggctgaacccgcgccaacgggtgaacaactgcaaaacatcctgcgtgcgggtatgcgtgcgccggaccataagtccatgcaaccgtggcatttttttgtgattgaaggggaagggcgcgagcgtttcagcgccgtactggaacagggggcgattgctgccggtagtgatgacaaagctatcgacaaagcccgtaatgcgccgttccgcgcaccgctcatcatcacggtggtggcgaaatgcgaagaaaatcataaagtcccgcgatgggaacaggaaatgtctgccggatgcgcggtcatggcgatgcaaatggcagccgttgcccagggatttggcggcatctggcgcagtggcgcattaactgaaagtccggtagtgcgtgaagcattcggttgccgtgagcaggataaaattgtcggttttctctacctcggcacgccgcagttgaaagcatctacgtcgattaacgtcccggacccgacgccgtttgtaacttatttctga

SEQ ID NO: 484177 - DNA, 1857 bp, Shigella sonnei
atgcgaaccctttggcgatttattgccggattttttaaatggacgtggcgtctgctgaatttcgtccgtgaaatggtacttaacctgttctttattttcctcgtactggttggtgtggggatctggatgcaggtcagtggtggtgattcgaaagaaacggccagtcgtggcgcactgctgctggacatttctggtgtgatcgtcgataaacccgacagttctcagcggtttagtaaattaagccgccagctgcttggtgccagttccgatcgtctgcaggaaaactcactgtttgatatcgtcaacaccattcgccaggcgaaggacgaccgcaatatcaccggtatcgtgatggatctgaaaaacttcgcaggcggcgaccagccgtctatgcagtacatcggcaaagccctgaaagagtttcgtgacagcgggaaaccggtttatgccgttggcgagaactacagccaggggcaatattatctcgccagtttcgccaataaaatttggctgtcaccgcaaggcgtggtggatttgcacggttttgctaccaacggtctgtactacaaatcgttgctggataagctgaaagtttccacccatgtgttccgcgtgggtacgtataaatctgccgttgaaccgtttattcgtgatgacatgtcaccggcagcccgcgaagctgacagccgctggattggtgagctgtggcaaaactatctgaatactgttgccgctaaccggcagatccctgctcagcaggtattccctggcgcgcaagggttgcttgagggtttaaccaaaaccggtggcgataccgcgaaatatgcactggaaaacaagctggtcgatgcactggcatcgagtgccgaaatcgaaaaagctctaaccaaagagttcggctggagtaagactgataaaaattatcgcgccatcagttattacgattacgcattgaaaacgccggcagataccggtgacagcatcggtgtcgtcttcgctaatggcgcaattatggatggcgaggaaactcaggggaatgttggcggtgataccactgcggcacaaatccgcgacgctcgccttgacccgaaagtgaaagcgattgtcctgcgtgttaatagcccaggcggcagcgttaccgcgtctgaagtgattcgcgctgaactggcagcagcccgggcagcgggtaagcctgtggttgtatcgatgggcggcatggcggcatctggtggttactggatttccacgccagctaattacattgtggctaaccccagcaccctgaccggttctatcggtatcttcggcgtgatcaccaccgtagaaaatagtctggattcgattggtgttcatactgatggtgtctcaacttcaccgctggcggatgtttctatcaccagggcactgccgccggaagcgcagcagatgatgcaattaagcattgagaatggctataaacgctttatcacgctggttgctgatgcgcgtcattcgacgccggagcagattgataaaatcgcccagggccacgtctggaccggtcaggatgcaaaagctaacgggctggtcgatagtctcggggatttcgatgatgcggtcgccaaagcagcagagctggcaaaagtgaaacagtggcatctggaatactacgttgatgaaccgaccttcttcgacaaagtgatggacaacatgtctggttctgtccgggcaatgttgccagatgcgttccaggccatgttacctgcaccgcttgcctcggtagcctctaccgttaaaagtgaaagcgacaagctggccgcgtttaacgacccacaaaaccgttatgcgttttgcctgacctgcgccaacgtgcgttaa

SEQ ID NO: 484178 - DNA, 1017 bp, Shigella sonnei
atgcaaaagaaatcaatttacgtcgcctacacgggcgggaccatcgggatgcagcgttccgagcagggttatattccggtgtcaggtcatctacaacgccaactggcgctgatgccggaattccatcgcccggagatgccagatttcaccattcatgaatatacgccgctgatggattcttctgatatgacgccagaagactggcagcatattgctgaagatattaaagcgcactatgacgactatgatggttttgtcatcctgcacggcaccgacacgatggcgtatactgcctctgcgctgtcgttcatgctcgagaatctcggtaaaccggtcattgtgacagggtcacaaatcccgctggctgagttacgctctgacggacaaattaatctgctgaatgcgttgtacgttgcggcgaattatccgatcaacgaagtaacgctctttttcaataaccgattgtatcgcggcaaccgcactaccaaagcccatgccgatggttttgatgcgtttgcctctccaaaccttcctccgttactggaagctggtatccatattcgtcgtttgaatacgccacccgccccgcacggtgaaggggaattaatcgttcatccaatcacgccacaaccaattggcgtagtgacgatttatccagggatttctgctgacgtcgtgcgcaattttctgcgccaaccggtgaaagcattgattctgcgctcctatggcgtgggtaatgcgccacaaaacaaagccttcctgcaggaattacaagaagccagcgatcgcggtattgtggtggtcaacctgacacaatgtatgtccggtaaagtgaatatgggtggttatgccaccggtaacgccctcgcccatgccggcgttattggcggtgcagatatgactgtagaagccacgctaaccaaactgcattacctgctgagccaggaactggatactgaaaccattcgcaaggccatgagccaaaacctgcgcggcgaactgacgccggatgattaa

SEQ ID NO: 484179 - DNA, 642 bp, Shigella sonnei
atgccccctcgcgccctgttactggtcgatttacaaaatgatttctgtgctggtggcgcgctcgccgtgccggaaggtgacagtacggtggatgtcgctaaccgcctgattgactggtgccagtcgcgcggtgaagcggttatcgccagtcaggactggcacccggcgaatcacggcagttttgccagtcagcacggtgtagagccttatacgccaggccaactcgacggtttgccacaaaccttctggccagatcactgtgtgcagaacagtgaaggcgcacaattacatccgttactgaaccaaaaagcgatcgcagcggtgttccataaaggcgaaaatcctttagttgacagttacagtgccttttttgataacggccgtcggcagaaaacctcgctcgatgactggttacgcgatcatgaaatcgatgaattgatcgttatgggcctggctactgactattgcgtgaagtttaccgtgctggacgcgttacagttaggttataaggtaaatgtgattaccgatggttgtcgtggcgtgaatatccagccccaggacagtgcgcacgcgtttatggagatgtcagcagctggggcaacgctatatacgctggcagactgggaagagacacaggggtaa

SEQ ID NO: 484180 - DNA, 273 bp, Shigella sonnei
atgaatcttgatgacattatcaacagcatgacgcctgaggtataccagcgtttgtcgaccgccgttgaactggggaaatggcccgatggcgttgcgttgaccgaggaacaaaaagcgaactgcctgcaactggtgatgctgtggcaagctcgccataataccgaagcacagcatatgacaattgacacaaatggtcagatggtcatgaagagcaaacagcagttaaaagaagattttggtatctcagcaaagcctattgctatgtttaagtga

SEQ ID NO: 484181 - DNA, 414 bp, Shigella sonnei
atggctaataaaccttcggcagaagaactgaaaaaaaatttgtccgagatgcagttttacgtgacgcagaatcatgggacagagccgccatttacgggtcgtttactgcataacaagcgtgacggcgtatatcactgtttgatctgcgatgccccgctgtttcattcccaaaccaagtatgattccggctgtggttggcccagtttctacgaaccggtgagtgaagaatccattcgttatatcaaagacttgtcacatggaatgcagcgcatagaaattcgttgcggtaactgtgatgcccatctggggcatgtcttccctgacgggccgcagccaacgggcgaacgttattgtgttaactctgcttctttacgcttcactgatggcgaaaacggcgaagaaatcaacggttga

SEQ ID NO: 484182 - DNA, 996 bp, Shigella sonnei
atgactatcaaagtaggtatcaacggttttggccgtatcggtcgcattgttttccgtgctgctcagaaacgttctgacatcgagatcgttgcaatcaacgacctgttagacgctgattacatggcatacatgctgaaatatgactccactcacggccgtttcgacggtaccgttgaagtgaaagacggtcatctgatcgttaacggtaaaaaaatccgtgttaccgctgaacgtgatccggctaacctgaaatgggacgaagttggtgttgacgttgtcgctgaagcaactggtctgttcctgactgacgaaactgctcgtaaacacatcaccgctggtgcgaagaaagtggttatgactggtccgtctaaagacaacactccgatgttcgttaaaggcgctaacttcgacaaatatgctggccaggacatcgtttccaacgcttcctgcaccaccaactgcctggctccgctggctaaagttatcaacgataacttcggcatcatcgaaggtctgatgaccaccgttcacgctactaccgctactcagaaaaccgttgatggcccgtctcacaaagactggcgcggcggccgcggcgcttcccagaacatcatcccgtcctctaccggtgctgctaaagctgtaggtaaagtactgccagaactgaatggcaaactgactggtatggcgttccgcgttccgaccccgaacgtatccgtagttgacctgaccgttcgtctggaaaaagctgcaacttacgagcagatcaaagctgccgttaaagccgctgctgaaggcgaaatgaaaggcgttctgggctacaccgaagatgacgtagtatctaccgatttcaacggcgaagtttgcacttccgtgttcgatgctaaagctggtatcgctctgaacgacaacttcgtgaaactgatatcctggtacgacaacgaaaccggttactccaacaaagttctggacctgatcgctcacatctccaaataa

SEQ ID NO: 484183 - DNA, 885 bp, Shigella sonnei
atgattaagaaaatttttgcccttccggtcatcgaacaaatctcccctgtcctctcccgtcgtaaactggatgaactggacctcattgtggtcgatcatccccaagtaaaagcctcttttgcattacagggcgcacaccttctctcgtggaaacctgcgggtgaagaagaagttctgtggttgagcaacaacacaccgttcaaaaatggcgtcgctattcgcggtggcgtaccggtttgctggccgtggtttggtccggcggcacaacaaggtctgcctgcgcacggttttgcccgcaacctgccgtggacgctgaaatcacataatgaagatgctgatggcgtagcgctgacttttgaattgacgcaaagcgaagagacgaaaaaattctgtccgcacgactttacgctgttagcgcatttccgcgtgggtaaaacctgtgaaatcgatcttgaatcacatggcgaatttgaaaccacctctgccctgcatacctactttaacgtgggtgatatcgctaaggtaagcgtcagtgggctgggcgatcgcttcattgataaagtgaatgacgcgaaagaagatgtactgaccgacggtattcagaccttccctgaccgtaccgatcgcgtgtatctgaatccgcaagattgcagcgtgattaatgatgaagcgctgaatcgtattatcgccgtaggccaccagcatcatctgaacgttgtaggctggaacccgggaccggcgctttcaattagcatgggcgatatgccggatgatggctacaaaacatttgtttgtgtagaaacggcttacgcttcagaaacgcaaaaagtcaccaaagagaaacctgcacatctggcgcaatccattcgcgttgcgaaacgttaa

SEQ ID NO: 484184 - DNA, 855 bp, Shigella sonnei
atgcaacaaaaaatgattcaatttagtggcgatgtctcactgccagccatagggcagggaacatggtatatgggcgaagatgccagtcagcgcaaaacagaagttgctgcactacgcgcgggcattgagctcggtttaaccctcattgataccgccgaaatgtatgccgatggcggtgccgaaaaggtggttggggaagcattaaccggtctgcgtgataacgtctttctcgtctctaaagtctatccgtggaatgctggcgggcaaaaagcgataaatgcatgcgaagccagtttacgccgtctcaatactgattatctcgatctctacttattacacaggtctggcagtttcgcttttgaagagactgttgcagcgatggaaaaattgatcgcccagggaaaaatccgccgctggggcgtttctaaccttgattatgctgatatgcaggaactctggcagctgccggggggaaatcagtgtgccactaatcaggtgctttaccatctcggttcacgagggattgagtacgatctactcccctggtgccagcaacagcagatgccggtgatggcttacagtccattagcccaggccgggcggttgcgcaatggactgttaaaaaacgcggtagtcaacgaaattgcacatgctcacaatatcagctcggcacaagtattgttggcgtgggtaatcagccatcagggtgtgatggcgattccaaaagcggccacgattgcccatgttcaacagaatgcggctgtgcttgaggtcgaactttcgtcagcggaattaaccatgctggataaagcgtatccggcaccaaaaggaaaaactgcgctggatatggtgtga

SEQ ID NO: 484185 - DNA, 747 bp, Shigella sonnei
gtgaccaaactcaaacttctggcacttggagtgcttatcgcaacgtctgcaggcgtagcgcacgctgaaggtaaattttccctgggcgcaggcgtcggtgtcgttgaacacccatataaagattacgataccgatgtttacccagtaccggtaatcaactatgaaggcgataacttctggttccgtggcttaggtggtggttactacctgtggaatgacgcaacggacaaactttcaattaccgcttattggtcgccgctttacttcaaagcgaaagacagtggcgatcaccaaatgcgtcacctggatgaccgtaagagcaccatgatggctggtctgtcttatgctcactttacccagtacggttacctgcgtaccaccctggctggcgataccctggataacagcaacggcattgtctgggatatggcctggttgtatcgttacaccaacggcggcctgacagtgaccccgggtatcggtgtgcagtggaacagcgaaaaccagaacgaatactattatggcgtatcgcgcaaagagtccgctcgcagcggtctgcgtggctataacccgaacgacagctggagcccttacctggagctgagcgccagctacaacttcctcggcgactggagtgtttacggtaccgcgcgctatacccgtctgtctgatgaagttactgacagcccgatggtggataaatcctggactggcctgatttctaccgggatcacctacaaattctga

SEQ ID NO: 484186 - DNA, 1935 bp, Shigella sonnei
atgaatatattcgatcactatcgccagcgatatgaagctgccaaggacgaagagttcacactgcaggagtttcttaccacttgtcggcaagatcgcagtgcttatgccaacgcggctgagcggctattgatggctatcggtgagcctgtcatggtcgatacagcccaggaacccagactttctcgactcttttctaaccgggtcattgcacgttatccggcatttgaagagttttacggcatggaagacgcgattgaacagattgtctcttatctgaaacacgcggctcaggggctggaagagaagaaacaaatcctgtatctgctggggcctgtgggtgggggtaaatcatcgcttgctgagcgactgaaatcattaatgcagctcgtaccgatttatgtattgagcgccaacggtgagcgtagcccggtcaacgatcatccgttctgtcttttcaatccgcaggaagatgcgcagattctggaaaaagagtatggcattcctcgccgctatctcggcaccatcatgtcgccgtgggcggcaaaacgcctgcatgaatttggtggcgatatcactaagttccgggtagtgaaggtctggccgtcaattctgcaacaaattgctatcgccaaaacagaacccggtgatgagaacaaccaggacatctccgcgctggtagggaaagtcgatattcgtaaactcgaacactacgcgcagaatgacccggacgcctacggctattccggtgcgctgtgccgcgccaatcaggggatcatggaatttgtcgagatgtttaaagcaccgattaaagtgctgcatccgctgttaaccgctactcaggaaggtaactacaacgggacggaaggtatctccgccctgccgttcaacgggattattctcgcccactcgaacgaatccgaatgggtcactttccgtaataacaaaaacaacgaagccttcctcgaccgtgtttacatcgtgaaggtgccgtattgcttacgcatttccgaagagatcaaaatctacgagaaattgcttaatcacagtgaattgactcacgccccatgcgcccctggcacgctggaaacactgtcacgtttttccattctttcgcgcctgaaagagccagaaaactccagcatttattcaaagatgcgggtttatgatggcgaaagtctgaaagacaccgatcccaaagccaagtcgtatcaggaatatcgtgactacgccggtgtcgatgaagggatgaaaggtctgtcgacgcgttttgcgtttaagatcctctcccgcgtgttcaacttcgatcatgtagaagtggcggcaaacccggtccatctgttctacgtcctagaacagcagatcgagcgcgagcagttcccgcaagagcaggcagaacgctatctggagttcctgaaaggttatctgatcccgaaatatgccgagtttatcggcaaagagatccagacggcctaccttgaatcctattccgaatatgggcaaaacattttcgaccgttatgttacctacgcggatttctggattcaggatcaggagtatcgcgatccggataccgggcagctgtttgaccgcgagtctcttaacgccgagctggagaaaatcgagaaaccggcggggatcagtaatccaaaagatttccgcaacgagattgttaacttcgtactgcgcgccagagcgaataacagcggacgcaatccgaactggaccagctatgaaaaactgcgcacggttatcgagaagaaaatgttctccaataccgaggagctgttgccggttatctcgtttaacgccaaaacgtcaaccgacgagcagaagaaacacgacgactttgtcgaccgtatgatggaaaaaggctacacccgtaaacaggtgcgtttactgtgcgaatggtatttgcgcgtacgtaaatcgtcttaa

SEQ ID NO: 484187 - DNA, 1284 bp, Shigella sonnei
atgaccgggtttattgaccggcgtctgaacggcaaaaacaaaagcatggtgaatcgccagcgttttttacgccgttataaagcgcaaattaaacagtcgatctccgaggccattaataagcgttcggtgactgacgtcgacagcggcgaatccgtatccattcccacggaagatattagcgaaccgatgtttcatcaggggcgtggcggcctgcgccaccgcgtacatccgggcaatgaccatttcgtccagaacgaccgaattgaacgtccccagggtggcggcggaggttccggcagtggtcagggccaggccagccaggatggtgaaggtcaggatgaatttgtctttcagatttcgaaagatgagtatcttgatctgctctttgaagatttggccttaccgaatctgaaacaaaaccaacaacgccagctgaccgaatataaaacgcatcgggcgggttataccgctaacggcgttccagccaatatcagcgttgtgcgttccttgcagaactcactggcgcgacgcacagccatgacggcgggcaagcgacgggaacttcatgcgctggaagagaatttggccatcatcagcaacagtgaacctgcgcaactgctggaagaggaacgtctgcgcaaagaaattgcagaattacgtgccaaaattgaacgcgtcccttttattgacaccttcgatttacgttacaagaactacgagaagcggcccgatccctccagccaggcagtgatgttttgcctgatggacgtttccggttcaatggatcaatccactaaagatatggctaagcgtttttatattctgctgtatctgttcctcagcagaacgtataagaacgtggaagtcgtatacatccgccatcatacccaggcgaaagaagtcgatgaacatgagtttttctactcgcaggaaacaggcggcaccattgtttccagcgccctgaaactgatggatgaggtagtgaaagagcgttataacccggcacagtggaatatttacgctgcacaagcatcggacggcgataactgggccgatgactctccgctttgccatgaaatcctggcgaaaaaattattacctgttgttcgttattacagctatatcgaaattacccgtcgtgcacatcagacattgtggcgagaatatgagcatctgcaatctactttcgacaactttgcgatgcagcacatccgcgaccaggatgatatttatccggtgttccgtgaactgtttcataaacaaaatgcaacagctaaagactaa

SEQ ID NO: 484188 - DNA, 1476 bp, Shigella sonnei
atgattcagtcaacacgtatttccatggggttattctttaaatattttttatcgttaacgaaaattgatcctagtcaaaactatatatctctgccatcaataaaatccagcactcacattgctctcctttttatggtttctatgggtacacaaaaattaaaagctcaaagcttttttattttcagtttattgctgacgttaattttattttgcattactaccttatataacgaaaacacaaatgtaaaactcatcccacagatgaattacctgatggttgttgtggctttgtttttccttaacgccgtcatttttcttttcatgttaatgaaatatttcactaacaaacaaattttaccaacactcattttaagccttgcatttttaagtggccttatctatttagttgaaaccattgtaattatccataaaccaattaacggcagtacactgatccagacaaagtcgaatgatgtttctattttctatattttccgccaactcagttttatttgtttaacctcgctggcactcttttgttatggaaaagacaacatccttgacaacaataagaaaaaaacgggaatcctgttgctggcgctgattccttttttagtttttccccttctggcacacaatctgagcagttataacgctgactattctttgtatgtcgtcgactactgtccggacaaccatactgcgacctggggaatcaactatacaaaaatattggtttgtctgtgggcatttttactgttctttattatcatgcgtacacgattagccagcgaactatggccgttaatagcattattatgtctggcatcgctatgctgcaacttacttctactgactctggatgagtataattacaccatctggtatatcagtcgcgggattgaagtttccagtaaactgtttgttgtgtcttttctgatttataacatttttcagaaactgcaactctccagcaaactggcagttcatgatgtgctgaccaatatttataatcggcgctactttttcaacagcgtagagtcattattgtcgagacctgttgttaaggacttctgtgtcatgctggttgatattaatcagttcaaacgcatcaatgcccaatggggacatcgtgtgggtgataaagtgctggtttcaattgtcgatattatccagcaaagcatccgccccgatgatattttagcgcgactggagggtgaggtgtttggcttgctatttaccgaactcaatagtgcccaggcaaaaatcattgcggaacgtatgcgtaaaaatgtcgaactcctgaccggctttagtaacagatatgatgttcctgaacaaatgaccatcagtattggcacggttttttcaacgggtgacacgcgtaatatctcgcttgtcatgacggaagcagataaagccttacgcgaagcgaaaagcgaggggggcaacaaagtgattattcatcatatttaa

SEQ ID NO: 484189 - DNA, 807 bp, Shigella sonnei
atggaacgctacgaatctctgtttgcccagttgaaggagcgcaaagaaggcgcattcgttcctttcgtcacgctcggggatccgggcattgagcagtcattgaaaattatcgatacgctaattgaagccggtgctgacgcgctggagttaggcatccccttctccgacccactggcagatggcccgacgattcaaaacgccactctgcgcgcctttgcggcaggtgtgactccggcacaatgttttgaaatgctggcactgattcgccagaaacacccgaccattcccattggcctgttgatgtatgccaatctggtgtttaacaaaggcattgatgagttttatgcccagtgcgagaaagtcggcgtcgattcggtgctggttgccgatgtgccaattgaagagtccgcgcccttccgccaggccgcgttgcgccataatgtcgcacctatcttcatctgcccgccaaatgccgatgacgacctgctgcgccagatagcctcttacggtcgtggttacacctatttgctgtcacgagcgggcgtgaccggcgcagaaaaccgcgccgcgttacccctcaatcatctggttgcgaagctgaaagagtacaacgctgcacctccattgcaggggtttggtatttccaccccggatcaggtaaaagcagcgattgatgcaggagctgcgggcgcgatttctggttcagccattgttaaaatcatcgagcaacatattaatgagccagagaaaatgctggcggcactgaaagtttttgtacaaccgatgaaagtggcgacgcgcagttaa

SEQ ID NO: 484190 - DNA, 1194 bp, Shigella sonnei
atgacaacattacttaacccctattttggtgagtttggcggcatgtacgtgccacaaatcctgatgcctgctctgcgccagctggaagaagcttttgtcagcgcgcaaaaagatcctgaatttcaggcccagttcaacgacctactgaaaaactatgccgggcgtccaaccgcactgaccaaatgccagaacattacggctggcacgaacaccacgctgtatctgaagcgcgaagatttgctgcacggcggcgcgcataaaactaaccaggtgctcggtcaggctttactggcgaagcggatgggtaaaaccgaaatcatcgccgaaaccggtgccggtcagcatggcgtggcgtcggcccttgccagcgccctgctcggcctgaaatgccgtatttatatgggtgccaaagacgttgaacgccagtcgcctaacgtttttcgtatgcgcttaatgggtgcggaagtgatcccggtgcatagcggttccgcgacgctgaaagatgcctgtaacgaggcgctgcgcgactggtccggtagttacgaaaccgcgcactatatgctgggcaccgcagctggcccgcatccttatccgaccattgtgcgtgagtttcagcggatgattggcgaagaaaccaaagcgcagattctggaaagagaaggtcgcctgccggatgccgttatcgcctgtgttggcggcggttcgaatgccatcggcatgtttgctgatttcatcaatgaaaccaacgtcggcctgattggtgtggagccaggtggtcacggtatcgaaactggcgagcacggcgcaccgctaaaacatggtcgcgtgggtatctatttcggtatgaaagcgccgatgatgcaaaccgaagacgggcagattgaagaatcttactccatctccgccggattggatttcccgtctgtcggcccacaacacgcgtatcttaacagcactggacgcgctgattacgtgtctattaccgatgatgaagcccttgaagccttcaagacgctgtgcctacacgaagggatcatcccggcgctggaatcctcccacgccctggcccatgcgctgaaaatgatgcgcgaaaacccggaaaaagagcagctactggtggttaacctttccggtcgcggcgataaagacatcttcaccgttcacgatattttgaaagcacgaggggaaatctga

SEQ ID NO: 484191 - DNA, 1359 bp, Shigella sonnei
atgcaaaccgttttagcgaaaatcgtcgcagacaaggcgatttgggtagaaacccgcaaacagcagcaaccgctggccagttttcagaatgaggttcagccgagcacgcgacatttttatgatgcgctacagggtgcacgcacggcgtttattctggagtgcaagaaagcgtcgccgtcaaaaggcgtgatccgtgatgatttcgatccggcacgcattgcctccatttataaacattacgcttcggcaatttcggtgctgactgatgagaaatattttcaggggagctttgatttcctccccatcgtcagccaaatcgccccgcagccgattttatgtaaagacttcattatcgacccttaccagatctatctggcgcgctattaccaggccgatgcctgcttattaatgctttcagtactggatgacgaccaatatcgccagcttgcagccgtcgctcacagtctggagatgggggtgctgaccgaagtcagtaatgaagaggaactggagcgcgccattgcattgggggcaaaggtcgttggcatcaacaaccgcgatctgcgtgatttgtcgattgatctcaaccgtacccgcgagcttgcgccgaaactggggcacaacgtgacggtaatcagcgaatccggcatcaatacttacgctcaggtgcgcgagttaagccacttcgctaacggttttctgattggttcggcgttgatggcccatgacgatttgcacgccgccgtgcgccgggtgttgctgggtgagaataaagtatgtggtctgacgcgtgggcaagatgctaaagcagcttatgacgcgggcgcgatttacggtgggttgattttggttgcgacatcaccgcgttgcgtcaacgttgaacaggcgcaggaagtgatggctgcggcaccgttgcagtatgttggcgtgttccgcaatcacgatattgccgatgtggtggacaaagctaaggtgttatcgctggcggcagtgcaactgcatggtaatgaagatcagctgtatatcgatacgctgcgtgaagctctgccagcacacgttgccatctggaaagcattaagcgtcggtgaaaccctgcccgcccgcgagcttcagcacgttgataaatatgttttagacaacggccagggtggaagcgggcaacgtttcgactggtcactattaaatggtcaatcgcttggcaacgttctgctggcggggggcttaggcgcagataactgcgtggaagcggcacaaaccggctgcgccggacttgattttaattctgctgtagagtcgcaaccgggcatcaaagacgcacgtcttttggcctcggttttccagacgctgcgcgcatattaa

SEQ ID NO: 484192 - DNA, 1596 bp, Shigella sonnei
atggctgacattctgctgctcgataatatcgactcttttacgtacaacctggcagatcagttgcgcagcaatgggcataatgtggtgatttaccgcaaccatattccggcgcagaccttaattgaacgcctggcgacgatgagcaatccgatactgatgctttctcctggccccggtgtgccgagcgaagccggttgtatgccggaactcctcacccgcttgcgtggcaagctgcccattattggcatttgcctcggacatcaggcaattgtcgaagcttacgggggctatgtcggtcaggcgggcgaaattcttcacggtaaagcgtcgagcattgaacatgacggtcaggcgatgtttgccggattaacaaacccgctgccggtggcgcgttatcactcgctggttggcagtaacattccggccggtttaaccatcaacgcccattttaatggcatggtgatggcagtacgtcacgatgcggatcgcgtttgtggattccagttccatccggaatccattctcaccacccagggcgctcgcctgctggaacaaacgctggcctgggcgcagcagaaactagagccagccaacacgctgcaaccgattctggaaaaactgtatcaggcgcagacgcttagccaacaagaaagccaccagctgttttcagcggtggtgcgtggcgagctgaagccggaacaactggcggcggcgctggtgagcatgaaaattcgcggtgagcacccgaacgagatcgccggggcagcaaccgcgctactggaaaacgcagcgccgttcccgcgcccagattatctgtttgctgatatcgtcggtactggcggtgacggcagcaacagtatcaatatttctaccgccagtgcgtttgtcgccgctgcctgtgggctgaaagtggcgaaacacggcaaccgtagcgtctccagtaaatctggttcgtccgatctgctggcggcgttcggtattaatcttgatatgaacgccgataaatcgcgccaggcgctggatgagttaggtgtttgtttcctctttgcgccgaagtatcacaccggattccgccacgcgatgccggttcgccagcaactgaaaacccgcaccctgttcaatgtgctggggccattgattaacccggcgcatccgccgctggcgttaattggtgtttatagtccggaactggtgctgccgattgccgaaaccttgcgcgtgctggggtatcaacgcgcggcggtggtgcacagcggcgggatggatgaagtttcattacacgcgccgacaatcgttgccgagctgcatgacggcgaaattaagagctatcaattgaccgctgaagattttggcctgactccctaccaccaggagcaactggcaggcggaacaccggaagaaaaccgtgacattttaacacgcttgttacaaggtaaaggcgacgccgcccatgaagcagccgtcgctgcgaacgtcgccatgttaatgcgcctgcatggccatgaagatctgcaagccaatgcgcaaaccgttcttgaggtactgcgcagtggttccgcttacgacagagttaccgcgctggcggcacgagggtaa

SEQ ID NO: 484193 - DNA, 1563 bp, Shigella sonnei
atgcaaacacaaaaaccgactctcgaactgctaacctgcgaaggcgcttatcgcgacaacccgactgcgctttttcaccagttgtgtgggaatcgtccggcaacgctgctgctggaatccgcagatatcgacagcaaagatgatttaaaaagcctgctactggtagacagtgcgctgcgcattacagcattaggtgacactgtcacaattcaggcactttccggcaacggcgaagccctgctggcactactggataacgccctgcctgcgggtgtggaaaatgaacaatcaccaaactgccgtgtgctgcgcttcccccctgtcagtccactgctggatgaagacgcccgcttatgctccctttcggtttttgacgctttccgtttattgcagaatctgttgaatgtaccgaaggaagaacgagaagcaatgttcttcggcggcctgttctcttatgaccttgtggcgggatttgaagatttaccgcaactgtcagcggaaaataactgccctgatttctgtttttatctcgctgaaacgctgatggtgattgaccatcagaaaaaaaacacccgcattcaggccagcctgtttgctccgaatgaagaagaaaaacaacgtctcactgctcgcctgaacgatcttcgccagcagctgaccgaagccgcgccgccgctgccggtggtttccgtgccgcatatgcgttgtgaatgtaatcagagcgatgaagagttcggtggcgtagtgcgtttgttgcaaaaagcgattcgcgctggagaaattttccaggtggtgccatctcgccgtttctctctgccctgcccgtcaccgctggcggcctattacgtgctgaaaaagagtaatcccagcccgtacatgttttttatgcaggataatgatttcaccctgtttggcgcgtcgccggaaagttcgctcaagtatgacgccaccagccgccagattgagatctacccgattgccggaacacgtccacgcggtcgtcgtgccgatggctcgctggacagagacctcgacagccgcatcgaactggaaatgcgtaccgatcataaagagctttctgaacatctgatgctggtggatctcgcccgtaatgatctggcacgcatttgcacccccggcagcagctacgtcgccgatcttaccaaagttgaccgttactcttacgtgatgcacctggtctcccgcgtggtcggtgagctgcgccacgatctcgacgccctgcacgcttaccgcgcctgtatgaatatggggacgttaagcggtgcgccgaaagtacgcgccatgcagttaattgccgaggcggaaggtcgtcgccgcggcagctacggcggcgcggtaggttatttcaccgcgcatggcgatctcgacacctgcattgtgatccgctcggcgctggtggaaaacggtatcgccaccgtgcaagccggtgctggcgtagtccttgattctattccgcagtcggaagccgacgaaacccgtaataaagcccgcgctgtactgcgcgctattgccaccgcgcatcatgcacaggagactttctga

SEQ ID NO: 484194 - DNA, 882 bp, Shigella sonnei
ttgagcgacacgaattacgcagtgatttacgacctgcacagccataccacagcttccgatggctgcctgacgccagaagtattggtgcaccgtgcagtcgagatgcgcgtcggtaccctggcgatcaccgaccatgacaacacagctgcaatcgtgccagcaagagaggaaatttcacgttcgggactggcgctgaatcttattcccggcgtggaaatttccacggtctgggaaaatcatgaaattcatattgtcgggctgaatattgatattactcatccgctaatgtgtgagttcctcgcgcagcagacagaacggcgcaatcagcgggcgcaactgattgccgaaagacttgaaaaagcgcaaataccaggggcactggaaggcgcgcgacgactggcgcagggcggtgcggtgacgcgcggtcattttgcgcgtttccttgtggggtgcggcaaagccagttcaatggcggatgtctttaaaaaatatctggcgcgcgggaaaaccggatacgttccgccacagtggtgtacaatagaacaagctattgatgtcattcatcattctggcggtaaggcggtgctagctcatcctgggcggtacaatcttagtgctaaatggctgaaaagattggttgcgcattttgccgaacaccacggtgacgcgatggaagtcgcgcagtgccagcaatcgcccaatgaacgtacccagctggcggcccttgcgcgtcagcatcatttatgggcatcacaaggatctgattttcatcagccatgcccgtggatcgaactaggtcgtaaactctggctgcccgcaggcgttgaaggcgtctggcagctatgggaacagccgcagaacaccacagagagggaattatga

SEQ ID NO: 484195 - DNA, 621 bp, Shigella sonnei
atgagccagtttttttatattcatcctgataacccacagcaacgtctgatcaaccaggcggtggagatcgtgcgtaaaggcggggtgattgtttatccaactgattccggctatgcgctcggctgtaaaattgaagataaaaacgcgatggagcgtatttgtcgtattcgccagctgccggacggtcacaactttaccctgatgtgtcgcgatctttctgaactctcgacctattcatttgttgataacgttgcgtttcgtttaatgaaaaacaacacgccgggcaactataccttcatcctgaaggggacgaaggaagtgccacgccgtctgttgcaggaaaaacgcaaaaccatcggtatgcgtgtgccttctaacccgattgcgcaggcgttgcttgaagcactgggcgaaccgatgctttccacttcgctaatgctgccaggcagcgaatttaccgaatccgatcccgaagaaattaaagaccgtctggaaaaacaggtagatttgattattcacggcggctatctcgggcagaaaccgacaacggttattgatcttaccgatgatacgccggtcgtggtgcgtgaaggcgtaggtgatgtgaagcctttcttataa

SEQ ID NO: 484196 - DNA, 624 bp, Shigella sonnei
atggcagggaagtttcgctgcattttgctgttgatagcagggctatttgtatcatctctaagttatgcagaaaacacggagatcccttcttatgaagaagggatttcgctctttgatgttgaagccactctgcaaccggatggggtgctcgacatcaaagaaaatattcattttcaggcgcgaaatcagcagattaaacacggattttatcgtgatttaccacgactctggatgcagcctggtggggacgctgcactgctgaactatcatattgttggcgtcacccgtgatggtattcctgaaccctggcatcatgactggcatatcgggttaatgagtattgtcgtgggcgataaacaacgtttcttgcctcaaggcgactatcattatcaaattcattatcaggttaaaaatgctttcctgcgtgagggagattcagatctgttaatctggaacgtgactggtaaccactggccgtttgaaatctataagacccgattttcactcaagttccctgatatcgcgggtaatccatttagcgaaatcgatctctttactggagaagagggcgacacatatcgaaatggccgcatccttgaggacggaagaattgtttaccactga

SEQ ID NO: 484197 - DNA, 426 bp, Shigella sonnei
atgccagcgggttattttagcgctgttttcctgaccggttatctcactggcatggggtatatttttctgccaaagtttacacaaactgggcagcaacgttatgcccacggtgaagctatcgttaactatcttgcgcgtaaagaggcagcaacacacagtgggcgtcggcggaaaggggaaacacggaaactggattacgcgttgctaggttgggcagtctcagcaaaccttggaagagaatgggtagcacgtatcaccccatcactcacagcggctgttagcgccccggaaattgcccgtagtggcgttttgttttcattacagatgcacctgagtctgggggccaaaaccagtttgttggggcgaagttattccggtggtggtgctggtggcggcgcgggtggcggaggcggtggtggctggtaa

SEQ ID NO: 484198 - DNA, 873 bp, Shigella sonnei
atgagcgaaaaattacagaaagtgctggcccgcgctggccacggctcccgccgtgaaatcgaatctattattgaagccggtcgtgtgagtgttgatggcaaaattgctaaactcggcgatcgcgttgaagttacccctgggctgaaaattcgtatcgatggtcatctgatttcggtacgtgagtccgctgaacaaatttgtcgcgttctggcctattacaaaccggaaggtgagttgtgtacccgtaacgatccggaagggcgtccgacggtgtttgaccgtctgccaaagctgcgtggcgcacgctggattgccgtaggtcgtctggacgttaacacctgtggtctgctgctgttcaccaccgatggtgaactggcaaaccgtttaatgcatccaagccgtgaagttgaacgtgaatacgccgtgcgtgtatttggtcaggttgacgacgcgaaactgcgtgatttgagtcgtggcgtgcaactggaagatggtccggcagcttttaaaaccatcaagttcagcggcggcgaagggatcaaccagtggtacaacgtgactctgaccgaaggccgtaaccgtgaagttcgtcgtctgtgggaagcggttggtgtgcaggtgagccgcctgatccgtgttcgttacggtgatatcccactgccaaaaggtctgccacgcggtggctggacggagctggacctcgcccagactaactatctgcgcgaactggtggagcttccgccagaaaccagctctaaagtcgctgtagaaaaagaccgtcgtcgcatgaaggctaatcagattcgtcgtgcggtgaaacgtcacagtcaggtgagcggcggtcgtcgttctggcgggcgtaataacggttaa

SEQ ID NO: 484199 - DNA, 591 bp, Shigella sonnei
atgagtgatgaacgctaccaacagcgtcagcagcgagtgaaagaaaaagtagatgctcgtgtggcccaggcccaggatgaacgcggtattatcatcgtctttaccggcaatggaaaaggcaaaaccaccgcggcatttggtacggcaacacgcgcagttggtcacggaaaaaaagtgggcgtcgtgcagtttattaaaggcacctggcctaatggcgaacgcaatctgctggagccacatggcgttgagtttcaggtgatggcaacgggctttacctgggatacacaaaaccgcgagtctgataccgccgcctgccgcgaagtctggcaacatgcaaagcggatgcttgctgattcctcactggatatggttttgcttgatgaactgacgtatatggtggcgtatgactatttgccactggaagaagtggtgcaggcgttaaatgaacgtccacatcaacagacggtgattatcacgggtcgaggctgtcatcgggatattcttgaactggcggatacggtaagtgagctgcgccccatcaaacatgcgtttgatgccggtgttaaggcgcaaatagggattgattattaa

SEQ ID NO: 484200 - DNA, 759 bp, Shigella sonnei
atgcattaccagccaaaacaagatttactcaatgatcgcattatcctggtgacgggagccagcgatgggattggtcgtgaagccgcgatgacgtatgcacgctatggtgcgacagtgattctgttgggccgtaatgaagaaaaattacgtcaggtagccagccacataaacgaagaaactgggcgtcagccacagtggtttattctcgatttgctgacctgcacgtccgaaaattgccaacaactggcacagcgcattgtcgttaattatccgcgtctggatggtgttttgcataatgccggattgctcggcgatgtttgcccaatgagcgaacaaaatccgcaggtctggcaggacgtcatgcaggtcaacgttaatgccacctttatgctcacccaggcactgcttcctttattactcaaatcggacgccggttcactggtctttacttcatcaagcgttgggcgtcagggacgagccaactggggtgcatatgcagcgtcgaaatttgccaccgaagggatgatgcaggtactggccgatgaatatcagcagcgcctgcgcgtcaactgcattaacccaggcggtacgcgcaccgcaatgcgcgcaagcgccttcccgaccgaagatccacagaaacttaaaacacccgctgatatcatgccgctctacctctggctgatgggcgatgacagccgccgtaaaaccggcatgacctttgacgcccaaccgggccgtaaaccaggaatttcccaatga

SEQ ID NO: 484201 - DNA, 1050 bp, Shigella sonnei
gtggaattgttgtctgaatatggtttgtttttggcgaaaatcgttaccgttgtgctagcgattgcggcgattgccgccattattgtcaatgttgctcaacgtaataaacgccagcgtggcgagttacgggtcaacaatctcagcgaacagtataaggagatgaaagaagaactggccgcggcgctgatggactcacatcagcaaaaacagtggcacaaagcgcagaagaaaaagcacaagcaagaagcgaaagcagcaaaagcgaaagccaaactgggcgaggtggcaactgacagtaaacctcgcgtctgggtgctggattttaaaggcagcatggacgcccatgaagtgaactcgctacgtgaagagataacggcggtactcgcagcattcaaaccgcaggatcaggttgtgctccgtctggaaagccctggtggcatggtgcatggttacgggttggcggcttcgcagctgcagcgtctgcgtgataaaaacattcctttaactgttacggtagacaaagtcgctgccagcggcggttacatgatggcctgtgtggcggacaaaattgtttccgcaccgtttgctattgtgggttccattggggtggtggcgcaaatgcccaactttaaccgcttcctgaaaagcaaagatattgatatcgaactgcacaccgccgggcagtataagcgcacgctgaccttgctgggtgaaaataccgaagaagggcgggagaaattccgcgaagagctgaacgaaacgcatcagttatttaaagattttgtgaagcgtatgcgtccgtctctggatattgaacaggtggcaacgggtgaacactggtacggacaacaggcggtagagaaaggcctggttgatgaaatcaacaccagtgatgaagttattcttagcctgatggaaggccgtgaagtggttaatgtacgctatatgcagcgtaaacgactcattgaccgattcaccggcagcgcggcagagagcgccgatcgattgttgctacgctggtggcagcggggtcaaaagccattgatgtaa

SEQ ID NO: 484202 - DNA, 252 bp, Shigella sonnei
atgaacaaagagacacaacccatcgaccgcgaaacgctgttgaaagaggccaacaaaatcattcgtgagcatgaggatacgctcgcagggattgaagccaccggcgtcacgcagcgtaatggcgtgctggtatttatcggcgactactttttagatgaacaaggattgccaacagccaaaagcaccgcggtgtttaatatgttcaaacacctggcccatgtgctttcagaaaaatatcatctggttgattaa

SEQ ID NO: 484203 - DNA, 2598 bp, Shigella sonnei
atgggtaaagctcttgtcatcgttgagtccccggcaaaagccaaaacgatcaacaagtatctgggtagtgactacgtggtgaaatccagcgtcggtcacatccgcgatttgccgaccagtggctcagctgccaaaaagagtgccgactctacctccaccaagacggctaaaaagcctaaaaaggatgaacgtggcgctctcgtcaaccgtatgggggttgacccgtggcacaattgggaggcgcactatgaagtgttgcctggtaaagagaaggtcgtctctgaactgaaacaactggctgaaaaagccgaccacatctatctcgcaaccgaccttgaccgcgaaggggaagccattgcatggcacctgcgggaagtgattgggggtgatgatgcgcgctatagccgagtggtgtttaacgaaattactaaaaacgcgatccgccaggcatttaacaaaccgggtgagctgaatattgatcgtgttaatgcccagcaggcgcgtcgctttatggaccgcgtggtggggtatatggtttcgccgctgctatggaaaaagatcgctcgtggtctgtctgccggtcgtgtgcagtcggtggcggttcgcctggtggtcgagcgtgagcgtgaaattaaagcgttcgtgccggaagagttctgggaagtcgatgccagcacgaccacgccatctggtgaagcgttggcgttacaggtgactcatcagaacgacaaaccgttccgtccggtcaacaaagaacaaactcaggctgcggtaagtctgctggaaaaagcgcgctacagcgtgctggaacgtgaagacaaaccgacaaccagtaaacctggcgctccttttattacctctacgctgcaacaagctgccagcacccgtcttggatttggcgtgaaaaaaaccatgatgatggcgcagcgtttgtatgaagcaggctatatcacttacatgcgtaccgactccactaacctgagtcaggacgcggtaaatatggttcgtggttatatcagcgataattttggtaagaaatatctgccggaaagtccgaatcagtacgccagcaaagaaaactcacaggaagcgcacgaagcgattcgtccttctgacgtcaatgtgatggcggaatcgctgaaggatatggaagcagatgcgcagaaactgtaccagttaatctggcgtcagttcgtagcctgccagatgaccccagcgaaatatgactccacgacgctgaccattggtgcgggcgatttccgcctgaaagcacgcggtcgtattttgcgttttgatggctggacaaaagtgatgcctgcgttgcgtaaaggcgatgaagatcgcatcttaccagcagttaataaaggcgatgctctgacgctcgttgaacttacaccagcccagcactttaccaagccgccagcccgtttcagtgaagcatcgctggttaaagagctggaaaaacgcggtatcggtcgtccgtctacctatgcgtcgatcatttcgaccattcaggatcgtggctacgtgcgagtagaaaatcgtcgtttctatgcggaaaaaattggcgaaatcgtcaccgatcgccttgaagaaaatttccgcgagttaatgaactacgacttcaccgcacagatggaaaacagcctcgacctggtggcaaatcacgaagcagagtggaaagctgtactggatcacttcttctcggatttcacccagcagttagataaagctgaaaaagatccggaagagggtggtatgcgcccgaaccagatggttctgaccagcattgactgcccgacttgtggtcgcaaaatggggattcgcacagcgagcaccggggtattccttggctgttctggttatgcgctgccgccgaaagagcgttgcaaaaccaccattaacctggtgccggaaaacgaagtgctgaacgtactggaaggcgaagacgctgaaaccaacgcgctgcgcgcaaaacgtcgttgcccgaaatgcggcacggcgatggacagctatctcatcgatccgaaacgtaagttgcatgtctgtggtaataacccaacctgcgacggttacgagatcgaagagggcgaattccgcattaaaggttatgacggcccgatcgttgagtgtgaaaaatgtggctctgaaatgcacctgaaaatggggcgtttcggtaaatacatggcctgcaccaacgaagagtgtaaaaacacacgtaagattttacgtaacggcgaagtggcaccaccgaaagaagatccggtgccattacctgagctgccgtgcgaaaaatcagatgcttatttcgtgctgcgtgacggcgctgcgggtgttttcctggctgccaacactttcccgaaatcgcgtgaaacgcgtgcgccactggtggaagagctttatcgcttccgcgaccgtctgccggaaaaactgcgttatctggccgatgcgccacagcaggatccggaaggtaataagaccatggttcgctttagccgtaaaaccaaacagcaatatgtctcttcggaaaaagacggaaaggcgactggctggtcagcattttatgttgatggcaaatgggttgaaggaaaaaaataa

SEQ ID NO: 484204 - DNA, 975 bp, Shigella sonnei
atgaaattacaacaacttcgctatattgttgaggtggtcaatcataacctgaatgtctcatcaacagcggaaggactttacacatcacaacccgggatcagtaaacaagtcagaatgctggaagacgagctaggcattcaaattttttcccgaagcggcaagcacctgacgcaggtaacgccagcagggcaagaaataattcgtatcgctcgcgaagtcctgtcgaaagtcgatgccataaaatcggttgccggagagcacacctggccggataaaggctcactgtatatcgccaccacgcatacccaggcacgctacgcgttaccaaacgttatcaaaggctttattgagcgttatccccgcgtttctttgcatatgcaccagggctcgccgacacaaattgctgatgccgtctctaaaggcaatgctgatttcactatcgccacagaagcgctgcatctgtatgaagatttagtgatgttaccgtgctaccactggaatcgggctattgtagtcactccggatcacccgctggcaggcaaaaaagccattaccattgaagaactggcgcaatatccgttggtgacatataccttcggctttaccggacgttcagaactggatactgcctttaaccgcgcagggttaacgccgcgtatcgtcttcacggcaacggatgctgacgtcattaaaacttacgtccggttagggctgggggtaggggtcattgccagcatggcggtggatccggtcgccgatcccgaccttgtgcgtgttgatgctcacgatatcttcagccacagtacaaccaaaattggttttcgccgtagtactttcttgcgcagttatatgtatgatttcattcagcgttttgcaccgcatttaacgcgtgatgtcgttgatgcggctgtcgcattgcgctctaatgaagaaattgaggtcatgtttaaagatataaaactgccggaaaaataa

SEQ ID NO: 484205 - DNA, 276 bp, Shigella sonnei; identical to SEQ ID NO: 484087

SEQ ID NO: 484206 - DNA, 1197 bp, Shigella sonnei
atggctcaagttattaatgatatggatgttccgtcccattcgtttgtttttcatggtacaggtgagagatattttcttatttgtgtggtgaatgtgttgttaacgattataacgctaggtatctatttaccatgggcattaatgaaatgtaagcgttatctctatgctaatatggaagttaacgaacaacgattttcttatgggattaccggtgggaatgtttttgttagttgtcttgtttttgtttttttctatttcgcaatcttaatgacagtgtcagcagatatgccgcttattggctgtgttttgactttgtcactgttggttttgcttatatttatggcagcaaaaggactgcgttatcaggccttgatgaccagtctcaacggcgtaagatttagttttaattgctctatgaaagggttctggtgggtgacctttttcttgccgattttaatggcccttgggatggggactgttttctttatctcgacaaagatgctacatgccaatagttcaagtagcgttattatatctgtggttctgatgacaatagtttgtattgttttcattggtatttttaatggcactttatatagtctggtaatgagttttctctggagtaataccagtttcggtatacatcgtttcaaggtgaaattagatactacatattgtataaaatatgccattctcgcatttttggctttattaccttttctcgctgttgctggttatattatcttcgatcaaatattaaatgagaatgatagttctgggtatgcaaatgatgatattgagaatttacagcaatttatggaaatgcaacgtaaaatgataatcgcgcagttaatctattattttgggattgctgttagcaccagttatttaacggtgtcgttgcgaaatcattttatgagcaacctgtcactgaatgatgggcgtattcgttttcgctcaactttaacataccacggtatgctttatcgcatgtgtgcgttggtggtgatatccgggattacgggcggtctggcttatccactgctgaaaatatggatgattgactggcaggcaaaaaatacgtatttgctgggcgatttggatgaccttcctttaatcaataaagaagaacaaccagataaaggattcttagccagtatttcacggggaattatgccttctttaccatttctgtaa

SEQ ID NO: 484207 - DNA, 2856 bp, Shigella sonnei
atggaaaagacatataacccacaagatatcgaacagccgctttacgagcactgggaaaagcagggctactttaagcctaatggcgatgaaagccaggaaagtttctgcatcatgatcccgccgccgaacgtcaccggcagtttgcatatgggtcacgccttccagcaaaccatcatggataccatgatccgctatcagcgcatgcagggcaaaaacaccctatggcaggtcggtactgaccacgccgggatcgctacccagatggtcgttgagcgcaagattgccgcagaagaaggtaaaacccgtcacgactacggccgcgaagctttcatcgacaaaatctgggaatggaaagcggagtccggcggcaccattacccgtcagatgcgccgtctcggcaactctgtcgactgggagcgtgaacgcttcacgatggacgaaggcctgtccaatgcggtgaaagaagttttcgttcgtctgtataaagaagacctgatttaccgtggcaaacgcctggtaaactgggatccgaaactgcgcaccgctatctctgacctggaagtggaaaaccgcgaatcgaaaggttcgatgtggcacatccgctatccgctggctgacggcgcgaaaaccgcagacggtaaagattatctggtggttgcgactacccgtccggaaaccctgttgggcgataccggcgtggccgttaacccggaagatccgcgttacaaagacctgattggcaaatatgtcattctaccgctggttaaccgtcgtattccgatcgttggcgacgaacacgccgacatggaaaaaggcaccggctgcgtgaaaatcactccggcgcacgactttaacgactatgaagtgggtaaacgtcacgcgctgccgatgatcaacatcctgacctttgacggcgatatccgtgaaagcgcccaggtgttcgataccaaaggtaacgaatctgacgtttattccagcgaaatcccggcagagttccagaaactcgagcgttttgctgcacgtaaagcagtcgttgctgcggttgacgcactcggcctgctggaagaaattaaaccgcacgacctgaccgttccttacggcgaccgtggcggcgtagttatcgaaccaatgctgaccgaccagtggtacgtgcgtgccgatgtactggcgaaaccggcggttgaagcggttgagaacggcgacattcagttcgtaccgaagcagtacgaaaacatgtacttctcctggatgcgcgatattcaggactggtgtatctctcgtcagctgtggtggggtcaccgtatccctgcatggtacgacgaagcaggtaacgtttatgttggccgcaacgaagaagaagtgcgcaaggaaaataacctcggtgccgacgttgccctgcgtcaggacgaagacgttctcgacacctggttctcttctgcgctgtggaccttctctaccctaggctggccggaaaacactgacgcactgcgccagttccacccaaccagcgtgatggtatccggcttcgacatcattttcttctggattgcccgcatgatcatgatgaccatgcacttcatcaaagatgaaaatggcaaaccgcaggtgccgttccacaccgtttacatgaccggcctgattcgtgacgacgaaggccagaagatgtccaaatccaagggtaacgttattgacccgctggatatggttgacggtatttcgctgccggaactgctggagaaacgtaccggcaatatgatgcagccgcagctggcggacaaaatccgtaagcgcaccgagaagcagttcccgaacggtattgagccgcacggcaccgatgccctgcgcttcaccctggcggcgctggcgtctaccggtcgtgacatcaactgggatatgaagcgcctggaaggttaccgtaacttctgtaacaagctgtggaacgccagccgctttgtgctgatgaacacggaaggtcaggattgcggcttcaacggtggtgaaatgacgctgtcgctggcggaccgctggattctggcagagttcaaccagaccatcaaagcgtaccgcgaagcgctggacagcttccgcttcgatatcgctgcaggcattctgtatgagttcacctggaaccagttctgtgactggtatctggagctgactaagccggtaatgaacggtggcaccgaagccgaactgcgcggtactcgccatacgctggtgaccgtactggaaggtctgctgcgcctcgcgcatccgatcattccgttcatcacagaaaccatctggcagcgtgtgaaagtactttgcggtatcactgccgacaccatcatgctgcagccgttcccgcagtacgatgcatctcaggttgatgaagccgcactggccgacaccgaatggctgaaacaggcgatcgttgcggtacgtaacatccgtgcagaaatgaatatcgcgccgggcaaaccgctggagctgctgctgcgtggttgcagcgcggatgcagaacgtcgcgtaaatgaaaaccgtggcttcctgcaaaccctggcgcgtctggaaagcatcaccgtgctgcctgccgatgacaaaggtccggtttccgttacgaagatcatcgacggcgcagagctgctgatcccgatggctggcctcatcaacaaagaagatgagctggcgcgtctggcgaaagaagtggcgaagatcgaaggcgaaatcagccgtatcgagaacaagctggcgaatgaaggctttgtcgcccgcgcaccggaagcggtcatcgcgaaagagcgtgagaagctggaaggctatgcggaagcgaaagcgaaactgattgaacagcaggctgttatcgccgcgctgtaa

SEQ ID NO: 484208 - DNA, 483 bp, Shigella sonnei
atgcagcaatatttaaatccaccacaagaagccccatatatgaaaaacgcaacgttctaccttctggacaatgacaccaccgtcgatggcttaagcgccgttgagcaactggtgtgtgaaattgccgcagaacgttggcgcagcggtaagcgcgtgctcatcgcctgtgaagatgaaaagcaggcttaccggctggatgaagccctgtgggcgcgtccggcagaaagctttgtcccgcataatttagcgggagaaggaccgcgcggcggtgcgccggtggagatcgcctggccgcaaaaacgcagcagcagcccgcgcgatatattgattagtctgcgaacaagctttgcagattttgccactgctttcacagaagtggtagacttcgttccttatgaagattctctgaaacaactggcgcgcgaacgctataaagcctaccgcgtggctggtttcaacctgaatacggcaacctggaaataa

SEQ ID NO: 484209 - DNA, 1512 bp, Shigella sonnei
atggagtttagtgtaaaaagcggtagcccggagaaacagcggagtgcctgcatcgtcgtgggcgtcttcgaaccacgtcgcctttctccgattgcagaacagctcgataaaatcagcgatgggtacatcagcgccctgctacgtcggggcgaactggaaggaaaaccggggcagacactgttgctgcaccatgttccgaatgtactttccgagcgaattctccttattggttgcggcaaagaacgtgagctggatgaacgtcagtacaagcaggttattcagaaaaccattaatacgctgaatgatactggctcaatggaagcggtctgctttctgactgaactgcacgttaaaggccgtaacaactactggaaagtgcgtcaggctgtcgagactgcaaaagagacgctctacagtttcgatcagctgaaaacgaacaagagcgaaccgcgtcgtccgctgcgtaaaatggtgttcaacgtgccgacccgccgtgaactgaccagcggtgagcgcgcgatccagcacggtctggcgattgccgccgggattaaagcagcaaaagatctcggcaatatgccgccgaatatctgtaacgccgcttacctcgcttcacaagcgcgccagctggctgacagctacagcaagaatgttatcacccgcgttatcggcgaacagcagatgaaagagctggggatgcactcttatctggcggtcggtcagggttcgcaaaacgaatcgctgatgtcggtgattgagtacaaaggcaacgcgtcggaagatgcacgcccaatcgtgctggtgggtaaaggtttaaccttcgactccggcggtatctccatcaagccttcagaaggcatggatgagatgaagtacgatatgtgcggtgcggcagcggtttacggcgtgatgcggatggtcgcagagctacaactgcctattaacgttattggcgtgctggcaggctgtgaaaacatgcctggcgggcgtgcctatcgtccgggcgatgtgttaaccaccatgtccggtcaaaccgttgaagtgctgaacaccgatgccgaaggccgcctggtactgtgcgacgtgttaacttacgttgaacgttttgagccggaagcggtgattgatgtggcgacgctgaccggtgcctgcgtgatcgcgctgggtcatcatattactggtctgatggcgaaccataatccgctggcccatgaactgattgccgcgtctgaacaatccggtgaccgcgcatggcgcttaccgctgggtgacgagtatcaggaacaactggagtccaattttgccgatatggcgaacattggcggtcgtcctggtggggcgattaccgcaggttgcttcctgtcacgctttacccgtaagtacaactgggcgcacctggatattgcaggaaccgcctggcgttctggtaaagcaaaaggcgcaaccggtcgtccggtagcgttgctggcacagttcctgttaaaccgcgctgggtttaacggcgaagagtaa

SEQ ID NO: 484210 - DNA, 1080 bp, Shigella sonnei
gtgcgggagacgctcaaaagccagctggcgatactcttcatcttgcttttgatcttcttctgtcaaaagttagtgaggatcctcggcgcagcggttgacggcgatattccggcgaatctggtgctctcccttctcgggttgggcgtgccggaaatggcgcagcttatcctgccattaagcctgttcctcgggctgctgatgacgctgggcaaactgtataccgaaagtgaaattacggtaatgcatgcctgcggtctgagcaaagcggtgctggtgaaagcggcaatgatccttgcggtgttcacggcaatcgtcgcggcggttaacgtgatgtgggcgggaccatggtcatcgcgtcatcaggatgaagtgttagcagaagcgaaagcgaaccctggcatggcggcgctggcgcaagggcaattccagcaagcgactaatggcagctcggtgctgttcatcgaaagcgttgacggcagcgatttcaaagatgtgttcctcgcacaaattcgaccaaaaggtaatgcacgtccttctgtggtggtggccgattccggacatttaacccagctgcgcgacggctcccaggtcgtcactctcaaccagggaacgcgcttcgaaggcactgcactgttacgcgatttccgcattacggactttcaggattatcaggcgatcattggtcaccaggcggtggtgctcgacccgaacgataccgaccagatggacatgcgcacattgtggaacactgacaccgatcgtgcccgcgcagaactgaactggcgtatcacgttggtattcaccgtgtttatgatggcacttatggttgtaccgttgagcgtggttaacccgcgtcagggacgcgtactgtcgatgctgccagccatgctgctgtatctacttttcttcctgatccagaccgccctgaaatcgaacggcggtaaaggtaagctggacccgacgctgtggatgtggaccgttaacctgatttatctggctttggcgattgttctcaacctttgggacaccgtgccggtccgccgcctgcgcgccagtttttcgcgtaaaggagcggtgtga

SEQ ID NO: 484211 - DNA, 1083 bp, Shigella sonnei
atgcaaccttttggcgtacttgaccgctatatcggtaaaactattttcaccaccatcatgatgacgctgttcatgctggtgtcgctgtcgggcattatcaagtttgtcgatcagctgaaaaaagccgggcaggggagttacgacgcgttaggcgcaggaatgtataccttgctgagcgtgccgaaagatgtgcaaatcttcttcccgatggcggctctgcttggggcgttgcttggtcttgggatgctggcgcagcgcagcgaactggtggtgatgcaggcttctggttttacccgtatgcaggtggcgctgtcggtgatgaaaaccgccattccgctggtcttgctgacgatggcgattggtgaatgggtcgcgtcgcagggcgagcagatggcgcgtaactaccgtgcgcaggcgatgtacggcggctcgttgctctccactcagcaaggcttatgggcgaaagatggcaacaacttcgtctacattgagcgggttaaaggtgacgaagagttaggtggcatcagtatttatgcctttaacgagaatcgtcgtctgcaatccgtacgttatgccgctaccgcgaagtttgacccggaacataaagtctggcgtctgtcgcaggttgatgaatctgatctgaccaatccgaaacagatcaccggttcgcagacggtgagcggcacctggaaaaccaacctcacgccagacaaactgggcgtggtggcgctggacccggatgcactctccatcagtggtttgcacaactatgtgaagtatctgaagtcgagcggtcaggatgccggacgttatcagctcaacatgtggagcaaaatcttccagccgctatccgtggcggtgatgatgttgatggcgctgtcgttcatctttggcccactgcgtagcgtaccgatgggcgtgcgtgtggtcaccggtatcagcttcggttttgtcttctacgtactggaccagatcttcggcccgctgacgttggtttatggcatcccgccgatcatcggcgcactgttgccaagcgccagcttcttcttaatcagcctgtggctgttaatgagaaaatcgtaa

SEQ ID NO: 484212 - DNA, 1503 bp, Shigella sonnei
atgagcgaacccctgttaattgcccgcacgccggacacagaactgtttttactgccgggaatggctaaccgtcacgggctgattactggcgcaacggggacgggtaaaactgtcacgttgcaaaaactggcagagtcattgtcggaaatcggtgttccggtgtttatggccgatgtgaaaggcgatctgaccggcatcgcgcaggcaggaacggcgtcggaaaaactgctcgcaagactgaaaaatatcggcgtcaacgactggcaaccgcatgccaatccggtggtggtgtgggatatctttggcgagaaaggccatccggtgcgggcgacggtttcggatctggggccgctgttgctggcacgactgttgaatctcaacgatgtgcaatctggcgtgctgaatattatcttccgcattgcggacgatcagggattgttgctgctcgactttaaagatttgcgggcgattacccagtacatcggcgataacgccaaatccttccagaatcagtacggaaatatcagtagcgcatcggttggtgccatccagcgcggattactgtcgctggaacagcaaggcgcagaacacttctttggtgagccgatgctggatatcaaagactggatgcgcaccgatgccaacggtaaaggcgttatcaatatcctcagcgccgagaaactttatcagatgccgaaactgtacgccgccagcctgctgtggatgctttcagagttatatgaacaattgcctgaagcgggcgatctggagaaaccaaaactggtgtttttcttcgacgaagcacatctgctgtttaacgatgcgccacaggtactgctggataagattgagcaggtgataaggcttattcgctcaaaaggcgtgggcgtctggttcgtttcgcaaaacccgtcagatatcccggataacgtgctagggcagctcggtaatcgcgttcaacacgctttgcgtgcttttacgcctaaagatcagaaagcagtgaaggcagcggcgcaaaccatgcgggccaatccggcgtttgataccgaaaaggcaatccaggaactggggaccggcgaggcgttaatctcgtttctcgatgcgaaaggaagtccttcagtggtggaacgggcgatggtgatcgcaccttgttcgcgaatggggccggtgacggaagatgagcgtaatggcctgattaatcactccccggtgtatggcaaatatgaagatgaggtggaccgcgagtccgcctatgagatgctgcaaaaaggctttcaggccagtaccgagcagcaaaataatccccccgtgaaagggaaagaggtggcggtggatgacggtattcttggtggattgaaggatattttgtttggcactaccggaccacgcggcgggaagaaagatggtgtggtgcaaacaatggcgaaaagcgccgctcgccaggtgacgaatcagattgtacgcgggatgttggggagtttgctgggggggagaaaaaggtaa

SEQ ID NO: 484213 - DNA, 999 bp, Shigella sonnei
atgcgcaatcacagaatttctttacaggatatcgctacgctggctggcgtaacaaaaatgaccgtgagtcgttatatccgctcgccgaaaaaggtggcaaaggaaacaggcgagcgcatcgccaaaattatggaagagatcaattatatccctaatcgcgctcccggcatgttgttgaatgcacaaagttataccctcggtatcttgattccgtcatttcaaaatcaactcttcgctgacattctcgcgggaatagaatccgtcacctctgtgcataattatcagacccttattgctaattacaattacgatcgcgattccgaagaagagtcggtgattaacctgctctcttataacattgacgggattattctttcggaaaaatatcacaccatcaggacggtgaaatttctgcgttcagccaccattccggtcgtggaattgatggatgtacagggagaacggctggatatggaggtcggttttgataatcggcaggctgcttttgacatggtgtgtaccatgctggataagcgagtcaggcgcaaaattctgtatctcggttccaaagatgacacccgcgatgaacagcgttatcaggggtattgcgatgcgatgatgctgcataatctttccccattacgcatgaatccacgcgccatctcatccattcatttaggaatgcagttaatgcgtgatgcccttagcgcaaacccggatttagacggtgtattttgcaccaatgacgatattgcgatgggtgcgcttctgctgtgccgcgagcgaaacctcgccgtgccagaacaaatttccattgcgggttttcatgggctggagattggcaggcaaatgatcccaagcctcgccagcgtaattactccccgttttgatattggtcggatggccgcccaaatgttgctgagcaagattaagaataacgatcacaaccacaacactgttgacctcgggtatcagatttatcacggtaacaccctttag

SEQ ID NO: 484214 - DNA, 1320 bp, Shigella sonnei
atgccattaatcattattgcggcaggcgtcgcgctgcttcttatcctgatgatcggctttaaagttaacggctttattgccctcgttctggtagctgccgtcgtcggatttgccgaagggatggatgcacaggccgtcctgcactctatacaaaatggtatcggcagcacgctcggcgggctggcaatgatcctcggtttcggggccatgttaggcaagctgatttctgatacgggcgcggcacaacgtatcgccactacgctgattgctacttttggtaaaaaacgcgtgcaatgggcgctagtgatcaccggtctggttgtgggcctcgccatgttttttgaagtgggttttgtcctgctgttgccgttggtatttaccatcgtggcatcatctggattacccctgttgtatgttggcgtaccgatggtagcagcgctctctgtaacccactgttttctgccgccacatccagggcctactgccatcgcgactatctttgaggctaatctcggaacgactttactgtatggatttatcattaccattccgacagttattgtcgcaggaccgctgttttctaaactgctaactcgctttgagaaagcaccaccggaaggcttatttaatcctcatctgtttagcgaagaggagatgccctccttctggaacagtatttttgctgcagtgatcccggtcatcctgatggctatcgccgccgtttgtgaaattacgttaccgaaaactaacaccgtgcgcctcttctttgaatttgtcggtaaccctgccgttgcgctgtttattgccattgttattgcgattttcacactgggccgacgtaatggacgcaccatcgagcaaatcatggatatcattggggattctataggcgctatcgcgatgattgtgtttattatcgctggcggcggcgcgtttaagcaggtattagtagatagtggtgtcgggcagtatatttcacacttaatgaccggaactacgctttcgccgttattgatgtgctggactgtcgcggcgctgttgcgtatcgctctgggctctgccaccgtcgcggccattaccaccgcgggtgtggtgttgccgattatcaacgttacccatgccgatcccgctttaatggtactggcaactggtgcgggcagcgtgatcgcgtcacacgtaaacgaccctggcttctggctatttaaagggtattttaatctgacggttggtgaaacgttgcgtacctggacagtgatggaaacccttatttctattatgggtttgctgggcgtgttagccattaacgccgtattgcactga

SEQ ID NO: 484215 - DNA, 765 bp, Shigella sonnei
atgaacgatctattttcactggcaggaaaaaatatcttgattaccggttcagcacagggcattggctatttactggcaaccggcctgggtaaatatggcgcacaaataattattaatgatattactgccgaacgcgcagaacttgctgtagaaaaactccaccaggagggtattcaggccgttgccgcaccttttaatgttactcataaacatgaaattgatgccgccgttgaacatatcgaaaaggacatcggccccattgatgtgctggtgaataacgccggtatccagcgccgtcatccttttactgagttccctgaacaagagtggaatgatgtgatcgcagtaaaccagaccgccgtgttcctggtatcgcaagcggtaactcgtcacatggttgaacgcaaggcaggtaaagttattaatatttgctcgatgcaaagcgaactgggacgtgacaccatcaccccttatgccgcatcgaaaggggcggtaaaaatgctcacccgcggcatgtgcgtcgagctggcgcgccacaatattcaggtcaacggtattgcgccgggctatttcaaaacagaaatgactaaagcactggttgaggacgaagccttcaccgcctggttgtgcaaacggacccccgccgcacgctggggagatccgcaggaactgattggtgctgcggtgttcctttcttcaaaagcctctgatttcgtaaacggccacctgttgtttgttgatggcggcatgttagtggctgtttaa

SEQ ID NO: 484216 - DNA, 1032 bp, Shigella sonnei
atgcaagtgaaaacacagtcctgcgttgttgcggacaagaaaactgttgccgttaccgagcagacgatagattggaataataatggaacattagtacaaataacccgaggtggaatttgcggttccgatttacattattatcaggaaggaaaagtaggtaatttcatgataaaggcaccgatggtgttaggtcatgaagttatcggtaaagttattcatagcgactcatcagaattacatgaagggcaaacggtagccattaatccgtctaaaccgtgcggtcactgcaaatactgcattgaacataacgagaatcagtgtacagatatgcgtttttttggcagtgccatgtatttccctcatgttgatggtggttttacccgttataaaatggtcgaaacgtcgcaatgtgtcccttatccggccaaagctgacgaaaaggttatggcttttgccgaacctttagccgtcgcgattcatgccgcacatcaggccgacgagttacagggcaagcgagtatttgtttccggtgttgggcccattggctgcctgattgtcagtgctgtgaaaacactggggtccgcggaaattgtctgtgccgatgtgagtccccgttccctttcgctggccaaagagatgggtgcggatgtgctcgtaaacccacaaaacgacgacatggatcactggaaagcggaaaaaggccatttcgatgtcagctttgaagtgtccggtcatccttcatcagtgaatacctgtctggaggtcactcgtgcacgcggcgtaatggtgcaggtagggatgggaggcgcgatggcagaattcccaatgatgacgttgattggtaaggagatttcactcaaaggctctttccgttttaccagcgaatttaataccgcagtgtcatggctggcgaatggcgttatcaatccactgcctttactgagtgctgaatatctcttcactgacctggaagaggcgctacgtttcgccggtgataaaacccaggcagcaaaagtccagcttgttttctaa

SEQ ID NO: 484217 - DNA, 564 bp, Shigella sonnei
atggcgggtgaaagctttattttgatgggcgtttcagggagtggtaaaacattaattggtagcaaggttgccgcgttattatctgctaaatttattgatggtgacgatcttcatccagccaaaaatatagataaaatgtcgcagggtattccattatctgatgaagatcgacttccctggctggaacgcttaaatgatgcttcatacagtctttataaaaagaatgaaacaggatttattgtctgttcatcattaaaaaaacagtatcgtgatattttacgcaagggtagcccccatgttcatttcctctggttagatggcgactatgaaactattctcgcgcgaatgcagcggcgggctgggcattttatgccggtagcgttactaaaaagtcagtttgaggcgctggagcgtccacaagcagatgaacaggatattgtacgcattgatatcaaccatgatattgccaatgtcaccgaacaatgtcggcaggccgtgctggcgatacgacaagacagaatatgtgcgaaagggggtagcgcctcagatcagcgctgcgaatga

SEQ ID NO: 484218 - DNA, 1020 bp, Shigella sonnei
atgtcgatgataaaaagctatgccgcaaaagaagcgggcggcgaactggaagtttatgagtacgagcccggtgaattgaagccacaagatgttgaagtgcaggtggattactgcgggatctgccattccgatctgtcgatgatcgacaacgaatggggattttcacagtatccgctggttgccgggcatgaggtgattgggcgcgtggtggcgctcgggagcgccgcgcaggataaaggtttgcaggtcggtcagcgtgtcgggattggctggacggcgcgtagctgcgggcattgcgacgcctgtattagcggtaatcagatcaactgcgagcaaggtgcggtgccaacaattatgaatcgcggcggttttgccgagaagttgcgtgcagactggcaatgggtgatcccactgccggaaaatatcgatatcgagtccgccgggccgctgctgtgtggtggtatcacggtctttaaaccactgttgatgcaccatatcactgctaccagccgcgttggggtaattggtattggcgggctggggcatatcgctataaaacttctgcacgcaatgggatgcgaggtgacagcctttagttcgaatcctgcgaaagagcaggaagtactggcgatgggtgccgataaagtggtgaatagccgcgatccgcaggcactgaaaacacttgcggggcagttcgatctcattatcaacaccgtcaacgtcagcctcgactggcagccttattttgaggcgctgacgtatggcggtaatttccacaccgtcggtgcggtcctcacgccgctgtctgttccggcctttacgttaattgcgggcgaccgcagcgtctctggttcagcaaccggcacaccttatgagcttcgtaagctgatgcgctttgcggcccgcagcaaggttgcgccgaccaccgaactgttcccgatgtcgaaaataaacgacgccatccagcatgtgcgcaacggtaaggcgcgttaccgcgtggttctgaaagccgatttttga

SEQ ID NO: 484219 - DNA, 552 bp, Shigella sonnei
atggcattaacagacatcaaagtcagaacagctaagccaacagataagcaatataagttgactgatggtggcggtatgcatctgcttgtccatccaaatggttctaagtactggcgtttgcagtaccgttatgagggaaagcaaaagatgctggcacttggggtttatcctgaaatcacactcgcggatgccagaatacgtcgtgacgagccacgtaagctgcttgcgaatggcgtcgatccgggagacaaaaagaaaagtgataaggttgaacagagtaaagcacgaacctttaaagaagtcgcgattgagtggcatggcaccaataaaaagtggtctgaagatcatgcccatcgtgtgctaaaaagtctggaagataatctttttgcagcgcttggtgaacgtaatatcgctgagttaaaaactcgagatttattagcacctattaaggccgtagaaatgtctggacgtcttgaaatggctgctcgtcttcaacagcgcactatgaggtgtactggcaatagcggacactaccatttgttctttttttaa

SEQ ID NO: 484220 - DNA, 1140 bp, Shigella sonnei
atgtcagagcccctcgatctcaatcagttagcgcaaaaaattaaacagtgggggctggaactgggctttcagcaggtaggtattaccgataccgatctcagcgagtccgagcccaaactgcaagcatggctggacaaacaataccacggcgaaatggactggatggcacgtcacggtatgctgcgcgctcgcccccatgagttattaccaggtacgctgcgtgtaatcagcgtgcggatgaattaccttcctgctaacgccgcatttgccagcacgctgaaaaaccccaaactcggctatgttagccgttatgcgctgggccgtgactatcacaaacttctgcgcaaccgactcaaaaagctgggcgagatgattcagcaacattgtgtttcgctgaattttagaccgtttgtcgattctgcgcctattctcgagcgcccgttagctgaaaaagctgggctcggctggacaggtaagcactcacttatcctcaatcgcgaggccggttctttcttctttttaggcgaattgctggtcgatattccgctgcccgtggatcaaccagtcgaggaaggatgcggtaaatgcatagcctgtatgacgatttgcccgaccggtgccatcgtcgagccatataccgtcgatgctcgccgctgtatctcttatctcaccatcgaacttgaaggggcgatcccggaagagttgcgaccgttaatgggaaaccgtatttacggttgcgatgactgccagcttatctgcccgtggaatcgctattcgcaactcactacagaagacgatttcagcccgcgtaagccgctacacgcacaggaactcattgagttatttgcctggagcgaagagaagtttttaaaagtcacggaaggatcggcgattcgccgtataggtcacctgcgctggctgcgtaatatcgccgtggcattaggcaatgcgccctgggatgaaacgattctggcggcgctggagagtcgcaaaggtgagcacccacttcttgatgagcacatagcgtgggcgattgcgcagcaaatcgagagacgaaatgcgtgcatagtcgaagtgcaattgccgaaaaaacagcgtctggttcgggtgattgaaaaagggttaccgcgtgacgcctga

SEQ ID NO: 484221 - DNA, 1533 bp, Shigella sonnei
atgaagaaaaaccccgtaagtataccacacaccgtctggtacgccgacgatatccgccgcggagaacgcgaggcggcagatgtgctggggctcacactctatgagctgatgcttcgcgctggcgaggccgcattccaggtgtgtcgttcggcgtatcctgacgcccgccactggctggtgctgtgcggtcatggtaataacggcggcgatggctacgtggtcgcgcgactggccaaagcggtcggcattgaggtcacgttgttggcccaggagagcgacaaaccgttgccggaagaggccgcgctggcacgcgaagcatggttaaacgcgggtggcgagatccatgcttcgaatattgtctggcccgaatcggtagatctgattgttgatgcgctgctcggtaccggcttgcagcaagcgccccgcgaatccattagccagttaatcgaccacgctaattcccatcctgcgccgattgtggcggttgatatcccttccggcctgctggctgaaaccggcgctacgccaggcgcagtgatcaacgccgatcacaccatcacttttattgcgctgaaaccaggcttgcttactggaaaagcgcgggatgttacaggacaactgcattttgactcactggggctggatagctggctggcaggtcaggagacgaaaattcagcggttttcggcagaacaactttctcactggctgaaaccgcgtcgcccgacttcgcataaaggcgatcacgggcggctggtgattatcggtggcgatcacggcacggcgggggctattcgtatgacgggggaagcggcgctgcgtgctggtgctggtttagtccgagtactgacccgcagtgaaaacattgcgccgctgctgactgcacgaccggaattgatggtgcatgaactgacgatggactctcttaccgaaagcctggaatgggccgatgtggtggtgattggtcccggtctgggccagcaagagtgggggaaaaaagcactgcaaaaagttgagaattttcgcaaaccgatgttgtgggatgccgatgcattgaacctgctggcaatcaatcccgataagcgtcacaatcgcgtgatcacgccgcatcctggcgaggccgcacggttgttaggctgttccgtcgctgaaattgaaagtgaccgcttacattgcgccaaacgtctggtacaacgttatggcggcgtagcggtgctgaaaggtgccggaaccgtggtcgccgcccatcctgacgctttaggcattattgatgccggaaatgcaggcatggcgagcggcggcatgggcgatgtgctctctggtattattggcgcattgcttgggcaaaaactgtcgccgtatgatgccgcctgtgcgggctgtgtcgcgcacggtgcggcagctgacgtactggcggcgcgttttggaacgcgcgggatgctggcaaccgatctcttttccacgctacagcgtattgttaacccggaagtgactgataaaaaccatgatgaatcgagtaattccgctccctga

SEQ ID NO: 484222 - DNA, 462 bp, Shigella sonnei
atgatgaatcgagtaattccgctccctgatgagcaggcaacattagacctgggcgagcgggtagcgaaagcctgcgatggcgcaaccgtaatctatctgtatggcgatttaggcgcaggtaaaaccacctttagccggggttttttacaagctctgggtcatcagggtaatgtcaaaagccccacttatacgctggtcgaaccctatacgctcgacaatttaatggtttatcactttgatttgtaccgccttgccgatcccgaggagctggagtttatggggatccgcgattattttgccaacgatgccatctgcctggtggagtggccacaacaaggtacaggtgttcttcctgacccggatgtcgaaatacacattgattatcaggcacaaggccgtgaggcgcgcgtgagtgcggtttcctctgcgggtgaattgttgctggcgcgtttagccggttaa

SEQ ID NO: 484223 - DNA, 1338 bp, Shigella sonnei
atgatgtatcgcatcagaaattggttggtagcgacgctgctgctgctgtgcacgccggtgggtgccgcgacgctctctgatattcaggtttctaacggtaatcaacaggcgcggataacgttgagttttattggcgatcctgattatgcgtttagccatcaaagcaaacgcaccgtggcgctcgatatcaaacaaacgggcgtgattcagggactgccgttgttgttcagcggcaataatctggtgaaggcgattcgctctggaacgcctaaagatgcacaaacgctacggctggtggtcgatcttaccgaaaacggtaaaaccgaagcggtgaagcggcagaatggcagcaattacactgtcgtctttacgattaacgccgatgtgccgccaccgcctcctccaccgcccgtggttgcgaaacgcgttgaaacgcctgcggttgtcgcaccgcgcgtcagcgaaccggcgcgcaatccgtttaaaacggaaagtaaccgcactacgggtgttatcagcagtaatacggtaacgcgtccggcagcgcgcgcgacggctaacactggcgataaaattatcatcgctattgatgccggacacggcggtcaggaccctggcgctatcggccccggtggtacgcgggagaaaaatgtcaccatcgccatcgcgcgtaaattgcgcactttgctcaatgacgatccgatgtttaaaggcgttttaacccgtgacggggattactttatctcggtgatggggcgcagcgatgtggcacgtaagcaaaacgccaatttcctcgtgtcgattcacgctgatgccgcaccgaaccgcagtgcgactggcgcttccgtatgggtgctctctaaccgtcgcgccaacagcgaaatggccagctggctggagcagcacgagaaacagtcggagctgctgggtggggcgggcgatgtgctggcgaacagtcagtctgacccctatttaagccaggcggtgctggatttacagttcggtcattcccagcgggtagggtatgatgtagcgaccagtatgatcagtcagttgcaacgcattggcgaaatacataaacgccgaccagaacacgcgagtctcggcgttctgcgttcgccggatatcccgtcagtactggtcgaaaccggttttatcagcaacaacagcgaagaacgtttgctggcgagcgacgattaccaacaacagctggcagaagccatttacaaaggcctgcgcaattatttccttgcgcatccgatgcaatctgcgccgcagggggcaacggcacaaactgccagtacggtgacgacgccagatcgcacgctgccaaactaa

SEQ ID NO: 484224 - DNA, 1848 bp, Shigella sonnei
atgccaattcaggtcttaccgccacaactggcgaaccagattgccgcaggtgaggtggtcgagcgacctgcgtcggtagtcaaagaactggtggaaaacagcctcgatgcaggtgcgacgcgtatcgatattgatatcgaacgcggtggggcgaaacttatccgcattcgtgataacggctgcggtatcaaaaaagatgagctggcgctggcgctggctcgtcatgccaccagtaaaatcgcctctctggacgatctcgaagccattatcagcctgggctttcgcggtgaggcgctggcgagtatcagttcggtttcccgcctgacgctcacttcacgcaccgcagaacagcaggaagcctggcaggcctatgccgaagggcgcgatatgaacgtgacggtaaaaccggcggcgcatcctgtggggacgacgctggaggtgctggatctgttctacaacaccccggcgcggcgcaaattcctgcgcaccgagaaaaccgaatttaaccacattgatgagatcatccgccgcattgcgctggcgcgtttcgacgtcacgatcaacctgtcgcataacggtaaaattgtgcgtcagtaccgcgcagtgccggaaggcgggcaaaaagaacggcgcttaggcgcgatttgcggcaccgcttttcttgaacaagcgctggcgattgaatggcaacacggcgatctcacgctacgcggctgggtggccgatccaaatcacaccacgcccgcactggcagaaattcagtattgctacgtgaacggtcgcatgatgcgcgatcgcctgatcaatcacgcgatccgccaggcctgcgaagacaaactgggggccgatcagcaaccggcatttgtgctgtatctggagatcgatccgcatcaggtggacgtcaacgtgcaccccgccaaacacgaagtgcgtttccatcagtcgcgtctggtgcatgattttatctatcagggcgtgctgagcgtgctacaacagcaactggaaacgccgctaccgctggacgatgaaccccaacctgcaccgcgttccattccggaaaaccgcgtggcggcggggcgcaatcactttgcagaaccggcagctcgtgagccggtagctccgcgctacactcctgcgccagcatcaggcagtcgtccggctgccccctggccgaatgcgcagccaggctaccagaaacagcaaggtgaagtgtatcgccagcttttgcaaacgcccgcgccgatgcaaaaattaaaagcgccggaaccgcaggaacctgcacttgcggcgaacagtcagagttttggtcgggtactgactatcgtccattccgactgtgcgttgctggagcgcgacggcaacatttcacttttagccttgccagtggcagaacgttggctgcgtcaggtacaactgacgccgggtgaagcgccagtttgcgctcagccgctgcttattccgttgcggctaaaagtttctggcgaagaaaaatcggcattagaaaaagcgcagtctgccctggcggaattgggtatggatttccagtcagatgcacagcatgtgaccatcagggccgtgcctttacccttacgccaacaaaatttacaaatcttgattcctgaactgataggctacctggcgaagcagtccgtattcgaacctggcaatattgcgcagtggattgcacgaaatctgatgagcgaacatgcgcagtggtcaatggcacaggccataaccctgctggcggacgtggaacggttatgtccgcaacttgtgaaaacgccgccgggtggtctgttacaatctgttgatttacatccggcgataaaagccctgaaagatgagtga

SEQ ID NO: 484225 - DNA, 951 bp, Shigella sonnei
atgagtgatatcagtaaggcgagcctgcctaaggcgatttttttgatggggccgacggcctccggtaaaacggcgttagccattgagctgcgtaaaattttaccagtagagttgataagcgttgattctgcccttatttacaaagggatggatatcgggacggcgaagccgaacgctgaagagttactcgccgcgccgcaccgattgctggatattcgcgatccgtcgcaggcttactcggctgctgattttcgccgcgatgcgctggcggaaatggccgatatcaccgcggcggggcggatcccactgttagtgggcggtacgatgttgtatttcaaggcattgctggaagggttgtcgccgctaccgtcggcagacccggaagtgcgggccagaattgagcaacaggcggcagagcaaggttgggagtcattgcatcgtcaacttcaggaggtagatccggttgcggcagcaaggattcatccaaatgatccacaaaggctttcccgggcactggaagtttttttcatttcgggtaaaactttaacggaactgacgcaaacgtcaggagacgctctaccgtatcaggtgcatcagttcgccatcgccccggcgagccgtgaactgctccatcaacgcattgagcagcgttttcatcagatgttggcttcaggttttgaagcagaagtccgggcgctttttgcccgaggagatttgcatacggacttgccttccattcgttgcgtgggttatcgccagatgtggtcttaccttgaaggcgaaatctcatacgatgaaatggtttatcgaggtgtttgcgccacgagacagttggcgaagcggcagataacctggctgcgtggttgggaaggggttcactggcttgacagtgaaaaaccagaacaggcgcgtgacgaagtattacaggttgttggtgctatcgcaggctga

SEQ ID NO: 484226 - DNA, 309 bp, Shigella sonnei
atggctaaggggcaatctttacaagatccgttcctgaacgcactgcgtcgggaacgtgttccagtttctatttatttggtgaatggtattaagctgcaagggcaaatcgagtcttttgatcagttcgtgatcctgttgaaaaacacggtcagccagatggtttacaagcacgcgatttctactgttgtcccgtctcgcccggtttctcatcacagtaacaacgccggtggcggtaccagcagtaactaccatcatggtagcagcgcgcagaatacttccgcgcaacaggacagcgaagaaaccgaataa

SEQ ID NO: 484227 - DNA, 1281 bp, Shigella sonnei
ttgtttgaccgttatgatgctggtgagcaggcggtactggtacacatctattttacgcaagacaaagatatggaagacctccaggagtttgaatctctggtctcttccgccggtgtcgaagcattgcaggtgattaccggtagccgtaaagcgccgcacccaaagtattttgtaggtgaaggtaaagcagttgaaattgcggaagctgtcaaagcgacgggtgcttcggtcgttctttttgaccatgccctgagcccggcgcaagagcgtaacctggagcgtttgtgcgagtgtcgtgttatcgaccgcaccggccttattttagatattttcgcccaacgtgcgcgtacccatgagggtaagttgcaggttgagctagcgcagctgcgccatctggctacgcgcctggtgcgtggctggacccaccttgaaagacagaaaggcgggataggtttgcgtggtccgggtgaaacccagctcgaaaccgaccgtcgtttgttgcgtaatcgcatcgtgcagatacagtcgcgcctagaaagagttgaaaagcagcgtgagcaggggcggcaatcgcgtatcaaagccgacgttcctactgtttcgctggtgggatataccaacgccggtaaatctacccttttcaatcgcatcaccgaagcgcgggtctacgcggcagaccagttgtttgccaccctcgacccgacgttgcggcgtattgacgtcgcggatgtcggtgaaaccgtacttgcagataccgtagggtttattcgccacctgccgcacgatctggtggcagcatttaaagccacgttacaagagacgcggcaagccacattactgctgcacgtcattgatgcggcggatgtacgtgtacaagaaaacatcgaagcggtgaatacggttcttgaagagatcgacgctcacgagatcccaaccctgctggtgatgaacaagatcgatatgctggaagatttcgaaccgcgtattgatcgggacgaagagaacaaaccgatccgtgtctggctttccgcacagaccggagcggggataccacagctttttcaggctttgacggagcggctttccggcgaggtggcgcagcatacattgcgtttgccgccgcaggaaggacgtctgagaagtcgtttttatcagcttcaggcaatagaaaaagagtggatggaggaggacggcagcgtaagtctgcaagttcgtatgccgatcgttgactggcgtcgcctctgtaaacaagaaccggcgttgatcgattacctgatctaa

SEQ ID NO: 484228 - DNA, 1260 bp, Shigella sonnei
atggcgtggaatcagcccggtaataacggacaagaccgcgacccgtggggaagcagcaaacctggcggcaactctgagggaaatggaaacaaaggcggtcgcgatcaagggccacctgatttagatgatatcttccgcaaactgagcaaaaagctcggtggtctgggcggcggtaaaggcaccggatctggcggtggcagttcatcgcaaggcccgcgcccgcagcttggcggtcgtgtcgttaccatcgcagcggcagcgattgtcattatctgggcggccagtggtttctataccattaaagaagccgaacgcggcgtggtaacacgctttggtaaattcagccatctggttgagccgggtctgaactggaaaccgacgtttatcgacgaagtcaaaccggtgaacgtggaagccgtgcgtgaactggccgcttctggtgtgatgctgacgtcggacgagaacgtagtgcgcgttgagatgaacgtgcagtaccgcgtcaccaatccggaaaaatatctgtatagcgtgaccagcccggatgacagcctgcgtcaggctaccgacagcgccctgcgtggagttatcggtaaatacaccatggaccgcattctgacggaaggtcgtaccgtgattcgtagcgatactcagcgcgaactggaagagactatccgtccgtatgacatgggtatcactctgctggacgtcaacttccaggcagctcgtccgccggaagaagtaaaagcggcgtttgacgatgcgattgccgcgcgtgaaaacgaacagcaatacattcgtgaagcagaagcgtataccaacgaagttcagccgcgtgcgaacggtcaggcgcaacgtatcctcgaagaggcgcgtgcgtacaaggcccagaccatcctggaagctcagggtgaagtggcgcgctttgctaaacttctgccggaatataaagccgcgccggaaattactcgcgagcgtctgtatatcgagacgatggaaaaagtgttgggtaacacccgcaaagtgctggttaacgataaaggtggcaacctgatggttctgccgttagaccagatgctgaaaggcggtaacgcccctgcggcgaagagcgataacggtgccagcaatctgctgcgtctgccgccagcctcttcctccacaaccagtggagcaagcaacacgtcgtccaccagtcagggcgatattatggaccaacgccgcgccaacgcgcagcgtaacgactaccagcgtcagggggaataa

SEQ ID NO: 484229 - DNA, 1005 bp, Shigella sonnei
atgcgtaagtcagttatcgcgattatcatcatcgtgctggtagtgctttacatgtctgtctttgtcgtcaaagaaggtgagcgcggtattacgctgcgttttggtaaggtactgcgtgacgatgacaacaaacctctggtttatgagccgggtctgcatttcaagataccgttcattgaaacggtgaaaatgctcgacgcacgtattcagaccatggacaaccaggccgaccgctttgtgaccaaagagaagaaagacctgatcgtcgattcttacatcaaatggcgcatcagcgatttcagccgttactacctggcaacgggtggtggcgacatttcgcaagcggaagtgctgttgaaacgtaagttctctgaccgtctgcgttctgaaattggtcgcctggacgtgaaagacatcgtcaccgattcccgtggtcgtctgaccctcgaagtacgtgacgcgctgaactccggttctgcgggtacagaagatgaagttactaccccggcggcagataacgccattgccgaagcggcagagcgcgtaacggctgagacgaagggcaaagttccggtcatcaacccgaacagtatggcggcgctgggtattgaagttgtcgatgtgcgtatcaagcagatcaacctgccgaccgaagtgtctgaagcgatctacaaccgtatgcgcgccgagcgtgaagcggtagcgcgtcgtcaccgttcacaaggtcaggaagaagcggaaaaactgcgcgcgactgccgactatgaagtgaccagaacgctggcagaagctgagcgtcagggccgcatcatgcgtggtgaaggcgatgccgaagcagccaaactgtttgctgatgcattcagtaaagatccggacttctacgcattcatccgtagcctgcgtgcttatgagaacagcttctctggcaatcaggacgtgatggtcatgagcccggatagcgatttcttccgctacatgaagacgccgacttccgcaacgcgttaa

SEQ ID NO: 484230 - DNA, 198 bp, Shigella sonnei; identical to SEQ ID NO: 1878

SEQ ID NO: 484231 - DNA, 1299 bp, Shigella sonnei
atgggtaacaacgtcgtcgtactgggcacccaatggggtgacgaaggtaaaggtaagatcgtcgatcttctgactgaacgggctaaatatgttgtacgctaccagggcggtcacaacgcaggccatactctcgtaatcaacggtgaaaaaaccgttctccatcttattccatcaggtattctccgcgagaatgtaaccagcatcatcggtaacggtgttgtgctgtctccggccgcgctgatgaaagagatgaaagaactggaagaccgtggcatccccgttcgtgagcgtctgctgctgtctgaagcatgtccgctgatccttgattatcacgttgcgctggataacgcgcgtgagaaagcgcgtggcgcgaaagcgatcggcaccaccggtcgtggtatcgggcctgcttatgaagataaagtagcacgtcgcggtctgcgtgttggcgaccttttcgacaaagaaaccttcgctgaaaaactgaaagaagtgatggaatatcacaacttccagttggttaactactacaaagctgaagcggttgattaccagaaagttctggatgatacgatggctgttgccgacatcctgacttctatggtggttgacgtttctgacctgctcgaccaggcgcgtcagcgtggcgatttcgtcatgtttgaaggtgcgcagggtacgctgctggatatcgaccacggtacttatccgtacgtaacttcttccaacaccactgctggtggcgtggcgaccggttccggcctgggcccgcgttatgttgattatgttctgggtatcctcaaagcttactcaactcgtgtaggtgcaggtccgttcccgaccgaactgtttgatgaaactggcgagttcctctgcaagcagggtaacgaattcggcgcaactacgggtcgtcgtcgtcgtaccggctggctggacaccgttgccgttcgtcgtgcggtacagctgaactccctgtctggcttctgcctgaccaagctggacgttctggatggcctgaaagaggttaaactctgcgtggcttaccgtatgccggatggtcgcgaagtggctaccactccgctggcagctgacgactggaaaggtgtagagccgatttacgaaaccatgccgggctggtctgaatccactttcggcgtgaaagatcgtagcggcctgccgcaggcggcgctgaactacatcaagcgtattgaagagctgaccggtgtgccgatcgatatcatctctaccggtccggatcgtactgaaaccatgattctgcgcgatccgttcgacgcgtaa

SEQ ID NO: 484232 - DNA, 426 bp, Shigella sonnei; identical to SEQ ID NO: 472603

SEQ ID NO: 484233 - DNA, 2442 bp, Shigella sonnei
atgtcacaagatcctttccaggaacgcgaagctgaaaaatacgcgaatcccatccctagtcgggaatttatcctcgaacatttaaccaaacgtgaaaaaccggccagccgtgatgagctggcggtagaactgcacattgaaggcgaagagcagcttgaaggcctgcgtcgccgcctgcgcgcgatggagcgcgatggtcaactggtcttcactcgtcgtcagtgctatgcgctgccggaacgcctcgacctggtgaaaggtaccgttattggccaccgtgatggctacggctttctgcgggttgaagggcgtaaagatgatttgtatctctccagcgagcagatgaaaacctgtattcatggcgatcaggtgctggcgcagccgctgggtgctgaccgtaaaggtcgtcgtgaagcgcgtattgtccgcgtactggtgccaaaaaccagccagattgttggtcgctactttaccgaagcgggcgtcggctttgtggttcctgacgatagccgtctgagcttcgatatcttaatcccgcccgatcagatcatgggcgcgcggatgggctttgtggtcgtagtcgaactgactcagcgtccgactcgccgcaccaaagcggtgggtaaaatcgtcgaagtgctgggcgacaatatgggcaccggcatggcggttgatatcgctctgcgtacccatgaaattccgtatatctggccgcaggctgttgagcaacaggttgcggggctgaaagaagaagtgccggaagaagcaaaagcgggccgtgtcgatttgcgcgatttaccgctggtcaccattgatggcgaagacgcccgtgactttgacgatgcagtttactgcgagaaaaaacgcggcggcggctggcgtttatgggtcgcgattgccgacgtcagctactatgtgcgtccgccaacgccgctggacagagaagcgcgtaaccgtggcacgtcggtgtacttcccttcgcaggttatcccgatgctgccggaagtgctctctaacggcctgtgttcgctcaacccgcaggtagaccgcctgtgtatggtgtgcgagatgacggtttcgtcgaaaggccgcctgacgggctacaaattctacgaagcggtgatgagctctcacgcgcgtctgacctacaccaaagtctggcatattctgcagggcgatcaggatctgcgcgagcagtacgccccgctggttaagcatctcgaagagttgcataacctctataaagtgctggataaagcccgtgaagaacgcggtgggatctcatttgagagcgaagaagcgaagttcattttcaacgctgaacgccgtattgaacgtatcgaacagacccagcgtaacgacgcgcacaaattaattgaagagtgcatgattctggcgaatatctcggcggcgcgtttcgttgagaaagcgaaagaaccggcactgttccgtattcacgacaagccgagcaccgaagcgattacctctttccgttcagtgctggcggagctggggctggagctgccgggtggtaacaagccggaaccgcgtgactacgcggaactgctggagtcggttgccgaccgtcctgatgcagaaatgctgcaaaccatgctgctgcgctcgatgaaacaggcgatttacgatccagaaaaccgtggtcactttggcctggcattgcagtcctatgcgcactttacttcgccgattcgtcgttatcctgacctgacgctgcaccgcgccattaagtatctgctggcgaaagagcaggggcatcagggcaacaccactgaaaccggcggctaccattattcgatggaagagatgttgcaactgggtcagcactgttcgatggcggaacgtcgtgccgacgaagcaacgcgcgatgtcgctgactggctgaagtgtgacttcatgctcgaccaggtaggtaacgtctttaaaggcgtaatttccagcgtcactggctttggcttcttcgtccgtctggacgacttgttcattgatggtctggtccatgtctcttcgctggacaatgactactatcgctttgaccaggtagggcaacgcctgatgggggaatccagcggccagacttatcgcctgggcgatcgcgtggaagttcgcgtcgaagcggttaatatggacgagcgcaaaatcgactttagtctgatctccagtgaacgcgcaccgcgcaacgtcggtaaaacggcgcgcgagaaagcgaaaaaaggcgatgcaggcaaaaaaggcggcaagcgtcgtcaggtcggtaaaaaggtaaactttgagccagacagcgccttccgcggtgagaaaaaaacgaagccgaaagcggcgaagaaagacgcgagaaaagcgaaaaagccatcggcgaaaacgcagaaaatagccgcagcgaccaaagcgaagcgtgcggcgaagaaaaaagtggcagagtga

SEQ ID NO: 484234 - DNA, 732 bp, Shigella sonnei
atgagcgaaatgatttacggcatccacgcagtgcaggccctgctggagcgcgcccctgaacgttttcaggaagtctttattttaaaaggccgtgaagataaacgtctgttaccgctgattcacgcccttgagtctcagggcgtggttatccagttggcaaaccgccaatatctcgacgagaaaagcgacggtgccgtgcatcagggcattatcgcccgcgtgaagccaggacgtcagtatcaggaaaacgatctgccggatctgatcgcttcgctcgatcaaccgttcctgctgatcctcgacggtgtaaccgatccgcacaacctcggcgcgtgcctgcgtagcgcggacgctgctggcgttcacgcggtgattgtgccgaaagatcgctccgcacagctcaacgctacggcgaaaaaagtagcctgcggcgcggcagaaagcgttccactgattcgggtgactaaccttgcgcgcaccatgcgtatgttgcaggaagagaatatctggatcgtcggtacggcaggcgaggcggatcatacactctatcagagcaaaatgaccggacgcttggcgctggtgatgggcgcggaaggtgaaggtatgcgtcgcctgacccgtgaacattgcgatgagttgatcagcatcccaatggcaggaagtgtttcttccctgaacgtttcggttgcaaccggaatttgcttatttgaagcggttcgtcagcgcagctag

SEQ ID NO: 484235 - DNA, 210 bp, Shigella sonnei
atgttgcaacgtaaaactttacgtaaattaacatggttaacatttatgccactattgtttgtaagttcatatttcgtaatgcttctgaatttttcgtgtgatggttttaaatactatgttgtttactcttggggttactgcttatttataaaatacgggcatttcaatagatgcccgtatgaacagagtatgattctggctggtcgttga

SEQ ID NO: 484236 - DNA, 633 bp, Shigella sonnei
atggggctttgtagtcgttataaaagtcttacatgcaatagttgctcaatgcattgccaaataatgccagaagagtcaccgcgtttgcagtattgcgcaaactcgtgtttttgtatgtggcccgaagaaagttcatattttaatcgtggtgtggtggaaggtatcttaacaaaaaaccacaatgcgagattaagcggatatatttttgtggatttttcagtaagttttttacgtctattccttgaaaaagactggattgactatcttgcaagtactgacatggggatagttttagtcagcgaccgcaatatgcaatcgttagctaactactggcgaaaacacaacaccgcaatatctgctgtcatatataatgatgatggtcttgatgttgccaatgaaaagatcagacaactatttattggtcgttatttatcatttaccagaggtaacacattaactcagatggaattcaccataatggggtatatggtttctggttataatccatatcagattgctgaagtgctggatatggatatccgtagcatctacgcgtacaagcaacgaatcgaaaagagaatgggtggtaaaataaacgaattatttattcgttcacattcggtccaacattga

SEQ ID NO: 484237 - DNA, 1230 bp, Shigella sonnei
atgtctaatatttggtctaaagaagaaactctgtggagtttcgcgctctacggcacagccgttggtgcaggcacgctcttccttcctattcagttaggttcggcaggggctgtggtcctgtttattactgctctggtcgcctggcctttaacatattggccacataaagccttatgccagttcatcctctcatcaaaaacatcagcatgtgaagggataacgggcgcggtaacacactactatggcaagaagattggtaatctgattaccacgctgtacttcatcgccttttttgtcgtcgtgttgatatatgcagtggcaattaccaactcacttacggaacagctggcaaagcatatggttattgatcttcgcatccgtatgttggtgagtctgggtgttgtattaattctgaatctcatttttctgatgggacgtcatgccactattcgggtaatgggatttttggtattcccattgattgcctatttcttatttctttccatttaccttgtcggtagttggcaacctgatctattaacgacccaggtagagttcaatcagaatacccttcaccagatatggatatcgattcccgtgatggttttcgcctttagccatacgcccattatttctacgtttgccatagacagacgtgaaaaatatggcgaacacgctatggataaatgcaaaaaaattatgaaagtcgcttatctcatcatctgcataagtgtactgttctttgtctttagctgcctgctttctattccaccttcgtatattgaagcggctaaagaagaaggggtcaccattttatcggcgctttctatgctgccgaacgccccagcatggttgtcaatttccgggattattgtcgcagtagttgcgatgtcgaaatcattcctgggtacgtactttggcgttattgaaggtgccacggaggtcgtcaaaacaacactacagcaggttggtgtaaagaaaagtcgtgcatttaaccgcgcactatcaattatgttggtatcgctgattaccttcattgtttgttgcattaacccgaacgcgatttcgatgatttatgcgatcagcggcccgctcattgccatgatacttttcatcatgcctacgttgtcaacgtatctgatcccggcgcttaaaccctggcgctccatcggaaatctgattacgctgatcgtgggtatcctgtgcgtatcggtaatgttctttagctaa

SEQ ID NO: 484238 - DNA, 1182 bp, Shigella sonnei
atgaaagacgttgtgattgtcggggcgttacggacacctatcggctgctttcgtggtgcgttagcgggtcattccgccgtggaacttggtagtctggtcgtgaaagcgttaatagaacgtaccggcgttcctgcatatgcggtggatgaagtaattcttggtcaggtgttgactgcaggggcagggcagaatccggcaaggcaatcggctattaaaggtggtcttcctaatagcgtttctgcaatcacgattaatgacgtttgcggttccggacttaaagcactgcatctggctactcaggcgatacagtgtggcgaggctgatattgtcatcgccggtggccaggaaaacatgagccgcgcaccacatgttctgactgatagccgcaccggtgcacagcttggcaatagccagttggttgacagtctggtgcatgatgggttgtgggatgccttcaatgattatcatattggtgtcaccgccgaaaatctggctcgcgaatatggcatcagccgtcagttgcaggatgcttacgcacttagctcgcaacaaaaagcgcgagcggcgattgacgccggacgatttaaagatgagatcgtcccggtaatgatccaaagtaacggtcagacgttggttgttgataccgatgaacagccacgcactgacgccagtgcagaaggtttagcccgtttaaatccttcatttgatagtctcggttctgtgaccgcggggaatgcatcatccataaacgatggcgcagctgcggtaatgatgatgagcgaagccaaagcacgagcgttgaatttacccgtgctggcccgcatccgcgcatttgccagcgttggtgtagatccggcattgatgggaattgcgccggtgtatgcgacccgccgttgcctggagcgtgtaggctggcagttggctgatgtcgatcttatcgaggctaatgaagcgtttgctgcacaggcgctttcggttggcaagatgcttgagtgggatgagcgtcgggtcaatgtcaatggtggcgcgatcgcactcggtcacccgataggcgcttccggttgccgaatcctggtttctctggttcatgaaatggtgaaacgtaatgcccgcaaagggctggcaacgctttgtatcggcgggggccagggcgtggcattgaccattgaacgtgacgagtag

SEQ ID NO: 484239 - DNA, 837 bp, Shigella sonnei
gtggacgtaagacagagcatccacagtgcgcacgcaaaaacgctggatacccaagggctgcgcaatgaatttttggttgaaaaggtatttgtcgccgatgagtacaccatggtttacagccacattgaccgaattattgttggcggcattatgccgataactaaaacggtttccgttggcggggaagttggtaaacaactcggcgtaagctatttccttgaacgtcgcgagttaggtgttatcaatattggcggtgccggtacgattactgtcgatggccaatgctatgaaatcggtcaccgcgacgccctgtatgttggtaaaggtgcaaaagaagttgtctttgccagtattgataccgccactccggcaaagttttattacaattgcgcacccgcgcatacgacgtatcccaccaaaaaagtcacaccggacgaagtatctccagtcacgttaggcgataacctcaccagtaaccgtcgcacaattaacaaatattttgtcccggatgtgctggaaacctgccaattgagtatggggctgacggagctggctccaggtaacttgtggaacaccatgccgtgtcacactcacgagcgccggatggaagtttatttctatttcaatatggatgatgacgcctgcgttttccacatgatggggcagccgcaagaaacgcgtcacattgtgatgcataacgagcaggcggtgatctcccccagctggtcgatccattccggcgtcggaaccaaagcttatacctttatctggggcatggttggtgaaaaccaggtctttgatgatatggaccatgtggccgttaaagatttgcgctag

SEQ ID NO: 484240 - DNA, 762 bp, Shigella sonnei
atgattttaagtgcattttctctcgaaggtaaagttgcggtcgtcactggttgtgatactggactgggccaggggatggcgttggggctggcgcaagcgggctgtgacattgttggcattaacatcgttgaaccgactgaaaccatcaagcaggtcacggcgctggggcgtcgttttttaagcctgaccgccgatctgcgaaagattgatggcattccagcactgctggatcgcgcggtagctgagtttggtcatattgatatcctggtgaataacgccggattgattcgccgcgaagatgctctcgagttcagcgaaaaagactgggacgatgtcatgaacctgaatatcaagagcgtattcttcatgtctcaggcagcggcgaaacactttatcgcgcaacgcaatggcggcaagattatcaatatcacgtcaatgctctccttccagggcgggatccgtgtgccttcttataccgcatcaaaaagcggcgtgatgggcgtgacgcgattgatggcgaacgaatgggctaaacacaacattaatgttaatgcgatagctccgggttacatggcgaccaacaatactcaacaactacgggcagatgaacaacgtagcgcggaaattctcgaccgcattccagctggtcgttggggactgccgagtgacctgatggggccgatagtgttccttgcctccagcgcttcagattatgtgaatggttataccattgccgtagatggcggttggctggctcgttaa

SEQ ID NO: 484241 - DNA, 1419 bp, Shigella sonnei
atggttactatcaatacggaatctgctttaacgccacgttctttgcgggatacgcggcgtatgaatatgtttgtttcggtagctgctgcggtcgcaggattgttatttggtcttgatatcggcgtaatcgccggagcgttgccgttcattaccgatcactttgtgctgaccagtcgtttgcaggaatgggtggttagtagcatgatgctcggcgcagcaattggtgcgctgtttaatggttggctgtcgttccgcctggggcgtaaatacagcctgatggcgggggccatcctgtttgtactcggttctatagggtccgcttttgcgaccagcgtagagatgttaatcgccgctcgggtggtgctgggcattgctgtcgggatcgcgtcttacaccgctcctctgtatctttctgaaatggcaagtgaaaacgttcgcggtaagatgatcagtatgtaccagttgatggtcacactcggcatcgtgctggcgtttttatccgatacagcgttcagttatagcggtaactggcgcgcaatgttgggggttcttgctttaccagcagtcctgctgattattctggtggtcttcctgccaaatagcccgcgctggctggcggaaaaggggcgtcatattgaggcggaagaagtgttgcgtatgctgcgcgatacgtcggaaaaagcgcgagaagaactcaacgaaattcgtgaaagcctgaagttaaaacagggcggttgggcactgtttaagatcaaccgtaacgtccgtcgtgctgtgtttctcggtatgttgttgcaggcgatgcagcagtttaccggtatgaacatcatcatgtactacgcgccgcgtatcttcaaaatggcgggctttacgaccacagaacaacagatgattgcgactctggtcgtagggctgacctttatgttcgccacctttattgcggtgtttacggtagataaagcagggcgtaaaccggctctgaaaattggtttcagcgtgatggcgttaggcactctggtgctgggctattgcctgatgcagtttgataacggtacggcttccagtggcttgtcctggctctctgttggcatgacgatgatgtgtattgccggttatgcgatgagcgccgcgccagtggtgtggatcctgtgctctgaaattcagccgctgaaatgccgcgatttcggtattacctgttcgaccaccacgaactgggtgtcgaatatgattatcggcgcgaccttcctgacgctgctcgacagcattggtgctgccggtacgttctggctctacactgcgctgaacattgcgtttgtgggcatcactttctggctcattccggaaaccaaaaatgtcacgctggaacatatcgaacgcaaactgatggcaggcgagaagttgagaaatatcggcgtctga

SEQ ID NO: 484242 - DNA, 378 bp, Shigella sonnei
atgaaaacaattggtttgctgggaggaatgagctgggaatccaccattccttactatcgtctgataaatgaaggcattaaacagcggcttggtgggcttcactctgcgcaagtgctgctacatagcgtcgattttcatgaaatagaagagtgccagcgtcgcggggaatgggataaaaccggggacattctggctgaggcggcgcttggcttacagcgggcgggcgcagaaggtattgtgttatgtaccaatacgatgcataaagtggcggatgccaccggacgtgcaattaccggggccggaatgactcgtgtggcgctgctgggtacgcgttacaccatggaacaggatttttatcgcgggcggctgacggaataa

SEQ ID NO: 484243 - DNA, 936 bp, Shigella sonnei
atggccgccgttaacttacgtcatattgaaatttttcatgcggtaatgaccgccggaagcctgactgaggcagcacacctgctacacacctcacagccaaccgtcagccgcgaactggcgcgctttgagaaggtgatcgggctaaaattgtttgagcgcgtacgtggacgattacatcctaccgtgcaaggactgcgtctgtttgaagaagtgcaacgatcctggtacggactggatcgcattgtcagcgccgcagaaagtctgcgcgagtttcgccagggagaactgtctattgcctgcctgccggtcttttcgcaatcttttttaccgcagctcctgcaaccctttctggcacgttatcccgatgtcagcttaaatatcgtgccccaggaatcaccgctacttgaagagtggctctcggcccagcgtcatgatttaggactcactgagacactccatacgcctgcgggaacagaacgtaccgaattactctctttagatgaagtgtgtgtgttacctccgggtcatccgctggcggtaaaaaaggtattaacgccggatgattttcagggtgagaactacatcagcctttcccgtactgacagctatcgccagttgctggatcagctatttactgaacatcaggttaaacgacgcatgatcgtagaaacccacagcgccgcgtcagtctgcgcaatggtacgggcgggggtaggtgtttcggtggttaacccactcaccgcactggattatgcggcaagcggtttagtggtacggcggttcagtattgcggttccgttcaccgtcagcctgatccgccccctgcaccgcccgtcatcagcgctggttcaggcgtttagtgagcatttacaagcggggttaccgaaactggtcacttctcttgacgcgattttgtcgtcagctacgacagcataa

SEQ ID NO: 484244 - DNA, 1263 bp, Shigella sonnei
atgccacattcactgttcagcaccgataccgatctcaccgccgaaaatctgctgcgtttgcccgctgaatttggctgcccggtgtgggtctacgatgcgcaaattattcgtcggcagattgcagcgctgaaacagtttgatgtggtgcgctttgcacagaaagcctgttccaatattcatattttgcgattaatgcgtgagcagggcgtgaaagtggattccgtctcgttaggcgaaatagagcgtgcgttggcggcgggttacaatccgcaaacgcaccccgatgatattgtttttacggcagatgttatcgatcaggcgacgcttgaacgcgtcagtgaattgcaaattccggtgaatgcgggttctgttgatatgctcgaccaactgggccaggtttcgccagggcatcgggtatggctgcgcgttaacccggggtttggtcacggacatagccaaaaaaccaataccggtggcgaaaacagcaagcacggtatctggtacaccgatctgcccgccgcactggacgtgatacaacgtcatcatctgcagctggtcggcattcacatgcacattggttctggcgttgattatgcccatctggaacaggtgtgtggtgctatggtacgtcaggtcatcgaattcggtcaggatttacaggctatttctgcgggcggtgggctttctattccttatcaacagggtgaagaggcggttgataccgaacattattatggtctgtggaatgccgcgcgtgagcaaatcgctcgccatttgggccaccctgtgaaactggaaattgaaccgggtcgctttctggtagcgcagtctggcgtgttaattactcaggtgcggagcgtcaaacaaatgggtagccgccactttgtgctggttgatgccgggttcaacgatctgatgcgcccggcaatgtacggtagttaccaccatatcagtgccctggcagctgatggtcgttctctggaacacgcgccaacggtggaaaccgtcgtcgccgggccattatgtgaatcgggcgatgtctttacccagcaggaagggggaaatgttgaaacccgcgccttgccggaagtgaaggcgggtgattatctggtactgcatgatacaggggcatatggcgcatcaatgtcatccaactacaacagccgtccgctgttaccagaagttctgtttgataatggtcaggcgcggttgattcgccgtcgccagaccatcgaagaattactggcgctggaattgctttaa

SEQ ID NO: 484245 - DNA, 1032 bp, Shigella sonnei
atggcgaccataaaggatgtagcccgactggcaggcgtttcagtcgccaccgtttcccgcgtcattaataattcacccaaagccagcgaagcgtcccggctggctgtgcatagtgcaatggagtctcttagctatcacccgaacgccaacgcccgtgcgctggcgcagcagaccactgaaacggtcggtctggtcgttggtgatgtttccgatccgtttttcggtgcaatggtgaaagcggtcgaacaggtggcttatcacaccggtaattttttattgattggcaatggttaccacaacgaacaaaaagagcgtcaggccattgagcaactgatccgccatcgctgtgctgcgttggtcgtccatgccaaaatgatcccggatgccgatttagcctcattaatgaaacaaatgcccggtatggtgctgatcaaccgtatcctgcctggcttcgaaaaccgttgtattgctctggacgatcgttacggtgcctggctggctacgcgtcatttaattcaacaaggtcatacccgcattggttatctgtgctctaaccactctatttctgacgccgaagatcgtctgcaagggtattacgatgcccttgctgaaagtggtattgcggccaatgaccggctggtgacatttggtgaaccagacgaaagcggcggcgaacaggcaatgaccgagcttttgggacgaggaagaaatttcactgcggtagcctgttataacgattcaatggcggcgggtgcgatgggcgttctcaatgataatggtattgatgtaccgggtgagatttcgttaattggctttgatgatgtgctggtgtcacgctatgtgcgtccgcgcctgaccaccgtgcgttacccaatcgtgacaatggcgacccaggctgccgaactggctttggcgctggcggataatcgccctctcccggaaatcactaatgtctttagtccgacgctggtacgtcgtcattcagtgtcaactccgtcgctggaggcaagtcatcatgcaaccagcgactaa

SEQ ID NO: 484246 - DNA, 2160 bp, Shigella sonnei
atgctttttagcttttttcgaaatttgtgccgtgttttgtatcgcgttcgcgttacgggtgacacccaggcactgaagggcgagcgcgttctaattacgcctaatcacgtctcttttattgatggcattttgcttggactgtttttacctgtgcgtccagtgtttgccgtttacacctcaataagccaacagtggtatatgcgttggctgaaatcatttatcgactttgttcctctcgacccgacgcaacctatggcgattaaacatctggtacgtctggtggaacagggccgaccagtggtgattttccctgaaggacgcatcaccaccacaggctcgctgatgaaaatctacgatggcgcgggttttgtcgcggcgaagtctggtgcaacggttattcctgtgcgtattgaaggggcggaacttacgcacttcagccgcctgaaaggtctggttaaacgtcgcttgttcccgcaaattactctgcatattttgccaccaacgcaggtggagatgccggatgcgccgcgtgcccgtgaccgtcgcaaaatcgctggcgaaatgctgcatcaaataatgatggaagcgcgaatggcggtgcgcccgcgtgaaacgctgtacgaatctttactgagtgcaatgtaccgcttcggagccgggaagaaatgtgtcgaagacgtcaactttaccccagactcctatcgcaaattgcttacgaaaacgctgtttgttggacgcatccttgaaaaatacagtgttgaaggcgaacgcatcggcttaatgctgcccaatgcaggcatcagtgcggcagtgatttttggggccatcgcccgtcgccgcattcccgcaatgatgaactacactgccggggtaaaagggctgaccagtgctattacggcggctgaaatcaaaaccatcttcacttcccgccagtttctcgataaaggcaaactctggcatctgccggagcaacttactcaggtgcgctgggtctatctggaagatttaaaagcagatgtcaccactgccgacaaagtatggatcttcgcgcatctgctgatgccacgtctggcacaggtaaaacagcagccggaagaagaggcgctgatcctctttacctccggttctgaaggccatccgaaaggcgtcgtccatagccataaaagcattctggcgaacgtcgagcagattaaaacgattgccgacttcaccaccaacgatcgctttatgtcggcgttaccgctgtttcactcctttgggctgacggtaggcctgtttacgccactgctcacaggtgcagaagtgtttctttatccaagcccgctgcattaccgtattgtgccggagttggtgtatgaccgcagttgcaccgtgttgttcggcacctcgactttcctcggtcactacgcgcgtttcgccaacccgtatgacttctatcgtctacgctatgtggtggcaggcgcagaaaaattacaagaaagtaccaaacagctttggcaggataaatttggcctgcgcatccttgaaggctacggcgtgaccgaatgcgcgcctgtcgtttctatcaacgtaccgatggcggcgaaacccggtacggtagggcgtattctaccaggaatggatgcgcgcctgttgtcggtccctggtatcgaagagggcggacgcctgcaactgaaagggccgaacataatgaacggctatctgcgggtggagaagccaggtgtactggaagtgcccaccgccgagaatgttcgcggcgaaatggagcgcggctggtatgacactggcgatattgtgcgttttgacgagcagggctttgtgcagattcagggccgcgcaaaacgctttgccaaaattgcaggcgaaatggtgtcgctggaaatggtggaacaactggcacttggtgtttcgccagataaagtccatgccactgcgattaagagcgatgccagcaaaggcgaggcactggtgcttttcaccacagataacgaactgacgcgcgataagttgcaacagtatgcccgcgagcacggcgtgccggagcttgctgtaccgcgcgatattcgctatctgaaacagatgccattacttggcagcggcaaacctgactttgtcacgttgaaaagctgggtagacgaagcggaacaacacgatgagtga

SEQ ID NO: 484247 - DNA, 1038 bp, Shigella sonnei
atgagtgagtcagtgcacactaacacttcgttgtggtcgaaggggatgaaagcggttatcgtggcgcagtttctctctgcgtttggcgataatgccctactgtttgccactctggcgttactgaaagcgcagttctatccggagtggagccagcccatcctgcaaatggtgtttgtaggtgctgcagcctattcaccggcgaaatacggtattctcggcgaattaaccacgggtagtaagttagtgaaagctaacggtttaatggaagcttctaccatagcggcgattttgctcggttccgtagccggtggtgtgctggctgactggcatgtcctcgtcgccctggccgcatgcgcactggcctacggtggtgcggtcgttgccaatatctacattcccaaactggcggcggcgcgtccggggcagtcctggaatctcatcaacatgacccgcagtttcctgaatgcctgcacctcgctatggcgcaatggtgaaacgcgtttttcgctggtgggcaccagtttattctggggagcgggtgtcacgctgcgtttcctgttggtgctgtgggtaccggtggcgctgggcattaccgataacgctacgcccacctatctcaacgcgatggtagcgattggtatcgtggttggcgcaggtgcggcagcgaagttagttacgctggaaaccatgtcacgctgtatgccagccgggattttgattggcgtggtggtactgattttttccctgcaacacgagctgctgccagcctatgccttgttgatgctgattggcgtgatggggggcttttttgtcgttccgctcaatgcgttgctacaggagcggggtaaaaaaagcgtcggggcggggaatgcgattgcagtacaaaaccttggcgaaaacagcgccatgttgttgatgctgggcatttactcgctggcggtaatggtaggcatcccggtcgtgcccattggcattggcttcggtgcgctgtttgcgctggcaataacggcgctgtggatctggcagcgccgtcattaa

SEQ ID NO: 484248 - DNA, 1041 bp, Shigella sonnei
atgcaatatcaccgtataccccacagttcgctggaagtcagcacgctggggcttggcacgatgacgtttggtgaacagaacagcgaagccgacgcccacgcacaactcgactatgccgtcgctcagggcattaaccttatcgacgttgccgaaatgtacccagtacctccgcgccccgaaacgcaagggttaaccgaaacctacgtcggcaactggctggcgaaacatggcagccgcgaaaagttaattatcgcctccaaagtgagcggaccgtcgcgcaataatgacaagggcatccgcccggatcaggcgctggatcggaagaatatccgcgaagcgctgcatgacagcctcaagcgcctacacactgattacctcgatctttatcaggtgcactggccgcagcgcccgaccaactgcttcggcaaactcggttatagctggacggattctgcgcctgcggtttcgctgctggatacgctggacgcactggcagagtaccaacgcgcgggaaaaattcgttatatcggcgtgtcgaacgaaactgcatttggcgtaatgcgctacctgcatctggcggacaaacacgatctgccgcgtattgtcaccattcagaacccttacagtctgttaaaccgcagttttgaagtaggtctggcagaagtaagccagtatgaaggggtcgaactgctggcctattcgtgcctaggtttcggcacgctgaccgggaaatatctcaatggtgcaaaacccgctggcgcacgtaatacgctctttagtcggttcacccgctatagcggtgagcaaacgcaaaaagccgtcgcggcgtatgttgatatcgccagacgtcatggcctagaccctgctcagatggcgctcgcgtttgtacgccgtcaaccgtttgttgccagcactctgctgggcgcaaccacgatggatcagctgaaaactaacatcgaaagtttgcatctggagttaagcgaagacgtattagctgaaattgaagcggtgcatcaggtttatacttatccggcaccataa

SEQ ID NO: 484249 - DNA, 360 bp, Shigella sonnei; identical to SEQ ID NO: 372517

SEQ ID NO: 484250 - DNA, 576 bp, Shigella sonnei
atgcgtgtcatcaccctggcgggtagtcctcgctttccttctcgctccagctccttgctggaatatgcgcgggaaaaactaaatggcctggatgtagaggtttatcactggaatctgcaaaacttcgccccggaagatctgctttacgctcgtttcgatagtccggcactcaagaccttcaccgaacagctgcaacaggctgatggactgatagtcgctacacctgtgtataaagccgcctattccggcgcgctgaaaaccctgctcgacctgctgccagagcgcgctttgcaaggcaaagtggtgctaccgctggcgacgggcggtacggtggctcatctgctggcggtcgattatgcccttaagccagttttaagtgcgatgaaagcccaggagctcctgcacggcgtgtttgccgatgactcacaagttattgattaccatcacaaaccccagttcacgccaaatctgcaaacccgtcttgataccgcgctagaaactttctggcaggcattgcaccgccgcgatgttcaggttcctgaccttctgtctctgcgaggtaatgtccatgcgtaa

SEQ ID NO: 484251 - DNA, 960 bp, Shigella sonnei
atgcgtaacatcattaaactggcgctggcgggattgcttagcgtctctacttttgcggttgctgcagaatcctcgcctgaagcgttacgtataggctatcagaaaggcagtattggtatggtattggcaaaaagccaccagttactggaaaaacgctatccgcaatcaaaaatctcctgggtggagttccccgcgggtccgcaaatgttggaagcgttaaacgttggcagtattgatctcggcagtaccggggatattccgccaatctttgcccaggctgccggggctgatttgatatatgtgggcgtcgagccaccgaagcccaaagccgaagtgattctggtggcagaaaacagcccgatcaaaaccgtagccgatcttaaaggtcacaaagttgcctttcagaaaggttccagttcacacaaccttttactgcgtgcactgcgtcaggccggacttaagtttactgacatccagcccacttatctgacgccagctgatgcccgcgccgcgttccagcaaggtaacgttgacgcctgggctatctgggatccctactactccgctgcgttattacagggcggcgtgcgggtgctgaaagacggcaccgatctcaatcaaactggatcgttttatctggcagctcgcccctatgcagaaaaaaacggcgcttttattcagggcgtactggcaacctttagtgaggccgatgcgttaacccgcagccagcgcgagcaaagcatcgctttactggcaaaaacgatgggcttaccggcaccggtgattgcctcgtatctggatcatcgtcctcccaccaccatcaaaccggtgagcgctgaagttgccgccttacagcagcaaacggcagatctgttttatgaaaaccgtctggtgtcgaaaaaagttgatattcgccagcgcatctggcagcccactcacctggaaggaaaacaattatga

SEQ ID NO: 484252 - DNA, 615 bp, Shigella sonnei
atgagtctgaatatgttctggtttttaccgacccatggtgacgggcattatcttggaacggaagaaggttcacgcccggttgatcacggctatctgcaacaaattgcgcaagcggcggatcgtctgggctataccggtgtgctgatcccaacggggcgatcgtgtgaagatgcgtggctggtggcggcgtcgatgatcccggtgacgcagcggctgaagtttcttgtcgccctgcgtcccagcgtaacctcacctaccgttgccgctcgccaggccgccacgcttgaccgtctctcaaatggtcgtgcgttgtttaatctggtcacaggcagcgatccacaagagttggcaggcgacggcgtgttccttgatcatagcgagcgctacgaagcctcggcggaatttacccaggtctggcggggcgcttattgctgggggaaagcgtcgatttcaacggtaaacatattcatgtgcggggagcaaaactgctcttcccgccgattcaacagccgtatcctccgctttactttggcggatcgtcagatgtcgcccaggagctggcggcagaacaagttgatctctacctcacctggggcgaaccgccagagctggtaa

SEQ ID NO: 484253 - DNA, 516 bp, Shigella sonnei
gtgcgggcgaaagctgccgcgcatggacgcaaaattcgtttcggtattcgtctgcatgtgattgttcgtgaaactaacgacgaagcgtggcaggccgccgagcggttaatctcgcatcttgatgatgaaactatcgccaaagcacaggccgcattcgcccggacggattccgtaggacaacagcgaatggcggcgctacataacggcaagcgcgacaatctggagatcagccccaatttatgggcgggcgttggcttagtgcgcggcggtgccggaacggcgctggtgggcgatggtcctacggtcgccgcgcgaatcaacgaatacgccgcgcttggcatcgacagctttgtgctttcgggctacccgcatctggaagaagcgtatcgggttggcgagttgctgttcccacatctggatgtcgccattccggaaattccccagccgcagccgctgaatccgcaaggcgaagcggtggcgaatgattttatcccccgtaaagtcgcgcaaagctaa

SEQ ID NO: 484254 - DNA, 795 bp, Shigella sonnei
atgatggcaacgccagtgaagaagtggttattgcgcgttgccccctggtttttaccggtgggcatcgtggcggtgtggcaactggcctcctcggttggctggctgtcgacgcgtattttgccttcaccggaaggagtggtgacggcgttctggacgctctccgccagcggcgaattgtggcagcatctggcgatcagttcctggcgggcgctgattggcttttcaattggcggatcgctgggcttgattctgggactgattagcgggctgtcacgctggggagaacggctgctggatacctcaattcagatgttgcgcaacgtaccgcatctggcgctgatcccgctggtgattttgtggtttggcattgatgaatccgcaaaaatctttctggtggcgctcggcacgctattccccatttatatcaacacctggcatggcatccgtaatatcgatcgcggtctggtggaaatggcgcgtagctatggattatccggcataccgctgtttatccatgtgatcctgcctggtgccctgccctcaattatggtcggcgtgcgttttgcgttgggcctgatgtggctgacgctgattgttgccgaaaccatttctgccaattcaggcattggttatctggcgatgaatgcgcgggagtttttgcaaacggacgtggtggtagtcgctattattctttacgccctgctcggcaaacttgctgacgtcagcgcgcagctgttagagcgcctctggttgcgctggaacccggcttatcatttgaaggaggccacggtatga

SEQ ID NO: 484255 - DNA, 768 bp, Shigella sonnei
atgaatactgctcgtctgaaccagggcacaccattgttgctcaatgcagtaagcaaacattacgcggaaaatatcgtcctgaaccaactggatttacatattccggcaggtcagtttgtggcggtggtgggccgcagcggtggtggcaaaagtaccctgctgcgcctgctggcaggtctggaaacgccaaccgcaggcgatgtgttagcgggcaccacaccgctggctgagattcaggaagacacgcgaatgatgtttcaggatgcgcgtctgctgccgtggaaatcggtgattgataacgttgggttaggccttaaaggccagtggcgcgatgccgcgcgtcgggcgttggctgcagtaggactggagaatcgcgccggggaatggcctgccgcactttctggcgggcagaaacagcgtgtggcgctggcaagagcgttgattcatcgaccgggtttattgttgcttgatgaaccgctcggggcactggacgccttaacgcgactcgagatgcaggatttgattgtgtcactttggcagcagcacggctttaccgtactgttggtgacgcatgatgtgagcgaagcggtagcaatggctgaccgggtgttgttaattgaagagggaaaaattggtctggatttgacagtggatatcccccgtccgcgtcgattagggtcggtgcgattagcggagctggaagcggaagtattgcaacgggtaatgcggcgtgggcattctgaacaactgattcggcgtcatggttaa

SEQ ID NO: 484256 - DNA, 2613 bp, Shigella sonnei
atgactcaacagccacaagccaaataccgtcacgattatcgtgcgccagattaccagattactgatattgacttgacctttgacctcgacgcgcaaaagacggtcgttaccgcggtcagccaggctgtccgtcatggtgcatcagatgctccacttcgtctcaacggcgaagacctcaaactggtttctgttcatattaatgatgagccgtggaccgcctggaaagaagaagagggcgcactggtcatcagtaatttgccggagcattttacgcttaagatcgttaatgaaataagcccggcggcgaataccgcgctggaagggctttatcagtcaggcgatgcgctttgcacccagtgtgaagccgaaggtttccgccatattacgtattatctcgaccgcccggacgtgctggcgcgttttaccaccaaaattattgccgataaaaccaaatatcccttcctgctttccaacggtaaccgcgttgcgcaaggtgaactggaaaacggacgccattgggtacagtggcaggacccgttcccgaaaccgtgctacctgtttgcgctggtggcaggcgactttgatgtactgcgcgacacctttaccacgcgttctggtcgcgaagtggcgctggagctgtacgtcgatcgcggcaaccttgatcgcgcgccgtgggcgatgacctcgctgaaaaactcaatgaaatgggatgaagaacgcttcggcctggagtatgacctcgacatctatatgatcgtcgcggtggatttcttcaatatgggcgcaatggagaataagggtctgaatatctttaactccaaatatgtgctggcccgcaccgacaccgccaccgacaaagattacctcgatattgaacgcgttatcggccatgaatatttccataactggaccggtaaccgagtgacctgccgcgactggttccagctcagcctgaaagaaggtttaaccgtcttccgcgatcaggaattcagctctgaccttggttcccgcgcagttaaccgcatcaataatgtgcgcaccatgcgcggattgcagtttgcggaagacgccagcccgatggcgcacccaatccgcccggacatggtcattgagatgaacaacttctacaccctgaccgtttacgagaagggcgcggaagtgatccgtatgatccacaccctgctgggcgaagaaaacttccagaaagggatgcaactctatttcgagcgtcatgatggtagcgcagcgacctgtgacgactttgtgcaggcgatggaagatgcgtcgaatgttgatctctcccatttccgccgttggtacagccagtccggtacgccgattgtgaccgtcaaagacgactacaatccggaaactgagcagtacaccctgaccatcagccagcgcacgccagccacgccggatcaggcagaaaaacagccgctgcatattccgtttgccatcgaattgtatgacaacgaaggcaaagtgatcccgttgcagaaaggcggtcatccggtgaattccgtgctgaacgtcacccaggcggaacagacctttgtttttgataatgtctacttccagccggtgcctgcgctgctgtgcgaattctctgcgccagtgaaactggaatataagtggagtgatcagcaactgaccttcctgatgcgtcatgcgcgtaatgatttctcccgttgggatgcggcgcaaagtttgctggcaacctacatcaagctgaacgtcgcccgtcatcagcaagggcagccgctgtctctgccggtacatgtggctgacgctttccgcgcggtgctgctcgatgagaagattgatccggcgctggcggcagaaatcctgacgctgccttctgtcaatgaaatggctgaactgttcgatatcatcgacccgattgctattgccgaagtacgcgaagcactcactcgtactctggcgactgaactggcggatgagctgctggctatttacaacgcgaattaccagagcgagtaccgtgttgagcatgaagatattgcaaaacgcactctgcgaaatgcctgcctgcgcttccttgcttttggtgaaacgcatctggctgacgtgctggtgagcaagcaataccatgaagcaaacaatatgaccgatgcgctggcagcgctttctgcggcggttgctgcacagctgccttgccgtgacgcgctgatgcaggagtacgacgataagtggcatcaggacggtctggtgatggataaatggtttatcctgcaagccaccagcccggcggcgaatgtgctggagacggtgcgtggtctgttgcagcatcgctcatttaccatgagcaacccgaaccgtattcgttcgttgattggtgcgtttgcgggcagcaacccggcagcgttccatgccgaagatggcagcggttaccagttcctggaggaaatgcttaccgacctcaacagccgtaacccgcaggtagcttcacgtctgattgaaccgctgattcgcctgaaacgttatgatgccaaacgtcaggagaaaatgcgcgcggcgctggaacagttgaaagggctggaaaatctctctggcgatctgtacgagaagatcaccaaagcactggcttga

SEQ ID NO: 484257 - DNA, 1203 bp, Shigella sonnei; identical to SEQ ID NO: 473483

SEQ ID NO: 484258 - DNA, 1401 bp, Shigella sonnei
atgagcgttgtgcctgtagccgacgtactccagggccgcgtagccgttgacagcgaagtcaccgtacgcggatgggtacgtacccgccgagattcaaaagctggcatctccttcctcgccgtttatgacggttcctgctttgatcctgtacaggctgtcatcaataattctctgcccaattacaatgaagacgtcctgcgtctgaccaccggctgctcggtcattgtgacgggtaaagtcgtggcatcgccgggccaggggcaacaatttgaaattcaggccagcaaggttgaagttgctggttgggttgaagatccagacacttacccgatggcggcaaaacgccacagcattgagtatctgcgtgaagtcgctcacctgcgtccgcgcacaaacctgattggtgccgtcgcgcgcgttcgccatacgctggcgcaggcgctgcatcgcttctttaacgagcagggattcttctgggtttcaacgccactgattaccgcatctgataccgaaggtgcaggcgaaatgttccgcgtttctacgctggatctggaaaacctgccgcgtaacgatcagggcaaagtggatttcgacaaagacttctttggtaaagagtctttcctgaccgtatctggccagttgaacggcgaaacctacgcttgcgcattatccaaaatttataccttcggcccgactttccgtgctgaaaactccaacaccagccgtcacctggcggaattctggatgctggagccggaagtggcgtttgctaacctgaacgatatcgcgggtctggctgaagccatgctgaaatatgtcttcaaagcggttctcgaagaacgcgcagacgacatgaaattcttcgctgaacgcgtagataaagatgccgtttcacgtctggaacgcttcattgaggccgatttcgcgcaggtggattacaccgacgcagtgaccattctcgaaaactgcggcaggaagtttgaaaacccggtttactggggcgtcgatctctcttctgagcatgagcgttatctggcggaagaacactttaaagcaccggtagtggttaaaaactatccgaaagatattaaagcgttctatatgcgcctcaacgaagacggtaaaaccgttgcggctatggacgttctggctccgggcatcggtgagatcattggtggctcccagcgtgaagaacgtctggacgttctggacgagcgtatgctggaaatgggcctgaataaagaagattactggtggtatcgcgatctgcgtcgctacggtactgttccgcattcaggtttcggtcttggttttgaacgcctgattgcttacgtaactggcgtgcaaaacgtgcgtgatgtgattccgttcccacgtactccgcgcaacgccagcttctga

SEQ ID NO: 484259 - DNA, 1089 bp, Shigella sonnei
atgatgaagcgcaatattctggcagtgatcgtccctgctctgttagtagcaggtactgcaaacgctgcagaaatctataacaaagatggcaacaaagtagatctgtacggtaaagctgttggtctgcattatttttccaagggtaacggtgaaaacagttacggtggcaatggcgacatgacctatgcccgtcttggttttaaaggggaaactcaaatcaattccgatctgaccggttatggtcagtgggaatataacttccagggtaacaactctgaaggcgctgacgctcaaactggtaacaaaacgcgtctggcattcgcgggtcttaaatacgctgacgttggttctttcgattacggccgtaactacggtgtggtttatgatgcactgggttacaccgatatgctgccagaatttggtggtgatactgcatacagcgatgacttcttcgttggtcgtgttggcggcgttgctacctatcgtaactccaacttctttggtctggttgatggcctgaacttcgctgttcagtacctgggtaaaaacgagcgtgacactgcacgccgttctaacggcgacggtgttggcggttctatcagctacgaatacgaaggctttggtatcgttggtgcttatggtgcagctgaccgtaccaacctgcaagaagctcaacctcttggcaacggtaaaaaagctgaacagtgggctactggtctgaagtacgacgcgaacaacatctacctggcagcgaactacggtgaaacccgtaacgctacgccgatcactaataaatttacaaacaccagcggcttcgccaacaaaacgcaagacgttctgttagttgcgcaataccagttcgatttcggtctgcgtccgtccatcgcttacaccaaatctaaagcgaaagacgtagaaggtatcggtgatgttgagctggtgaactactttgaagtgggcgcaacctactacttcaacaaaaacatgtccacctatgttgactacatcatcaaccagatcgattctgacaacaaactgggcgtaggttcagacgacaccgttgctgtgggtatcgtttaccagttctaa

SEQ ID NO: 484260 - DNA, 1191 bp, Shigella sonnei
atgtttgagaacattaccgccgctcctgccgacccgattctgggcctggccgatctgtttcgtgccgatgaacgtcccggcaaaattaacctcgggattggtgtctataaagatgagacgggcaaaaccccggtactgaccagcgtgaaaaaggctgaacagtatctgctcgaaaatgaaaccaccaaaaattacctcggcattgacggcatccctgaatttggtcgctgcactcaggaactgctgtttggtaaaggtagctccctgatcaatgacaaacgtgctcgcacggcacagactccggggggcactggcgcactacgcgtagctgccgatttcctggcaaaaaataccagcgttaagcgagtgtgggtgagcaacccaagctggccgaaccataagagcgtctttaactctgcaggtctggaagttcgtgaatacgcttattatgatgcggaaaatcacactcttgacttcgatgcactgattaacagcctgaatgaagctcaggctggcgacgtagtgctgttccatggctgctgccataacccaaccggtatcgaccctacgctggaacaatggcagacactggcacaactctccgttgagaaaggctggttaccgctgtttgacttcgcttaccagggttttgcccgtggtctggaagaagatgctgaaggactgcgcgctttcgcggctatgcataaagagctgattgttgccagttcctactctaaaaactttggcctgtacaacgagcgtgttggcgcttgtactctggttgctgccgacagtgaaaccgttgatcgcgcattcagccaaatgaaagcggcgattcgcgctaactactctaacccaccagcacacggcgcttctgttgttgccaccatcctgagcaacgatgcgttacgtgcgatttgggaacaagagctgactgatatgcgccagcgtattcagcgtatgcgtcagttgttcgtcaatacgctgcaggaaaaaggcgcaaaccgcgacttcagctttatcatcaaacagaacggcatgttctccttcagtggcctgacaaaagaacaagtgctgcgtctgcgcgaagagtttggcgtatatgcggttgcttctggtcgcgtaaatgtggccgggatgacaccagataacatggctccgctgtgcgaagcgattgtggcagtgctgtaa

SEQ ID NO: 484261 - DNA, 648 bp, Shigella sonnei
atgaactatcgtattattccggtcaccgcattctcccagaactgttcattaatctggtgtgaacaaacccgtctggccgcactggtcgatcctggcggcgatgcggaaaaaatcaaacaggaagttgatgacagcggcctgacactgatgcagatcctgctgacgcatggtcatctggaccacgttggcgcagcggcggaactggcgcaacattacggcgtgccggtttttggcccggaaaaagaagatgagttctggctgcaaggcttgcctgcgcaaagtcgtatgtttggtctggaagagtgccagccgctgacgccagatcgttggctgaacgaaggcgataccatcagcatagggaatgtgactttacaggtgttacattgccctgggcatacgccgggtcatgtcgtgttttttgatgatcgggcaaagctgctgatttctggcgatgttattttcaaaggcggagtagggcgcagtgacttcccgcgtggcgatcataatcaactgatttcttcaatcaaagataaattgctgccactgggggatgacgtgacatttattccgggtcacggaccattatccacacttggttatgaacgcctgcataatcccttcctgcaagacgaaatgcccgtctggtaa

SEQ ID NO: 484262 - DNA, 549 bp, Shigella sonnei
atggacaaattcgacgctaatcgccgcaaattgctggcgcttggtggcgttgcactcggtgccgccatcctgccgacccctgcgtttgcaacactctctaccccacgcccgcgcattttgacactcaataatcttcataccggagagtcaatcaaagcggagtttttcgatggcagaggctatattcaggaagaattggcaaaacttaaccattttttccgcgattaccgcgcgaacaaaataaagtccatcgacccaggattattcgaccagttgtatcgcctgcaagggttgttaggcacgcgcaaaccggtgcaactcatttccggttatcgttctattgataccaacaatgaactacgcgcccgcagccgtggagtagcgaagaaaagctatcacactaaaggccaggcgatggatttccatattgaaggtatcgcgttaagcaatattcgcaaagccgcgttatctatgcgcgcaggtggtgtaggatattatccacgtagtaactttgtgcatattgataccgggccagcacggcactggtag

SEQ ID NO: 484263 - DNA, 1848 bp, Shigella sonnei
atgttgcttaatatgatgtgtggtcgtcggctgtcggcaatcagtttgtgcctggccgtaacattcgctccactgttcaatgcgcaggccgatgagcctgaagtaatccctggcgacagcccggtggctgtcagtgaacagggcgaggcactgccgcaggcgcaagccacggcaataatggcggggatccagccattgcctgaaggtgcggcagaaaaagcccgcacgcaaatcgaatctcaattacccgcaggttacaagccggtttatcttaaccagcttcaactgttgtatgccgcacgcgatatgcaacccatgtgggaaaaccgtgatgctgttaaagccttccagcaacagctggcagaggtggcgattgccgttttccagccgcagtttaataaatgggtagagttactgaccgatcctggtgttaacgggatggcacgcgacgtagtgctctctgatgcgatgatgggctatctccatttcattgcaaatattccggtcaaaggcactcgctggctatatagcagtaaaccttatgcacttgcaacgccgccgctctcggtgattaaccaatggcagctggcgctggataaaggtcaattgcctacgtttgttgcaggactggcaccgcagcatccgcaatatgcggcgatgcatgaatcgttactggccttactcagtgacaccaaaccgtggccccaactgaccggcaaagcaacgttgcgcccagggcagtggagtaacgacgtaccggcgttgcgcgaaatattgcaacgcacaggcatgttggacggggggccgaaaattactctacctggcgatgacacgccaactgacgcggtagtcagcccatccgctgttactgttgaaacagcagaaactaagccgatggacaagcaaacgacgtctcgtagtaaacctgcgcctgccgttcgcgccgcctacgataatgaactggtggaagccgttaaacgttttcaggcatggcaaggattgggggcagatggtgctattggcccggcaacacgtgactggttaaacgtaacgcccgcccagcgtgctggcgtgttggctctcaacatccagcgattgcgcttgctgccaacagagctttctaccgggatcatggttaacattccggcctattcgctggtctactatcagaacggcaatcaggtgctggattcgcgagtcattgtcggtcgccccgatcgcaaaacgccgatgatgagcagtgcccttaacaacgtagtggtaaacccgccgtggaacgtacctccaactctggcacgcaaagatattctgccaaaagtgcgcaacgatccgggatatctcgaaagccatggctatacggtgatgcgcggctggaacagcagagaagcgattgacccatggcaggttgactggtctacaatcacggcctcgaatttaccgttccgcttccagcaggctccaggcccacggaactcgctggggcgctataaattcaatatgccgagttcagaggccatttatttgcatgacacgccgaaccacaatctgttcaagcgtgatacacgcgcattgagctcaggctgtgtacgagtgaataaagcttccgatctggcgaatatgctgttgcaggatgcaggctggaatgacaaacgtatttctgatgcgctgaagcagggtgatacacgttacgtcaatattcggcagtcgattccggtgaatctctactacctgacggcctttgttggtgcagatggtcgtacccagtatcgtacagatatttacaattatgatctgcctgcgcgatccagctcgcaaatcgtatcgaaagcggaacaattaatcaggtaa

SEQ ID NO: 484264 - DNA, 1029 bp, Shigella sonnei
atggctaccgccaaaaaaataaccattcatgatgttgcgctggctgcgggcgtgtcggtaagtaccgtttcgctggtgcttagtggcaaagggcgaatctctaccgccacaggagaacgcgttaacgccgccattgaagagctgggatttgtgcgcaatcgccaggcgtcggcgctgcgcggcgggcaaagcggcgtcattggtttgatcgtccgtgatttatctgcgccgttttacgccgaattgacggccggattgacggaagctctggaagcgcagggacggatggtttttttgcttcacggcggtaaagacggcgagcagctggcacagcggttttcactgttactgaatcagggtgtcgatggtgtggtaattgccggggctgcaggaagcagcgatgacctgcgacggatggcagaagaaaaagctatcccggtgattttcgcttcccgtgccagttatcttgatgatgttgatacggttcgcccggacaacatgcaggctgcacagttgttgacggagcatctcattcgcaatgggcatcagcggatcgcctggctgggagggcaaagttcctcattaacccgggcagaacgggtgggaggctattgtgcaactctactaaaatttggcctgccgtttcacagcgattgggtgctggagtgcacatccagccagaagcaagccgcggaagctatcacggcgcttttacgtcataacccgaccatcagtgctgtggtttgctataacgaaactattgcgatgggggcatggtttggtttgctgaaagcagggcggcaaagcggggaaagcggagtcgatcgttactttgagcaacaagtttcgctggcggcatttaccgatgcgacaccaaccacacttgatgatatacccgttacctgggccagcacgcctgcgcgggaacttggtaccacacttgcggatcgcatgatgcaaaaaatcacccatgaagagacgcattcacgcaatcttattattcccgcccggctcattgcagcgaaataa

SEQ ID NO: 484265 - DNA, 1593 bp, Shigella sonnei
atgacggcgaaaacagcaccgaaagtcacgctgtgggagttcttccagcagttaggcaaaaccttcatgttacccgtggcattattgtcgttctgcggcattatgctcggcattggtagttctcttagtagccacgatgtcatcaccctgatcccggtcctgggcaaccccgtgttgcaggctatctttacctggatgagtaagattggctcgtttgcttttagtttcctgccagtcatgttctgtatcgccatcccgctgggtctggcacgcgaaaacaaaggcgtagcggcattcgctggcttcgtcggttatgcggtaatgaacctcgcggtaaacttctggttgaccaataaaggcattctgccaaccacggacgccgcggttctgaaagccaataacatccagagcattcttgggatccagtcgatcgacaccgggatcctcggtgcggtgatcgccggtattatcgtctggatgctgcatgagcgattccataatatccgcctgccggatgcgcttgcattcttcggcggtacgcgcttcgtaccaatcatctcctcgctggtgatgggccttgtcggcctggtgattccattagtctggccgattttcgcgatgggtattagcggcttgggccatatgataaacagcgcgggtgatttcggaccgatgctgtttggtaccggtgaacgtctgctgttgccgtttggtctgcatcacattctggtggcattaattcgctttaccgacgcaggcggcacgcaggaagtctgcggtcaaaccgtcagcggcgcattgaccatcttccaggcgcaattgagttgcccgaccactcacggtttttctgaaagcgccacgcgtttcctttcgcaaggcaaaatgcctgcgtttctcggcggtctgccaggtgcagcgttagcgatgtatcactgcgcgcgcccggaaaatcgccataaaattaaagggctgctgatttctggcctgatcgcctgtgtcgttggcggcacgaccgaaccgctggaattcctgttcctgttcgtggcgccagttctgtatgtcatccacgcgctgttaaccggcctcggcttcactgtcatgtctgtgctcggcgtcaccatcggtaataccgacggcaatatcatcgacttcgtggtgttcggtattttgcatggtctgtcaaccaagtggtacatggtgccagtggtggcggcaatctggtttgtcgtttactacgtcatcttccgtttcgctatcacccgcttcaatctgaaaaccccggggcgcgatagcgaagtggccagttcaatcgaaaaagccgttgccggtgcgccgggtaaatcaggttacaacgttccggcaatcctcgaagccttaggcggtgccgacaatattgttagcctcgataactgcattacccgtctgcgtttgtctgtgaaagatatgtcgcttgttaatgtgcaggcactgaaggacaatcgggcaattggcgtagtacaacttaatcaacataacctgcaggttgttatcgggccacaagttcagtcagtaaaagatgaaatggccggtctgatgcatactgtccaggcataa

SEQ ID NO: 484266 - DNA, 1173 bp, Shigella sonnei
atgttcgatttttcaaaggtcgtggatcgtcatggcacatggtgtacacagtgggattatgtcgctgaccgtttcggcactgctgacctgttaccgttcacgatttcagacatggattttgccactgccccctgcattatcgaggcgctgaatcagcgcctgatgcacggcgtatttggctacagccgctggaaaaacgatgagtttctcgcggctattgcccactggttttccacccagcattacaccgcaattgatacgcagacggtggtgtatggcccttctgtcatctatatggtttcagaactgattcgtcagtggtctgaaacaggtgaaggcgtggtgatccacacgcccgcctatgacgcattttacaaggccattgaaggtaaccagcgcacagtaatgcccgttgctttagagaagcaggctgacggctggttttgcgatatgggcaagctggaagccgttttggcgaaaccagaatgtaaaattatgctcctgtgtagcccacagaatcctaccgggaaagtgtggacgtgcgatgagctggagatcatggctgacctgtgcgagcgtcatgatgtgcgggttatttccgatgaaatccatatggatatggtctggggcgagcagccgcatattccctggagtaatgtggcgcggggagactgggcgttgctgacgtcgggatcgaaaagtttcaatattcccgcgctgaccggtgcttacgggattatagaaaatagcagcagccgtgatgcctatttatcggcactgaaaggacgtgatgggctttcttccccttcggtactggcgttaactgcccatatcgccgcctatcagcaaggtgcaccgtggctggatgccttacgcgtctatctgaaagataacctgacgtatatctcagataaaatgaacgccgcgtttcctgaactcaactggcagatcccgcaatccacttatctggcctggcttgatctacgtccgttgaatattgacgacaacgcgttgcaaaaagcgcttatcgagcaagaaaaagtcgcgatcatgccggggtatacctatggtgaagaaggtcgtggttttgtccgtctcaatgccggctgcccacgttcgaaactggaaaaaggtgtggctggattaataaacgccatccgcgctgttcgctaa

SEQ ID NO: 484267 - DNA, 1002 bp, Shigella sonnei
atgattgataccaccctgccattaactgatatccatcgccaccttgatggcaacattcgtccccagaccattcttgaacttggccgccagtataatatctcgcttcctgcacaatccctggaaacactgattccccacgttcaggtcattgccaacgaacccgatctggtgagctttctgaccaaacttgactggggcgttaaagttctcgcctctcttgatgcctgccgccgcgtggcatttgaaaacattgaagatgcagcccgtaacggcctgcactatgtcgagctgcgtttttcaccaggctacatggcaatggcacatcagctgcctgtagcgggtgttgtcgaagcggtgatcgatggcgtacgtgaaggttgccgcacctttggtgtgcaggcgaagcttatcggcattatgagccgaaccttcggcgaagccgcctgtcagcaagagctggaggcctttttagcccaccgtgaccagattaccgcacttgatttagctggtgatgaacttggattcccgggaagtctgttcctttctcacttcaaccgcgcgcgtgatgcgggctggcatattaccgtccatgcaggcgaagctgccgggccggaaagcatctggcaggcgattcgtgaactgggtgcggagcgtattggacatggcgtaaaagccattgaagatcgggcgctgatggattttctcgccgagcaacaaattggtattgaatcctgtctgacctccaatattcagaccagcaccgtagcagagctggctgcacatccgctgaaaacgttccttgagcatggcattcgtgccagcattaacactgacgatcccggcgtacagggagtggatatcattcacgaatataccgttgccgcgccagctgctgggttatcccgtgagcaaatccgccaggcacagattaatggtctggaaatggctttcctcagcgcagaggaaaaacgcgcactgcgagaaaaagtcgccgcgaagtaa

SEQ ID NO: 484268 - DNA, 1041 bp, Shigella sonnei
atgagcgacaacatccgtgttgggttgattgggtatggttatgcgagcaaaaccttccatgcgcccctgattgcgggcacgcccgggctggaactggcggtaatctccagcagtgatgaaacaaaagtaaaagccgactggccaacggttacggttgtctctgagccgaagcatctgtttaacgatcccaacatagacctgattgtcattcctacacccaacgatacccatttcccgttagccaaagcggcgcttgaggcgggtaaacatgtggtcgttgataaaccctttaccgtgacactgtcacaagcgcgagagctggatgcgctggcaaaaagcctggggcgtgtgctgtctgtattccataaccgtcgttgggatagcgatttcttgacgctaaaaggtttgctcgcggaaggcgtgctgggtgaagttgcttactttgagtctcattttgaccgcttccgtccgcaggtgcgcgatcgttggcgtgaacagggcggcccaggcagcggtatctggtacgatttagcaccgcatcttcttgatcaggccattacgctatttggtttaccggtcagcatgacggtagatttggcacagttacggcccggagcgcagtcgaccgattatttccacgccatcttgtcctatccacagcggcgagtcattttacacggtaccatgctggcagccgctgagtcagcacggtatatcgtgcatggatcccgaggcagttgtgtgaaatatggcctcgatccacaggaagaacgtctgaaaaatggcgagcgtctgccgcaggaagactggggctacgatatgcgtgatggcgtacttacccgcgtggaaggtgaggaacgtgtcgaagaaacgctgttgacggtgcctgggaattatccggcttactatgcggcgattcgtgatgcgttaaatggcgatggtgaaaatccggttccggcaagccaggcaatccaggtaatggagttgattgagctgggcatcgaatccgccaaacatcgcgcgacgttgtgccttgcgtga

SEQ ID NO: 484269 - DNA, 216 bp, Shigella sonnei; identical to SEQ ID NO: 261393

SEQ ID NO: 484270 - DNA, 441 bp, Shigella sonnei
atgaccaccacaacgccacaacgtattggaggctggttgcttggcccgttggcctggcttttagtcgctctgttgagtacgacgctggcgttgttgctgtataccgctgcgttatcttctccgcaaacatttcaaacgctcggcggacaagcactgacgacacaaatcttatggggcgtttcttttattaccgctatcgccatgtggtattacacactgtggttgaccatcgctttctttaaacgtcggcgttgtgttcctaaacactatattatctggctgcttatttccgtattgctggcagtaaaagcattcgctttttcacccgtggaagatggcatagccgttcgccagttgctgtttactttgttggcaaccgcattgatcgtcccctatttcaaacgctcgtcgcgggtaaaagcgacgtttgtgaatccgtaa

SEQ ID NO: 484271 - DNA, 582 bp, Shigella sonnei
atgactgactacctgttactgtttgtcggaactgtactggtcaataactttgtactggtcaagtttctcggtctctgtccgtttatgggggtttccaaaaaactggaaaccgcgatgggcatggggctggcaacaacgtttgtgatgacgctggcgtctatttgcgcctggcttatcgatacgtggattttgatcccacttaatctgatttacctgcgcaccctggcatttattctggtgattgctgtggtcgtgcagttcaccgagatggtggtgcgcaaaaccagcccggtgctttaccgtctgctggggatttttttgccgcttatcaccaccaactgtgcagtgctcggcgtggcgttgctgaatatcaatctcgggcacaatttcttgcagtcggcgctgtacggtttttccgccgctgtcggtttctcgctggtgatggtgctcttcgccaccatccgcgaacgccttgctgtggctgatgtcccggcaccttttcgcggtaatgccattgcgttaattaccgcaggtcttatgtctctggcctttatgggctttaatggtttggtgaagttgtaa

SEQ ID NO: 484272 - DNA, 579 bp, Shigella sonnei
atgaatgctatctggattgccgttgccgccgtgagcctgctgggcctggcgtttggcgccattctgggttatgcctcccgccgttttgcggtggaagacgatccggtcgttgagaaaattgacgaaatcttaccgcagagccagtgtggtcagtgcggttatcccggctgtcgcccctacgcggaagccatcagctgtaacggtgaaaaaatcaaccgttgcgccccaggtggcgaagctgtgatgctaaaaattgccgagttgcttaatgtcgagccgcagccgctggatggcgaagcgcaagagctaacgcctgcgcggatggtggcggttattgatgaaaataactgtattggctgcactaaatgtattcaggcttgtccggtagacgccatcgttggcgctacccgtgccatgcatacggtaatgagtgatctctgtacgggctgcaatttatgtgttgatccgtgcccgacgcactgcatctcgttgcaaccggtcgcagaaacacctgactcctggaaatgggatctgaacaccattcccgtgcgtatcattcccgtggaacaccatgcttaa

SEQ ID NO: 484273 - DNA, 2127 bp, Shigella sonnei
atgcttaagttattctctgcattcagaaaaaataaaatctgggatttcaacggcggcatccatccaccggagatgaaaacccagtccaacggtacacccctgcgccaggtaccactggcgcagcgttttgttattccactgaaacagcatattggcgctgaaggtgagttgtgcgttagcgtcggcgataaagtattgcgcggccagccgcttacccgtggtcgcggcaaaatgctgcctgttcacgcgcccacctcgggtaccgttacggctattgcgccccactctacggctcatccttcagctttagctgaattaagcgtgattattgatgccgatggtgaagactgctggatcccgcgcgacggctgggccgattatcgcactcgcagtcgcgaagagttaatcgagcgcatacatcagtttggtgttgccgggctgggcggtgcaggattcccgacaggcgttaaattgcagggtggcggagataagattgaaacgttgattatcaacgcggctgagtgcgagccgtacattaccgccgatgaccgtttgatgcaggattgcgcggctcaggtcgtagagggtattcgcattcttgcgcatattctgcagccacgcgaaattcttatcggcattgaagataacaaaccgcaggcgatttccatgctgcgcgcggtgctggcggactctaacgatatttctctgcgggtgattccaaccaaatatccttctggcggtgctaaacaattaacctacattctgaccgggaagcaggttccacatggcgggcgttcatccgatatcggcgtattaatgcaaaacgtcggcactgcttatgcagtgaaacgtgccgttattgatggcgagccgattaccgagcgtgttgtaaccctgactggcgaagcaatcgctcgcccgggcaacgtctgggcacggctggggacgccagtgcgtcatttattgaatgatgccggattctgcccctctgccgatcaaatggtgattatgggtggcccgctaatgggctttaccttgccatggctggatgtcccggtcgtaaagattaccaactgtctgttggctccctctgccaatgaacttggcgaaccacaggaagaacaaagctgcatccggtgtagcgcctgtgctgacgcctgccctgcggatcttttgccgcaacagttgtactggttcagcaaaggtcagcaacacgataaagctaccacgcataacattgctgattgcattgaatgtggggcttgcgcgtgggtttgcccgagcaatattcccctggtgcaatatttccgtcaggaaaaagctgaaattgcggctattcgtcaggaagaaaagcgcgccgcagaagccaaagcgcgtttcgaagcgcgccaggctcgtctggagcgcgaaaaagcggctcgccttgaacgacataagagcgcagccgttcaacctgcagccaaagataaagatgcgattgctgccgctctggcgcgggtgaaagagaaacaggcccaggctacacagcctattgtgattaaagcgggcgaacgcccggataacagtgcaattattgcagcacgggaagcccgtaaagcgcaagccagagcgaaacaggcagaactgcagcaaactaacgacgcagcaaccgttgctgatccacgtaaaactgccgttgaagcagctatcgcccgcgccaaagcgcgcaagctggaacagcaacaggctaatgcggaaccagaagaacaggtcgatccgcgcaaagccgccgtcgaagccgctattgcccgtgccaaagcgcgcaagctggaacagcaacaggctaatgcggaaccagaagaacaggtcgatccgcgcaaagccgccgtcgaagccgctattgcccgtgccaaagcgcgcaagctggaacagcaacagactaacgcagaaccagaagaacaggttgatccgcgcaaagccgccgtcgaagccgctattgcccgagccaaagcgcgcaaactggaacagcaacaggctaacgcagaaccagaagaacaggttgatccgcgcaaagcggcagttgccgcggctattgcccgcgctcaggccaaaaaagccgcccagcagaaggttgtaaacgaggactaa

SEQ ID NO: 484274 - DNA, 1059 bp, Shigella sonnei
atggtattcagaatagctagctccccttatacccataaccagcgccagacatcgcgcattatgctgttggtgttgctcgcagccgtgccaggaatcgcagcgcaactgtggttttttggttggggtactctcgttcagatcctgttggcatcggttagtactctgttagccgaagctctcgtactcaaactacgcaagcagtcggtagccgcaacgttgaaagataactcagcattgctgacaggcttattgctggcggtaagtattccccccctcgcgccatggtggatggtcgtgctgggtacggtgtttgcggtgatcatcgctaaacagttgtatggcggtctggggcaaaacccgtttaatccggcaatgattggttatgtggtcttactgatctccttcccggtgcagatgaccagctggttaccgccacatgaaattgcggtcaacatccctggttttatcgacgccatacaggttattttcagcgggcataccgccagtggtggtgatatgaacacactacgcttaggtattgatggcattagtcaggcgacaccgctggatacatttaaaacctctgtccgtgccggtcattcggttgaacagattatgcaatatccgatctacagcggtattctggcgggcgctggttggcaatgggtaaatctcgcctggctggctggcggcctgtggttgctatggcagaaagcgattcgctggcatattcccctcagcttcttagtaacgctggcgttatgcgcaacgttgggctggttgttctcaccagaaacactggcagcaccgcaaattcatctgctgtctggtgcgaccatgctcggcgcattctttattttgactgacccggttaccgcttctacgaccaatcgtggtcgtcttattttcggcgcgcttgcgggcttattagtctggttgatccgcagtttcggcggctatcctgacggcgtggcttttgccgtcctgctggcgaacatcacggttcctctgatcgattactacacgcgtccgcgcgtctacggccatcgcaaagggtaa

SEQ ID NO: 484275 - DNA, 621 bp, Shigella sonnei
atgctgaaaactatccgaaaacacggcattacgttagcgctatttgcagcgggttcaacagggttaactgcggccatcaaccagatgaccaaaacgacgattgctgaacaggccagtctgcaacaaaaggcattatttgatcaggtgctgccagccgaacgctataacaatacgctggcacagagttgctatctggtaactgcgccagagttaggtaaaggtgagcatcgggtttacatcgccaaacaggatgacaaaccggtagccgccgttctggaagcaaccgcgccagatggctattccggtgcgattcagctgctggtgggagccgattttaacggcacggtacttggcacgcgcgtgacagagcaccacgaaacgccagggcttggcgataaaatcgaactgcgcctttctgactggatcacccattttgcgggtaaaaaaatcagtggtgcggatgatgcgcactgggcggtgaagaaagatggtggtgatttcgaccagttcaccggcgcgacgattactccccgcgcggtggttaatgcggtaaaacgcgccggattgtacgctcagacgttaccggcacaactttctcaacttcctgcctgtggagaataa

SEQ ID NO: 484276 - DNA, 696 bp, Shigella sonnei
gtgagcgaaattaaagacgttattgttcaggggttgtggaaaaacaactctgcgctggtccagttgctcggcctttgtcctctgttggcggtcacgtccactgccactaacgctctgggtttaggacttgcgactacgctggtactgacgctgaccaacctgaccatttcgacgctgcgtcactggacgccagccgagatccgcattcccatttacgtgatgatcatcgcctcggtggtcagcgctgtacagatgctgatcaacgcctacgcctttggcctgtatcaatcattagggatttttattccgctgattgtcactaactgtatcgttgtgggccgcgctgaagccttcgccgccaaaaaaggtccggcgctttcggcactggacggcttttcaattggtatgggcgcaacctgcgccatgttcgtgctgggttcactacgcgaaattatcggcaatggcacattgtttgacggtgcagatgcgctgttaggtagctgggcaaaagtattacgcgtggagattttccacaccgactcccctttcctgctggcgatgctgccaccaggtgcatttattggcctgggactgatgctggcaggaaaatacctgattgatgaaagaatgaaaaagcgccgtactgaagcagctgccgaacgtgcattgccaaacggtgaaacagggaatgtctga

SEQ ID NO: 484277 - DNA, 636 bp, Shigella sonnei
atgaacaaagcaaaacgcctggagatcctcactcgcctgcgtgagaacaatcctcatcccaccaccgagcttaatttcagttcgccttttgaattgctgattgccgtactgctttccgctcaggcgaccgatgtcagtgttaataaggcgacggcgaaactttacccggtggcgaatacgcctgcagcgatgcttgaactgggcgttgaaggggttaaaacctatatcaaaacgattgggctttataacagcaaagcagaaaatatcatcaaaacctgccgtatcttactggagcagcataatggcgaggttccggaagatcgtgctgcgcttgaagccctgcccggcgtaggtcgtaaaacagccaacgtcgtattaaacactgcattcggctggccgactattgctgtcgacacgcacattttccgcgtttgtaatcgtactcaatttgcgccggggaaaaacgtcgaacaggtagaagaaaagctactgaaagtggttccggcagagtttaaagtcgactgccaccattggttgatcctgcacgggcgttatacctgcattgcccgcaagccccgctgtggctcttgtattattgaagatctttgtgaatacaaagagaaagttgacatctga

SEQ ID NO: 484278 - DNA, 1503 bp, Shigella sonnei
gtgtccactgcaaaccaaaaaccaactgaaagcgtcagtttgaacgctttcaaacaaccgaaggcgttctatctcatcttctcgattgagttatgggaacgttttggttattacggcctacaaggaattatggctgtttacctggttaaacaactgggtatgtctgaagcggattcaatcacccttttctcttcctttagtgccctggtttatggtctggtcgctatcggcggctggttaggtgacaaggtactgggtactaaacgcgtaattatgctcggcgctattgtgctggcgattggttatgctctggttgcctggtctggtcacgacgccggtatcgtttatatgggtatggcggctattgcggtcggtaacggcctgtttaaagctaacccatcttctctgctttctacatgctatgagaaaaacgacccgcgtctggacggtgcattcaccatgtactacatgtccgtcaacatcggctctttcttctctatgattgctacgccgtggctggccgcgaaatacggctggagtgttgcgtttgcgttgagcgttgtaggcctgctgatcactatcgttaacttcgccttctgccaacgctgggttaaacagtacggttcaaaaccagacttcgagcctatcaactaccgtaacctgctgctgaccattattggtgttgtggcactgatcgctatcgccacctggctgctgcacaatcaggaagttgcgcgtatggcgctgggcgttgttgccttcggtatcgtggttatcttcggtaaagaagccttcgcgatgaaaggtgctgcgcgtcgtaaaatgatcgttgccttcatcctgatgctcgaagccattatcttcttcgtgctgtacagccagatgccaacgtcactgaacttctttgcgattcgtaacgttgagcactccattctgggtctggccgtagaacctgagcagtatcaggcactgaacccgttctggatcatcatcggtagtccgattctggccgctatctataacaagatgggcgataccctgccgatgccaaccaagtttgcaatcggcatggtgatgtgttctggtgcgttcctgattctgccgctgggtgcgaaattcgcgtctgacgctggtatcgtgtctgtaagctggctggtcgcaagctatggcctgcagagcatcggggaactgatgatctctggtctgggtctggcaatggttgcacaactcgttccgcagcgtctgatgggcttcattatgggtagctggttcctgaccactgccggtgcaaacctgattggtggttatgttgcgggtatgatggctgtgccggataacgttaccgacccgctgatgtcactggaagtttatggtcgcgtattcttgcagattggtgtcgctactgccattattgcagtactgatgctgctgaccgcgcctaaactgcaccgtatgacgcaggatgacgctgcagacaaagcggcgaaagctgctgtagcgtaa

SEQ ID NO: 484279 - DNA, 138 bp, Shigella sonnei
atgaaattgttctacaaaccgggtgcctgctctctcgcttcccatatcaccctgcgtgagagcggaaaggattttaccctcgtcagtgtggatttaatgaaaaaacgtctcgaaaacggtgtaatgccgatcagttaa

SEQ ID NO: 484280 - DNA, 945 bp, Shigella sonnei; identical to SEQ ID NO: 13277

SEQ ID NO: 484281 - DNA, 951 bp, Shigella sonnei
atgttttctataagtaacttatcatttatcggtttccttaaaaggattattttttcctcagattcactaccggggaagtgggaacacagaaaatttcggttcatgtacattttgcgatgttctataaatccggttgtcagtattcgatattattatgaactgcgttccttgccgtgcattgaggatattctggcaatacaccccacgttgccagcaagaattcatcgcccttatttgcataaaggggggcgcgcctggacccgtggacaatatattcttgagcattatcgctttgtgcaaaatttgccagaaaaatattctaaatttttgtttccacaaaaatcggtatcattagtccaattcatcgggaaagatggagagaattttgatatccagtgttctcccagtggttttgaccgggaaggagagttgatgttgtcattgttttacaataaaacagttattgcccggttaacattttcagtcattctgactcaaaatggacacattgcttttattggcggattacagggagcccctaaaaataccggacctgatgttattcggtgcgcaacccgggcctgttatgggattttcccaaaacggattatttttgaagcattttgtgcgttgatgaaagcttgcaatatctctgagtgtctggcagtcagtgagcacagtcatgttttccggcaattgagatactggtatcagaaacgcaaaacctttgttgcggtctatagtgatttctgggagtctgtagcaggaaaaacctgtggtgactggtacagattaccaacccaggtgattcgaaagccgctaagcgatatagccagtaaaaaacgctctgagtaccgaaaacgatacgctttgctggattatatccatgaaactactatccgctctttggatgcatatcctgtacactcagaacatcagaatttaaattaa

SEQ ID NO: 484282 - DNA, 1089 bp, Shigella sonnei
atgaatatactatttacggaatcatcaccgaatataggtggtcaggaattacaggctgttgctcaaatgaaggccctgaagaaaatggggcattcagttctgcttgtctgcagggagaacagcaaaattgcttttgaagccagtaagtttggaattgatatcacattcgcgttatttcgaaacagtcttcacattcctactgtatggagattactcggaatagttcatagttttcagcccgatgcaatcgtttgtcacagtggacatgatagtaatattgttggtttggtacggttttttacctggaaacatccattcagaattatcaggcaaaagacatatttgacacgaaaaacaaaatttttttcaataaatcatttttgcgatgaggtgattgttcccggaacaaatatgaagacacatctggagcaggaaggatgtcgaactcgggttactgttgtgcctcctggctttgatttccaggaattatacgttgattcccgaaacagtttgcctccgagtgttctttcctggctggcgtcacgaagaggatgccccgtaattgctcaggtaggaatgttgcgcccggaaaaagggcacgaatttatgttgaatttactgttccatttaaaaatgaatggacgacagttctgttggttgattgtggggtctggttcacctgaactgcaggaacatttacagtatcagattgacagtatgggcatgcatgatgatgtttttattgctgacaatgtttttcctgccgcccccgtatatcgggttgccagtctggtggttctgccttcagaaaacgaatcttttggtatggtgctggcagaagcatcggcattttctgtgcctgtagtggccactcagattggtggaatccctgaggttattcagaacaaccagaccgggacattgttaccagcaagtaataagcacgcatggatgtgcgccctgaatgatttttttaatgaccctgggcgtttttatcagatggctcgcctggcaaaacaggatatagaagagcggtttgatattaataaaactgcgttaaaaatactcacattagcgaagcaaaagtaa

SEQ ID NO: 484283 - DNA, 822 bp, Shigella sonnei
ttgtttaaagcaaatcatgttccggtattaatgtatcatcatgtcagccattgcccaggactggttacactttctcccgagacattccggaaacaaatgaaatggttggctgaaaacaactggaaaacactgtcatcagatgaactggagtttttttatcggggcggaaaacttccccgtaaaagcgttatgttgacatttgatgatggataccttgacaactggtttcaggtatatcctttattaaacgagtttaatctcaaggcacatatttttttaattaccagttttattggaaatggtccggttcgtcactctcctggaaaggaatattctcatcgcgattgcgaacatcaaatagcaaccgggaatgctgataatgttatgcttcgctggtctgaagtgaacgaaatgttgcaatctggtctggtcgaatttcatgttcatacacatactcatacacgttgggataaaaagttcacttcacgagaagaacagtgtaaacatcttcggcaggacttattgagcgggagagaatatttaaaaaaaatgacaggaaaatgcagtaaacatttgtgttggccggaaggttattataacaaggattatattcagatcgctgaagaacttggattccattatttatatacaacagaaagaagaatgaatgctcctgctaaaggaactacacggataggaagaataagcaccaaggaacgggaaaattgcgtatggctgaaaagacgacttttttattatacaacaccgtttttttcatcgttgctggcccttcataagggaccaagattaccggatgactaa

SEQ ID NO: 484284 - DNA, 303 bp, Shigella sonnei; identical to SEQ ID NO: 463444

SEQ ID NO: 484285 - DNA, 240 bp, Shigella sonnei; identical to SEQ ID NO: 13273

SEQ ID NO: 484286 - DNA, 1524 bp, Shigella sonnei
ttgataatcagcgaaatgcaacgcaagcttgccacatgggcagtcaccgatccgtccctacggattcaacggctgctgcgtctgataacacaaccagaatggctggctgaagcggcgcggatcacgctttcatcaaagggggcccatacccccggcgttgatggcgtgaacaaaacaatgctacaggccagactggctgttgagctgcaaatcctcagggatgaattactctcaggccactaccagcccttgcccgccagacgggtttacatccctaaaagcaacggcaaactgcgaccactgggtatccccgcgttgcgggatcgtattgttcagcgggccatgctgatggcgatggagccgatatgggagagtgattttcatacgctctcatatggcttccggcctgagcgcagtgtccaccacgctatccgtacggtgaaattacagctcacagactgtggtgaaacccggggacgctgggtgattgaaggcgacctgtccagttacttcgacaccgtacatcatcgactgctgatgaaggctgtacgccgcaggatcagtgacgcacgtttcatgactctgctgtggaaaaccatcaaggcgggacatatcgatgtcggtctctttcgggcggccagtgaaggtgtgccacagggcggtgttatatcgccgctattatcgaacatcatgctgaatgagttcgatcaatacctgcatgagcgctacctgagcgggaaagccagaaaagatcggtggtactggaataacagtatccaacggggccgaagtacggcggtcagagaaaactggcagtggaaacccgcggtggcgtactgccgctatgccgatgattttgtcctcatcgtcaaaggcaccaaagcacaggcggaagccatcagggaggagtgtcggggtgtgctcgaaggcagtctgaaactcaggctgaacatggataagactaaaatcacccatgttaatgacggctttatctttctggggcacaggatcattcgcaaacgcagtcgttatggcgagatgcgagtggtctcaacgatcccgcaggagaaagccagaaacttcgccgcatcgctgacagcactgttatcaggcaactacagtgaaagcaaagtcgatatggctgaacaactcaaccgaaaactgaaaggctgggccatgttctatcagttcgttgattttaaggccaaagtcttcagttatatcgaccgtgtcgtgttctggaagctggctcactggctggcccgcaaataccgtacaggtatcgcttccctgatgaggtggtggtgtaaatcaccgaaaccgggtcagagcaaaacgtgggttttatttggtaaaaccaatcacggcaagctcagcggcgaaatactgtaccggttggtggggcaaggcaagaagctgttccgctggcggctacccgaaggtaatccctatctgaggacggagaccagaaacacgtatacatcgcgctttacagaagtggcaatggcgttcgccagcatttaa

SEQ ID NO: 484287 - DNA, 387 bp, Shigella sonnei
atggaaacgacattcgtgctggatgcgctggagcaggcgttgtgggcccgtcgtccgtctggcaccatccatcacagcgataaaggctctcagtatgtgtcactggcctatacggagcgactaaaagaagccggattactggcatcaacagggagtacaggcgactcgtatgacaacgcgatggctgagagcatcaatggtctttacaaagcggaggtaatacaccgtaagagctggaaaaaccgtgcagaagtggaactggccacactaacgtgggtggactggtataacaatcgacgattgctgggaaggctgggccatactcctccggcagaagcagaaaaagcttattatgcttccatcggaaacgatgatctggcagcctga

SEQ ID NO: 484288 - DNA, 282 bp, Shigella sonnei; identical to SEQ ID NO: 465478

SEQ ID NO: 484289 - DNA, 513 bp, Shigella sonnei; identical to SEQ ID NO: 465479

SEQ ID NO: 484290 - DNA, 426 bp, Shigella sonnei; identical to SEQ ID NO: 81702

SEQ ID NO: 484291 - DNA, 183 bp, Shigella sonnei; identical to SEQ ID NO: 81703

SEQ ID NO: 484292 - DNA, 873 bp, Shigella sonnei
atgaatccgtctgatgccattgaggcaattgaaaaaccgctctcctccctgccttactcactttcccgtcacatcctggaacatctgcgcaaactcaccagtcacgaacccgtgattggcattatgggtaaaagcggggccggtaaatcctcactctgtaatgcactgtttcagggggaggtcaccccggtcagtgatgttcacgccggcacccgggaagtacggcgcttccgtctgagtggccatggtcacagcatggttatcactgacctgcccggggtgggcgagagccgggacagggatgcagagtatgaggccctgtaccgtgacattctgcctgaactggacctggtactgtggctgattaaagccgatgaccgtgccctgtctgtggatgagtatttctggcgacacatcctgcactggggacatcagcgggtactgtttgtggtgacgcaggccgacaaaacggagccctgccatgaatgggatatggccggtattcagccttctcctgcacaggcacagaatattcgcgaaaaaacggaggcggtattccgtctgttccggcccgtacatccggttgtggccgtatcggcccgcaccggctgggaactggatacgctggtcagtgcgctcatgacagcgcttcccgaccatgccgccagtcccctgatgacccgcctgcaggacgggctgcgcacggaatctgtccggggtcaggcccgtgaacagtttaccggtgcggtggaccggatatttgacacggcggagagcgtctgtgttgcctctgttgcccgtaaggttctgcgcgctgttcgtgacaccgtggtctctgttgcccgcgcggtatggaactggattttcttctga

SEQ ID NO: 484293 - DNA, 2385 bp, Shigella sonnei; identical to SEQ ID NO: 464842

SEQ ID NO: 484294 - DNA, 906 bp, Shigella sonnei
gtgacttcaccatttattcaacaaattgctgataaccgggtatgtcaggtactcacctgtcttcctgaaaaatttgtggttgatttcgcaaacggtattgatgttgcacaggagcatatccgtacggccggagagcgcacgttcttccggcggttaaaagaggggctgagcggcgaaggtactgcacggcagaatgccatcaatgcttcgcttgcacagggcgttgaggcgtccctgcgctggctgacggagctgacaacgtcacttgccaccacaaactacgcgattacccgggtaaacgacagggtcagttcactggtcagtgatactgccaggctggcgcattattccgcagatacgcgggagcagttactcaccctggccgatcaggttcaccagaaactgaatcatcttgaagaaaaactccaccgtgttgacctggttcagcgggcgcagttacatcttgagcagatattctcctggtggagcgccgggcgatatgcgtcattttcccctgccggacgttgttatgtggcacttgaagagcttcgctggggcgcgtttggtgatgtgatacgtcagggcgaaacaggccaggttaaccagctactggatattctcagacataaagcattaacgcagatggcacaggagagtggcggtagtgcaaccgtgcgtctgaacactctggactggcttggtggtcagggccgggagcaggcagataacgagtggcatgacgcgattaactggctgggggactggtgcagtgaagagcagcatccggtgatctggtcaaccacgcaggctgcagaacacttaccggttcgcatgccccgtctctgctctgcagaacgcctctctgaaagtatggtcgatgaaatatttcagaagggggctgcatga

SEQ ID NO: 484295 - DNA, 1071 bp, Shigella sonnei
atgagtatagaaataaaaacagggctggtgctgtccggcggtggggcggtgggtgcttatcaggcgggagtggttaaggcactggcagagtgtggtacacagatcagcatggtttcaggggccagcattggcgcattcaatggtgccattatcgcggcctctcccgatctgtcagaagctgccgtacgcctggaggcgctctgggatcatcttgggaataatcaggtgctgtcggtaaaccgatcggtttacttttcattgctgaaaaaattgttccaggcaatgaacctctgccagatccccggacgtgcaggagcactgcttacgacacttcttcgccatatatcgataatcaacggcttcgacaatccgatgactcagccgttgttgtcagatgggcccctgacagcgttgatggatcattatcttgatacagatgctctggcaggcgggctaccgctgtatgtgtcgctgtaccccacagaagggggcatgcaggatattattgactgcattcgtgctgaactgggttccggaaccacgaaaaacgccgtttttcagcatatccagagtctgccccgcggacagcagaaagaggctctgcttgcgtcagccgcactgcccctgttgttccgtccccgtgaggttcaggggacaatgttcggtgatggtggtatgggaggatggcgaaatatgcagggaaatacccctgtaacgcctctggtcgatgccggatgcaatatggtgattgtgtcgcatctgagtgacggttctttatgggatcgccaggcttttccggacaccacaatccttgagatccgtccccggaaaaggctgaaatatgcaggtgatggtggcaacagtggcggtctgctcagtttcacgtcggcacataccgacgcctggcgtcagcagggctacgaggacacgatgctgacgatggagcatatccggaaaccgctggcagcacgtcaggcactgtcccggtcagaaacggtgttgcagaaaagtctggagataacggaagaggcagatttggcactgagaagcgcgatggcccggattaaataa

SEQ ID NO: 484296 - DNA, 2316 bp, Shigella sonnei
ttggccaactcatcctcacgatattccgttctgactgccgcccactgggggcccatgctggttgaaaccgacggcgaaaccgtgtttagctcgcgtggcgcgttagccacaggaatggaaaactccttgcagagcgcggttcgcgaccaggttcacagcaatacgcgggtacgatttccaatggtgcgcaaaggctttctcgcgtcaccggaaaacccgcaaggcattcgtgggcaggatgaatttgttcgcgtgagttgggatgaggcgctggatcttattcaccaacaacataaacgcattcgtgaggcttatggtccggcatcgatttttgctggttcctacggctggcgttcaaacggcgtgctgcataaggcctcgacattattacaacgctatatggcgctggcaggcggttataccgggcatctgggggattattcgaccggtgcggcacaggcgatcatgccgtatgtcgtaggtggcagcgaagtttatcaacagcaaaccagttggccgctggtgctggaacatagcgatgtcgtggtgttgtggagtgctaacccactcaatacgctgaaaattgcgtggaatgcatccgatgagcaggggctttcttacttttccgcactgcgtgacagtgggaaaaagctgatctgcattgatccaatgcgatcggaaaccgtcgatttctttggcgataaaatggagtgggtggcaccgcacatgggcaccgatgttgcgctgatgctggggatcgcccatacgctggtggaaaatggttggcacgacgaagcgtttctggcgcgttgcaccacaggttatgccgtcttcgcctcttatttgctgggcgagagtgacggaatagcgaaaaccgccgaatgggcagcagagatttgtggtgttggcgcagcgaaaatccgccagctggcggctattttccaccaaaataccaccatgctgatggcaggctggggaatgcagcgccaacagtttggtgagcaaaaacactggatgatcgtcacgctggcagcaatgttggggcaaatcggcacacccggcggcggttttggtctttcttaccattttacgcggcgttctgcggtgctctcttccatgcagggcagcttgccgggtggctgcgatgcggtggataaaatccctgttgcccgcattgttgaagcactggaaaaccctggtggcgcatatcaacacaacggtatgaaccgacatttcccggatattcgttttatctggtgggcgggcggtgccaactttactcatcatcaggataccaatcgtctgatccgtgcctggcaaaaaccggagctggtggtgatctctgaatgcttctggacggcggcggcgaaacacgcggatatcgttctgcctgcgactacctcttttgagcgtaatgatctcaccatgaccggtgattacagtaatcagcatctggtgccgatgaagcaagtggtgccgccacgctatgaagcgcgtaatgattttgatgtttttgccgagttgagtgaacgttgggagaagggcggctatgcgcggtttacggaaggaaaaagtcagctgcaatggctggaaacgttttataacgttgcccggcagcgcggggcaagccagcaggttgaattgccgccatttgctgagttctggcaagccaaccagttaattgagatgccggaaaacccggacagcgagcggtttattcgcttcgctgatttttgccgcgatccgctggcgcatccgttaaaaaccgccagcggcaagattgaaatcttctcacagcgtattgccgattacggttacccggattgccctgggcatccaatgtggctggagccggacgaatggcagggcaatgccgaaccagaacagttgcaggtactttctgcccatccggcgcaccgcctgcacagccagctgaattacagttctctgcgcgaattgtacgcggtagcaaaccgtgagcctgtcaccattcatcctgacgatgctcaggcgcgcggcataaccgaaggggatatggtgcgggtgtggaactcccgtgggcagatccttgccggagcggtcattagcgagggaattaaacctggcgtgatttgcattcacgaaggggcatggccggatctggatttaaccgctgacggtatttgtaaaaacggcgcagtgaacgtgctgaccaaagatctccccagctcgcggctggggaatggctgtgcgggtaatacggcgctggcatggctggaaaaatacaacggtccggaactgacacttacagcgtttgaaccaccggccagctcataa

SEQ ID NO: 484297 - DNA, 441 bp, Shigella sonnei; identical to SEQ ID NO: 472865

SEQ ID NO: 484298 - DNA, 564 bp, Shigella sonnei
atggaacgttgcggctgggtgagtcaggacccgctttatattgcctaccatgataatgaatggggcgtgcctgaaactgacagtaaaaaactgttcgaaatgatctgccttgaagggctgcaggctgggttatcgtggatcaccgtcctcaaaaaacgcgaaaactatcgcgcctgctttcatcagttcgatccggtgaaggtcgcagcaatgcaggaagaggatgtcgaaagactggtacaggacgccgggattatccgccatcgagggaaaattcaggcaattattggtaatgcgcgggcgtacctgcaaatggaacagaacggcgaaccgtttgccgactttgtctggtcgtttgtaaatcatcagccacaggtgacacaagccacaacgttgagcgaaattcccacatctacgtccgcctccgacgccctatctaaagcactgaaaaaacgtggttttaagtttgtcggcaccacaatctgttactcctttatgcaggcatgtgggctggtgaatgatcatgtggttggctgctgttgctatccgggaaataaaccatga

SEQ ID NO: 484299 - DNA, 699 bp, Shigella sonnei
atgatcataaaaaaaagcggtggtcgctggcagctaagcctgctggcgagcgtggtaatcagtgccttttttctcaacacagcttacgcctggcaacaagaatatatcgttgatacgcaacccggacattccacagagcgttacacctgggatagtgatcatcaacctaattacaacgatattttgtcgcaacgtattcaaagtagccaaagggcgctgggactggaagtcaatctggcggaagaaactcctgtggatgtgaccagcagtatgagtatgggctggaattttcctttatatgaacaggttacaaccggcccggtcgcggcattacattacgatggcacaaccacctcgatgtataacgagtttggcgacagtactaccacgcagaccgatccgttatggcatgccagcgtgagtaccttaggctggcgtgttgactcccggcttggcgatctccgaccctgggcgcaaatcagctataaccagcaatttggcgagaatatctggaaggcgcaatcaggcctgagccggatgacggcgacaaaccagaacggcaactggctggatgtcaccgtaggcgctgatatgttgctcaatcaaaatattgccgcctatgccgcgctaactcaggcagaaaataccactaataatagcgactatctgtatacgatgggggttagcgccagattttaa

SEQ ID NO: 484300 - DNA, 1209 bp, Shigella sonnei
atgacaccttcaaattatcagcgtacccgctggctgacactcatcggtactatcattacccagtttgcgctggggtcggtttatacctggagcctgtttaatggcgcgctttccgccaagctggatgcgccggtaagccaggtcgctttctctttcggcttgttaagtctggggctggcaatttcgtcttctgttgcgggcaaattacaggaacgtttttgcgttaaacgcgtcaccatggcttccggcattttgctgggattaggcttcttcctgaccgcgcattccaacaacctgatgatgctgtggttaagcgccggtgtgctggtcggtctggcggatggcgcgggttacctgctgacgctctctaactgcgtgaagtggttcccggagcgtaaaggtctgatctccgcgttcgctatcggttcttatggtctgggtagcctgggtttcaaatttatcgacacgcagctgctcgaaacggtgggtctggaaaaaacatttgtgatttggggagcgattgcgctggtgatgattgttttcggcgcaacgttaatgaaagacgcaccaaaacaggaagtgaaaaccagcaatggtgtggtggagaaagattacacgctggcagagtcgatgcgtaaaccgcagtactggatgttagcggtaatgttcctgactgcctgcatgagcggcctgtacgtgattggggtagcgaaagatatcgcccaaagtctggcacaccttgatgtggtttccgcagccaatgcagtaacggttatttccatcgctaacctttcaggtcgtctggtgctgggcattctgtctgacaaaattgcccgtatccgtgttatcaccattggtcaggtgatttcgctggtgggtatggcggccctgctgtttgcaccattaaatgcagtgacgttctttgcagcgattgcctgcgtggcatttaactttggcggcactattaccgtctttccatcactggtcagtgagttcttcggcctcaataacctggcgaaaaactacggtgtgatttacctcggtttcggtatcggtagcatttttggttcgattatcgcctcactgtttggcggtttctatgtgaccttctacgtgattttcgccctgctgattctgtcattggcgctttctacgacgattcgtcagccagagcagaaaatgttgcgtgaggcgcatggctccctttaa

SEQ ID NO: 484301 - DNA, 1692 bp, Shigella sonnei
atgagatacatcaaatcgattacacagcagaagctgagctttttgcttgcaatctatattggcctttttatgaatggcgcggttttttatcgccgcttcggcagctatgcgcacgattttaccgtctggaaaggcgtttctgctgttgttgaactggccgccaccgtactggtgaccttctttttactacgtcttctatcgctgtttggccgccgcagctggcgtattctggcgtcgctggtggtgctcttttccgcaggtgccagctattacatgaccttccttaatgtggtcattggttatggcatcatcgcttccgtcatgaccaccgatatcgacctgtcaaaagaagttgttggtctgaactttattctctggttaatcgccgttagtgcattgcctcttatccttatctggaataaccgctgtcgctacaccttgctccgacaactgcgaaccccagggcagcgtattcgcagcctggcggtcgtcgtactggcgggtattatggtttgggcaccgattcgtttgctggatatccagcagaagaaagtggagagggcgaccggcgttgatttgccgagttatggcggtgtcgtagcgaactcttatctgccatcaaactggctttctgcgttggggctgtatgcctgggcgcgggtcgatgaatcttccgataataattcattgcttaatccggcgaagaagtttacataccaggctccacaaaacgttgatgagacttatgtcgtgtttatcatcggtgaaaccacgcgttgggaccatatgggtattttcggctatgagcgtaataccacgccgaaactggcccaggagaaaaatctggcggcgttccgtggttactcctgtgataccgcaaccaaactctcactgcgttgcatgtttgtacgtcaggggggcgcggaagataatccgcagcgcacattaaaagaacagaacattttcgcggttctgaagcagttaggattcagttctgacctctacgctatgcagagcgaaatgtggttctacagcaacacgatggcggacaacattgcttatcgtgagcagattggtgcggagccacgtaatcgtggcaagccggtagatgatatgttgctggtagacgaaatgcagcaatcgctagggcgcaacccggatggtaagcatctgatcattctgcataccaaaggttcgcattttaactacacccagcgttatccgcgtagcttcgcgcagtggaagccggaatgtattggtgttgatagcggctgtaccaaagcgcagatgatcaactcctatgacaactcggtgacctatgtggatcactttatctccagcgtgattgatcaggttcgcgataagaaagcgattgtgttctacgcagctgaccacggtgagtcaattaatgaacgcgagcacctgcacggcacgccgcgtgaactggcaccgccggagcagttccgcgtaccgatgatggtctggatgtcagataaatatctggaaaatccggccaatgcgcaggcgtttgcgcagctgaaaaaagaagccgacatgaaagtgccacgccgtcacgtagagctgtacgacaccatcatgggttgtcttggctatacttcaccggatggtggaattaacgaaaacaacaactggtgtcacatcccgcagacaaaagaggcagcggctaactaa

SEQ ID NO: 484302 - DNA, 1608 bp, Shigella sonnei
atgcgtatttccttgaaaaagtcagggatgctgaagcttggtctcagcctggtggctatgaccgtcgcagcaagtgttcaggctaaaactctggtttattgctcagaaggatctccggaagggtttaacccgcagctgtttacctccggcaccacctatgacgcctcttccgtaccgctttataaccgcctggttgaatttaaaatcggcaccactgaagtgatcccgggcctcgctgaaaagtgggaagtcagcgaagacggtaaaacctataccttccatctgcgtaaaggtgtgaagtggcacgacaataaagaattcaaaccgacgcgtgaactgaacgccgatgacgtggtgttctcgttcgaccgtcagaaaaacgcgcaaaacccgtaccataaagtctctggcggcagctacgaatacttcgaaggcatgggcttgccggagctgatcagtgaagtgaaaaaggtggacgacaacacagttcagttcgtactgactcgcccggaagcgccgttcctcgctgatctggcaatggacttcgcctctattctgtcaaaagaatatgctgatgcgatgatgaaagccggtacaccggaaaaactggacctcaacccaatcggaaccggtccgttccagttacagcagtaccaaaaagattcccgtatccgctacaaagcgtttgatggctactggggcaccaaaccgcagatcgatacgctggttttctctattacccctgatgcttccgtgcgttacgcgaaattgcagaagaatgaatgccaggtgatgccgtacccgaacccggcagacatcgctcgcatgaagcaggataaatccatcaacctgatggaaatgccggggctgaacgtcggctacctctcctataacgtgcagaaaaaaccgctggatgacgtgaaagttcgccaggcactgacctacgcggtgaacaaagacgcgatcatcaaagcggtttatcagggcgcgggtgtatcagcgaaaaacctgatcccgccaaccatgtggggctataacgacgacgttcaggattacacctacgatcctgaaaaagcgaaagccttgctgaaagaagcgggtctggaaaaaggtttctccatcgacctgtgggcgatgccggtacaacgtccgtataacccgaacgctcgccgcatggcggagatgattcaggcagactgggcgaaagtgggcgtgcaggccaaaatcgtcacctacgaatggggtgagtacctcaagcgtgcgaaagatggcgaacatcagacggtaatgatgggctggactggcgataacggggacccggataacttcttcgccaccctgttcagctgcgccgcctctgaacaaggttctaactactcaaaatggtgctacaaaccgtttgaagatctgattcaaccggcgcgtgctaccgacgaccataacaaacgcgttgaactgtacaagcaagcgcaggtggtgatgcacgatcagactccggcactgatcatcgctcactccaccgtgtttgaaccggtacgcaaagaagtcaaaggctatgtggttgatccattaggcaaacatcacttcgaaaacgtctctatcgaataa

SEQ ID NO: 484303 - DNA, 1020 bp, Shigella sonnei
atgttgcagtttattctccgacgtttgggactcgtcatccccacgtttatcggtattacccttctcacatttgcctttgtccacatgatcccgggcgatccggtgatgatcatggcaggcgaacgcgggatctcccctgagcgtcacgcgcagctgctggctgaactcggcttagataaaccgatgtggcagcagtatctccattacatttggggcgtaatgcacggcgatctaggcatttcaatgaaaagccgaattccagtatgggaagagttcgtgccgcgctttcaggccacgctggaacttggcgtctgcgcgatgatttttgctacggcagtcggtattccggttggtgtgctggctgcggttaaacgcggttccattttcgatcacactgcagttggcctggcgctgaccggctactcgatgccgatcttctggtggggcatgatgctgatcatgctggtttcggtgcactggaacctgacgcccgtctccggtcgcgtgagcgatatggtgttcctcgatgactccaatccgttaaccggttttatgctgatcgacaccgccatctggggtgaagatggcaactttatcgacgccgttgcccatatgatcttaccggctattgtgctgggtactatcccgctggcggttatcgttcgtatgacgcgctcttcgatgctggaagtgctgggtgaagattacatccgcaccgcgcgcgccaaagggttgacccgcatgcgggtgattatcgtccatgcgctgcgtaacgcgatgctgccggtagtgaccgttatcggcctgcaggtgggaacattgctggcgggggcgattctgaccgaaaccatcttctcgtggcccggtctgggacgctggttgattgacgcactgcaacgccgcgactatccggtagtgcagggcggcgtattgctggtggcgacgatgattatcctcgtcaacctgctggtcgatctgctgtacggcgtggtgaacccgcgtattcgtcataagaagtaa

SEQ ID NO: 484304 - DNA, 903 bp, Shigella sonnei
atgtcacaggttactgaaaataaagtgattagcgcaccggtgccgatgaccccgttacaggagttctggcactattttaaacgcaacaaaggcgcggttgtcgggctggtttacatcgtcatcgtgctgtttatcacgatctttgccaactggattgcgccttataacccggcggatcagttccgcgatgcgctgctcgccccgccagcctggcaggaaggcggcagcatggcgcacttgctgggcaccgatgacgtaggccgtgatgtgctgtcgcggctgatgtacggcgcgcgcttgtcgctgctggttggctgtctggtggtggtgttatcgctgattatgggcgttattctcggcctgatcgccggttacttcggcggcctggtcgataacatcatcatgcgcgtggtcgatatcatgctggcgctgccaagtctgctgttggcactggtgctggtggcgattttcggcccgtcgattggtaacgccgcgctggcactgaccttcgttgccttgccgcactatgtgcgcttaacccgcgccgccgtgctggtggaggtgaatcgcgattacgttaccgcgtctcgcgtggcaggtgccggggcgatgcgtcagatgtttattaacatcttcccgaactgcctggcgccgctgattgttcaggcgtcgctcggtttctctaacgccattctcgatatggccgcccttggcttcctcggcatgggagcgcagccgccaacaccagagtggggcaccatgctctccgacgtgttgcagttcgcgcaaagcgcctggtgggtcgtgaccttcccgggtctggcgatcctgctgacggtgctggcatttaacctgatgggtgacggtctgcgtgacgcgctcgatcccaaactgaagcagtaa

SEQ ID NO: 484305 - DNA, 984 bp, Shigella sonnei
atggcgttattaaatgtagataaattatcggtgcatttcggcgacgaaagcgcaccgttccgcgccgtagaccgcatcagctacagcgtaaaacagggcgaagtggtcgggattgtgggtgagtctggctccggtaagtcggtcagttcactggcgattatggggctgattgattatccgggccgcgtaatggcggaaaagctggtgtttaacggtcaggatttgcagcgtatatcagaaaaagagcgccgcaacctggtgggtgccgaagtggcgatgatcttccaggacccgatgaccagccttaacccgtgctacaccgtgggtttccagatcatggaagcgattaaggtgcatcagggcggtaataagagcactcgccgtcagcgggcgattgacctgctgaatcaggtcggtattcccgatccggcatcgcgtctggatgtttacccgcatcagctttccggcggcatgagccagcgcgtgatgatcgccatggcgattgcctgtcggccaaaactgctgattgccgatgagccgaccactgcgctggacgtgaccattcaggcgcaaatcatcgaactgttgctggagctacagcagaaagagaacatggcgctggtgttaattacccatgatctggcgctggtggcggaagctgcgcataaaatcattgtgatgtatgcaggccaggtggtggaaacgggcgatgcgcacgccatcttccatgcgccgcgtcacccgtatactcaggcattgctgcgtgcgctgccagaatttgctcaggacaaagaacgtctggcgtcgttgccaggtgtcgttcccggcaagtacgaccgcccgaacggctgcctgcttaacccgcgctgcccctatgccactgacagatgtcgcgctgaagaaccggcgctgaatatgctcgctgacgggcgccagtccaaatgccattacccacttgatgatgccgggaggccgacactatga

SEQ ID NO: 484306 - DNA, 1005 bp, Shigella sonnei
atgagtacgcaagaggccaccctgcaacaaccgctgttgcaggctatcgacctgaaaaaacattatccggtgaagaaaggcatgttcgcgccggaacgtctggttaaagcgctggatggcgtttcgtttaaccttgaacgtggcaaaacgctggcagtagtgggcgaatctggctgcggtaaatcgaccctcggtcggttgctgacgatgattgaaacgcccaccggtggcgagctgtattaccaggggcaggatctgcttaagcacgatccgcaggcgcagaagctgcgtcggcagaaaatccagatcgtcttccagaacccttacggttcgctgaatccgcgtaaaaaagtcgggcaaattcttgaagagccgctgctgatcaacaccagcttaagcaaagaacagcgtcgggaaaaagccctgtcgatgatggcgaaagtcggcctgaaaaccgagcactatgaccgctatccgcatatgttctccggcggtcagcgtcagcgtatcgccatcgcccgtggtctgatgctcgacccggatgtggtgattgccgatgaaccggtttccgcgctggatgtttcagtgcgcgcgcaggtgctgaatctgatgatggatttgcagcaggagttggggctgtcttatgtctttatctcccacgacctgtcggtggtggagcacattgctgatgaagtgatggtgatgtacctgggccgctgcgtggagaagggaacgaaagaccaaatcttcaataacccgcgccatccgtacactcaggcgctactttccgcgacgccgcgcctgaacccggacgatcgccgcgagcgcatcaagctcagcggtgaactaccaagcccactgaatccaccgccgggttgcgccttcaacgcccgctgtcgtcggcgcttcggcccctgcacccagttgcagccgcagctaaaagactacggcggtcaactggtagcttgttttgctgttgatcaggatgaaaatccgcagcgttaa

SEQ ID NO: 484307 - DNA, 1272 bp, Shigella sonnei
atgcagcacaacacactatcgaaacacaatcagaaattgccgtttacacgctacgacttcggctgggttttattatgcataggcatggcgattggtgccggaaccgtgctgatgccagtacaaattggcttgaagggaatttgggtatttattaccgcagcgatcattgcttatcctgccacctgggtagtgcaggacatttatttaaaaaccctttctgaaagcgattcctgtaatgactacaccgatattatcagtcattacctggggaagaactggggaattttcctcggggttatctactttttgatgattatccacgggatttttatctactctctctccgtggttttcgacagcgcctcgtacctgaaaaccttcggtttaaccgatgccgatctttcacaatctctactttataaagtcgctattttcgccgtactggtagcgattgcgtctggtggtgaacgattactgtttaagatttccgggccaatggtggtggtcaaagtagggattattgtcgtgttcggttttgcgatgatcccgcactggaatttcgccaatataaccgccttcccgcaagcctccgtctttttccgcgatgtcttgcttaccattccattttgcttcttttctgcagtatttattcaggtacttaacccaatgaatattgcctatcgtaaacgggaagcggataaagtactggcaacccggctcgcgctgcgtacccaccgaattagttatatcacgctcatcgcggtgatcctgttttttgccttttcgtttaccttctcaattagccacgaagaagccgtttctgcctttgaacaaaatatctcagcactggcgctggccgcgcaggtgatccctgggcatatcattcatatcacctctacggtgcttaatatctttgccgtactgaccgcattctttggcatttatctcggtttccacgaggccattaaaggcattattctcaatctgttaagccgaattattgataccaagaaaattaactcacgcgtgctgactctggcgatctgcgcttttatcgtcattacgttgacgatttgggtttcgtttcgtgtatcggtgctggtgttctttcagttgggaagcccgttatatggtattgtgtcgtgcctcattccgtttttcctgatctataaagtcgcacaactggaaaaacttcgcggatttaaagcctggctgattctgctgtacggcattttgctatgcttgtcgccactgttgaagctgattgagtaa

SEQ ID NO: 484308 - DNA, 507 bp, Shigella sonnei
atgggcggtgccgcttttttcgtattgaaaggttgtggcgatagtagcgatgtcgataacgacggcgacggaacgttttacgcgacagtgcaggattgtattgatgacggtaataatgccgacatttgcgcgcgtggctggaacaacgccaaaacggcattttatgccgatgttccgaagaatatgactcagcagaactgtcagtctaagtacgaaaattcctactacgacaatgttgaacagagttggatcccggtcgtttctggatttttgttaagccgggttattcgtaaagatcgcgatgagccgttcgtctataacagcggcggatcctcatttgcttcccgccccgtctggcgcaacacttccggtgattactcctggcgctccggttctggcaaaaaagagtcttactcttcaggcggctttaccaccaaaaaagcgtcaaccgtttcgcgcggcggctatggtcgttcttccagcgcccgtgggcattggggaggctaa

SEQ ID NO: 484309 - DNA, 1164 bp, Shigella sonnei
atgctgagacacaacgttcctgtgcggcgggatctggaccaaattgccgctgacaacggtttcgactttcatatcatcgacaatgaaatctattgggacgagagtcgggcttaccgttttactctgcgccagattgaagagcagatcgaaaaaccaactgcggaactgcatcagatgtgccttgaggtggtggatcgcgcggttaaagacgaagagatcctgacgcaactggcgatcccgccgttgtactgggatgtgatcgccgaaagctggcacgccagcgatccttcgctgtatggccggatggattttgcctggtgtggcaatgcgccggtgaagctgctggagtacaacgccgatacgccgacttcgttgtatgagtcggcttatttccagtggttgtggctggaggatgcccggcgcagcggcattattccgcgtgatgccgatcagtacaatgccattcaggaacgcctgatttcacgctttagcgagctttatagccgggagccgttttatttctgctgctgtcaggacaccgatgaagacaggactaccgtgctgtacttgcaggactgcgcccagcaggcagggcaggagtcgcggtttatctacattgaagatctcggtttgggcgtcggcggtgtactgaccgatcttgatgataatgtcatccagcgtgcatttaagctgtatccgctggagtggatgatgcgtgacgataacggtccgctgctgtgcaagcgtcgcgagcaatgggtggagccgttatggaaaagtatcttgagtaataaagggctaatgccgctgctttggcgcttcttccctggtcatcctaaccttcttgcatcctggtttgagggtgaaaaatcgcagattgccgctggcgaaagctatgtgcgtaaaccgatctactcgcgcgaaggcggaaacgtcaccattttcgacggtcagaataacgtcgttgaccacgctgatggtgattacgccgatgaaccgatgatctaccaggcgtttcaacctctgccgcgatttggcgatagctacacactcatcgatagctggattgtcgatgatgaagcgtgcggaatggggatccgtgaagataacacactgatcaccaaagacacctcacgtttcgttccgcattacattgctggataa

SEQ ID NO: 484310 - DNA, 1626 bp, Shigella sonnei
gtgcactggcaaactcacaccgtttttaatcaacctataccattaaataacagcaacttatacctgtctgatggcgcgctttgcgaagcggtaacgcgtgaaggtgctggctgggatagcgattttctagccagtattggtcagcagttaggaacggctgaatcccttgaactggggcggctggcgaatgtaaacccgcctgaactgttgcgctacgatgcccaggggcggcgtctggacgatgttcgtttccatcccgcatggcacctgctgatgcaggtgttatgtaccaatcgggtgcacaatcttgcctgggaagaagacgctcgctccggcgcatttgtggcgcgcgcggcgcgttttatgttacatgcgcaggttgaggctgggtcgttatgtccaataacgatgacctttgccgccacgccattgttgttacagatgttacccacgccgtttcaggactggaccacgccgctgctgagcgatcgctacgattctcacttattgccaggtgggcaaaaacgcggtttgttgattggcatgggaatgacggaaaagcagggtggttccgatgtcatgagcaacaccacccgtgcagagcgtttggaagatggctcttatcggctggtggggcataaatggtttttctcggttccgcaaagcgatgcgcatctggtgctggcgcagaccacgggcggtctgtcctgtttttttgtgccgcgctttttgcctgacgggcaacgcaacgcgattcgcctcgaacggctgaaagataagctgggtaatcgctctaacgccagttgtgaagtggagtttcaggatgccattggctggttattggggcaggaaggggaaggaattcgtctgatcctgaaaatgggggggatgacgcgttttgattgcgccctgggtagccatgccatgatgcgccgtgcgttttcgctggcgatttatcatgcacatcaacgccatgtttttggtaatccattgatccaacagccccttatgcgtcatgtcttaagtcgcatggcacttcagcttgaagggcaaacggcgttgctgtttcgtcttgcgcgagcgtgggaccggcgcgccgatgccaaagaagccctgtgggcgcgtttatttacgcctgcggcaaaatttgtgatctgcaaacgaggtatgccgtttgtggccgaagcgatggaggtgctgggcggcattggttattgcgaggagagcgagctgccgcggctttaccgggagatgccggtaaacagtatttgggaaggttccggcaatattatgtgcctggatgtgttgcgcgttctcaataagcaagcgggcgtatacgacttattgtcggaagcatttgtggaagtgaaagggcaggatcgctattttgatcgcgcggttcgtcgtttacagcagcagctgcgtaagccagctgaagaactggggcgagagattactcatcagctattcctgctgggctgcggtgcgcaaatgttgaaatatgcttctccgccaatggcgcaggcgtggtgtcaggtgatgttagatacgcgcggcggcgtacggttgtcagagcagatccagaatgatttattgctgcgggcgacggggggagtgtgtttgtaa

SEQ ID NO: 484311 - DNA, 276 bp, Shigella sonnei; identical to SEQ ID NO: 473353

SEQ ID NO: 484312 - DNA, 330 bp, Shigella sonnei; identical to SEQ ID NO: 473352

SEQ ID NO: 484313 - DNA, 750 bp, Shigella sonnei
atgattgaaatagaatcacgcgagctggcagatattcccgttcttcatgcttatcctgtcgggcaaaaagataccccgttaccgtgcgtaattttttatcacggctttacttcatccagcctggtgtatagctattttgccgttgcgctggcgcaggctggtttgcgggtgatcatgccggatgcgcccgatcacggtagccgttttagtggcgacgaagcgcggcggttaaatcaattctggcaaatcttgctacaaagtatgcaggaattcactactttacgtgcggcaatagccgaagaaaactggctgcttgatgaccgcctggcagtcggtggcgcgtcgatgggcgcgatgacggcactgggaattaccgctcgccaccccacggtgaaatgtaccgccagcatgatgggatcgggctattttacatcgctcgcccgttcactgtttccaccgctgatacctgaaacggcagcacagcagaatgaattcaataacattatcgcgccgctggcagagtgggaagcgacaaaccacctggaacaacttggggacagacctctactgctgtggcatggcctcgacgatgacgttgtgcctgccgacgaatcactacgtttgcagcaggccttaagcgagacgggacgggataaactgctaacctgttcatggcagccaggcgtgcgtcaccgcattacgcctgaggcgttagatgctgccgtgacatttttccgccagcatctttaa

SEQ ID NO: 484314 - DNA, 756 bp, Shigella sonnei
atgactgaagcacaaagacatcaaatcctcctggaaatgctcgcacaattgggctttgtgaccgttgagaaagtcgttgagcgtctgggaatttcgcctgccactgcgcgacgcgatatcaataaacttgacgaacgcggcaaactgaaaaaggtgcgcaatggcgcagaagctattacccaacagcgcccgcgctggacgccgatgaatctgcatcaggcgcagaatcacgatgaaaaagtacgtattgctaaagcggcctcgcagctggttaatccgggcgaaagcgtagtcatcaactgcggctccaccgcgtttctgcttgggcgggaaatgtgtggcaagccagtgcaaatcatcactaattatctaccgctggcaaattacctgatcgatcaagaacatgacagcgtgatcattatgggtggacagtacaacaaaagtcagtccatcactttaagcccgcagggcagcgaaaacagtctctatgccgggcactggatgtttaccagcggaaaagggctgaccgcagaagggttgtataaaaccgatatgctgacagcaatggcagagcagaagatgctgagcgtggtagggaaactggtggtactggttgatagcagtaagattggcgaacgcgcgggaatgctttttagccgtgccgatcaaatcgatatgcttatcaccggcaaaaatgctaacccggaaatcctgcaacaactggaagcgcaaggggtcagcattctgcgtgtttaa

SEQ ID NO: 484315 - DNA, 1065 bp, Shigella sonnei
atgagtaaagtgaaaagtatcacccgagaatcctggatcctgagcactttcccggagtggggtagctggctgaatgaagaaattgaacaagagcaggtcgcccctggcacatttgcgatgtggtggctaggctgcaccgggatctggttgaaatcagaaggtggcaccaacgtttgcgttgatttctggtgcggcactggcaaacaaagtcacggtaacccgttaatgaaacagggtcaccagatgcagcgcatggctggcgtgaaaaaactgcagccaaacctacgcaccaccccgtttgttcttgatccgtttgcgattcgccagatcgacgcggtactggcgactcacgatcacaacgatcatatcgacgttaacgtcgctgctgccgtgatgcagaactgtgctgatgacgtaccattcattggaccgaaaacctgcgttgatttgtggattggctggggcgtaccgaaagagcgttgcatcgtggtcaaaccgggcgatgttgtaaaagtgaaagacattgaaattcatgcgcttgacgctttcgaccgtactgcactgatcaccctgcctgccgatcaaaaagcggctggcgtactgccagatggcatggacgatcgcgcagtaaactacctgttcaaaacccctggcggttccctatatcacagtggcgattcccactactctaactattatgcgaagcacggtaacgaacatcagatcgatgtggcgttaggatcgtatggtgagaacccgcgcggtattaccgacaaaatgaccagcgccgatatgctgcgtatgggtgaagccctgaatgcgaaagtggttatcccgttccaccacgacatctggtcaaacttccaggccgatccgcaagagatccgcgtgctgtgggagatgaaaaaagatcgtctgaagtatggcttcaagccgtttatctggcaggttggcggcaaatttacctggccgctggataaagacaacttcgagtaccactatccgcgcggtttcgatgattgcttcactattgaaccggatctgccgttcaagtcattcctgtaa

SEQ ID NO: 484316 - DNA, 306 bp, Shigella sonnei
atggagatcctctacaacatctttaccgtgttttttaaccaggtcatgaccaatgccccgttgttgctgggtattgtgacctgtctgggctacatcctactgcgcaaaagtgtcagcgttattattaaaggcacgattaaaaccataattggtttcatgttgttgcaggcagggtccggcatcctcaccagcaccttcaaaccggtggtggcgaaaatgtccgaagtctacggcattaaacggcgcaatttccgatacttacgcgtcgatgatggcaaccatcgaccgcatgggcgatgcctatag

SEQ ID NO: 484317 - DNA, 1128 bp, Shigella sonnei
atggcaaccatcgaccgcatgggcgatgcctatagctgggtaggttacgcggtgttgttagcgctggcgctgaacatctgttacgtgctgctgcgtcgcattaccggtattcgtaccatcatgctgactggtcatatcatgttccagcaggcggggctgattgccgttacgttgtttattttcggctactccatgtggacaaccattatctgcacggcgattctggtttcgctctactggggcattacctccaacatgatgtacaagccgactcaggaagtgacggacggctgcggtttctccatcggtcaccagcaacagtttgcatcatggactgcctataaagttgcgccgttcctcggcaaaaaagaggaaagcgttgaagacctcaaactgccaggctggctgaatattttccacgacaacatcgtctccacggcgattgtcatgaccatcttctttggtgccattctgctctccttcggtatcgacaccgtgcaggcgatggcaggcaaagtgcactggacggtctatatcctgcaaaccggtttttccttcgcggtggcgatcttcatcatcactcagggtgtgcgcatgtttgtggcggaactctctgaagcgtttaacggtatctcccagcgcctgatccctggtgcggttctggcgattgactgtgcggctatttatagcttcgcgccgaacgccgtggtctggggctttatgtggggcaccatcggtcagctgattgcggttggcatcctggtcgcctgcggttcctcgatcctgattatcccaggctttatcccgatgttcttctccaacgccaccatcggcgtgttcgctaaccacttcggcggctggcgtgcggcgctgaagatttgtctggtgatggggatgatcgaaatctttggttgcgtctgggcggtgaaacttaccggtatgagtgcctggatggggatggcggactggtcgattctggcaccgccgatgatgcagggcttcttctccatcggtatcgcctttatggccgtcatcattgtaattgcactggcttatatgttcttcgctggccgcgcactgcgcgcagaagaagatgcagaaaaacaactggcagaacagtctgcttaa

SEQ ID NO: 484318 - DNA, 306 bp, Shigella sonnei
atgaccgtacgtattctggctgtgtgtggcaacggacaaggcagttccatgatcatgaggatgaaagtggaccagtttttaacccaatcaaacattgaccacacggtaaatagctgcgcggttggcgaatacaaaagcgagttgagcggcgcggatatcatcatcgcttctacgcacattgcgggcgaaatcaccgtgaccggcaacaaatacgtggttggcgtgcgcaacatgctctctcctgccgactttggcccgaaactgctggaagtgatcaaagcgcatttcccgcaggatgtgaagtaa

SEQ ID NO: 484319 - DNA, 465 bp, Shigella sonnei; identical to SEQ ID NO: 462318

SEQ ID NO: 484320 - DNA, 651 bp, Shigella sonnei; identical to SEQ ID NO: 473345

SEQ ID NO: 484321 - DNA, 855 bp, Shigella sonnei
atgttgtccaaacaaatcccgcttggcatctatgaaaaagcgctccccgccggggagtgctggctggaacgcctgcgactggcaaaaacgttgggcttcgattttgtcgagatgtcggtagatgaaactgacgagcgcctgtcgcgcctcgactggagccgcgagcagcgtctggcgctggtgaatgcgattgttgaaaccggcgtgcgtgtgccgtccatgtgcctttctgcccatcgtcgtttcccgttgggcagcgaagatgacgcggtgcgggcgcaggggctggagattatgcgtaaagccatccagttcgcccaggacgttggcattcgcgtgatccagctggcgggctatgacgtttactatcaggaagccaataacgaaacgcgtcgtcgtttccgtgacggcctgaaagagagcgttgagatggcgagccgcgcgcaggtgacgctggcgatggagatcatggattatccgttgatgaactccatcagcaaggcgctgggttacgcgcactatctcaacaacccgtggttccagctctacccggatatcggcaacctgtcggcgtgggacaacgatgtgcagatggagttgcaggccggaatcgggcatatcgtcgcggtgcatgtgaaagacaccaaaccgggcgtcttcaaaaacgtgccatttggcgaaggtgtggtggatttcgaacgttgcttcgaaacgctcaaacagagtggctattgcgggccgtacctgattgagatgtggagcgaaacggcggaagacccggcggcagaagtggtgaaagcgcgtgattgggtgaaagcgcgcatggccaaagcaggcacggtggaggcggcataa

SEQ ID NO: 484322 - DNA, 687 bp, Shigella sonnei
atgcaaaagctaaaacagcaggtgtttgaagccaacatggatctgccgcgctatgggctggtgacctttacctggggcaacgtcagcgctatcgaccgcgaacgcgggctggtggtgatcaagcccagcggcgttgcctacgaaaccatgaaagcagacgatatggtggtggtcgatatgagcggcaaggtggtggaaggggagtatcgcccgtcttccgacaccgcgacgtatctcgaactctaccgtcgttacccgtcgcttggcggcattgtccatacccactccactcatgctactgcatgggcgcaggcggggctggcgatcccggcgttaggcactacgcacgccgactacttctttggcgacatcccgtgtacgcgcggattaagcgaagaagaggtgcagggcgagtatgaactgaacaccggcaaagtgattatcgaaacgctgggtgacgccgagccgctgcatacgccggggattgtggtgtatcagcacggtccgttcgcctgggggaaagatgcccacgacgcggtgcataacgcggtggtgatggaagaagtggcgaaaatggcgtggattgcgcgcagtattaacccacaactgaatcacatcgacagcttcctcatgaataaacacttcatgcgtaagcacggtcctaacgcctattacgggcagaagtaa

SEQ ID NO: 484323 - DNA, 552 bp, Shigella sonnei
atggctatcaatggattgtttgtcagaacggatccgcaacgtcgccgctatggcgttgcgttacttgtgggtgtactttcaggaattatttcagcatttgttaaatggggagcggaagtccccttgccaccgcgcacattttccggtggtcgcgatgaatttaacccgccgtatatctttctacgggattatttaggtatcgacccaacccaaactgtgtatacattctcggaacatattatcaacccggtgatggtgacgcatatcatcttctcactggtttttgcgatagggtattgtattgtcgcggaaattttcccgaaagtgaaattatggcaggggatattagcagggcttattgtgacagtggcagtccacggtatattttgcccggcgctgaatttaacgccgccgctcactcaattgccttttgacgaatatgcctctgaaatcctggggcatattttctggttctggataatagaaattatgcgccgcgacttacgtaatcgcattactcatgagccagatccggaagtcgcaatccggtga

SEQ ID NO: 484324 - DNA, 276 bp, Shigella sonnei
atgttcagtcgagttttagcccttctggctgtgcttttgctaagtgcaaatacatgggcagccattgaaattaataaccaccaggccagaaacatggatgatgtgcaaagcttaggcgtgatttatatcaatcataatttcgccactgaaagcgaagcgcgtcaggcattaaatgaagagacagatgcgcagggcgcaacgtactaccacgtaattctgatgcgggaaccggggagtaacggcaatatgcacgccagcgcggatatttatcgctag

SEQ ID NO: 484325 - DNA, 396 bp, Shigella sonnei; identical to SEQ ID NO: 461344

SEQ ID NO: 484326 - DNA, 315 bp, Shigella sonnei; identical to SEQ ID NO: 461343

SEQ ID NO: 484327 - DNA, 228 bp, Shigella sonnei; identical to SEQ ID NO: 1904

SEQ ID NO: 484328 - DNA, 450 bp, Shigella sonnei
atgcaagttattctgcttgataaagtagcaaacctgggtagcctgggtgatcaggtaaacgttaaagcgggctatgctcgtaacttcctggtaccgcagggtaaagctgttccagctaccaagaaaaacattgaattcttcgaagcacgtcgcgctgaactggaagctaaactggctgaagttctggcagctgctaatgctcgcgctgagaaaatcaatgcactggaaactgttaccatcgcgtctaaagctggcgacgaaggtaaactgttcggttccatcggtactcgcgacatcgctgacgctgtaactgcagctggcgttgaagtggctaagagcgaagttcgtctgccgaacggcgttctgcgtaccactggcgagcacgaagtgagcttccaggttcacagcgaagtattcgcgaaagtgatcgtaaacgtagtagctgaataa

SEQ ID NO: 484329 - DNA, 972 bp, Shigella sonnei
atgaaaataaaagtatccgctggcattatcggtgctgttcttatgttatccgcaagccagtcctgggcagtgacattaaaactgagtcataatcaggataagtctcatcctgttcataaagcgatggagttctttgcgaaaaagaacaaagagtactctaacggtgatattactattcgtatttatccaaatggaacattgggtactcaacgagaaacaatggagctgattcgttctggcgctattccactggtaaaaaccaatgcggcagaaatggaagcatttgaaaattcctataaattatttagcctgccttatttgttccgcgatcgtgatcattattatcaggtcatgcagggcgatatcgggagaaaaatcctcgactcaacgaaaagcaaaggttatttcgggctgactttttatgatggaggcgcccgcagtttctatggcaataaaccagtactgaaaccagacgatctgaaaggcatgaaagtccgtgtccagccaagccctggcgcagttgaaatgatcaaagtcatgggcggtaacccgacgccactggattacggcgagttgtatacagccttacagcagggtgtggtcgatatggcagaaaacagcgtgatggcgctgaccaccatgcgtcacggtgaagtggcaaaatccttcagccttgacgaacacactatggttcccgatgtggttctgatgagcaatgctgcgtttgataaacttagcccggaaaatcaggcagttatattaaaagcagctaaagaatcaatgagctacatgaaagacttgtggagcgaggaagagaaacaagaatttgcaaaactggataaaatgggcgtgaaagtctaccaggtagataaagctccgtttatcgagaaagtacagccaatgtacgcaaacttcgctaaggacaacccagcccttgccccaatgctggctgatattcaggcagctaagtaa

SEQ ID NO: 484330 - DNA, 408 bp, Shigella sonnei
atgtcaaacgctgacgttcccttcctgattctcgatttgcttaacactatttctgacaacccaataataatcctgcttattatcaatattatcctgttgattatcggcacttttatggatatgacaccggcggtactgatttttacgccgatatttttacctgttgtcaccgaactgggcatggacccgattcactttggtattgtcatggtactgaacatgtgtatcggtatttgtactccgcctgtaggcagtgtgttatttgtcggttgtagtgtatctaaattaccgattaataaaattatcaaacctatgctgccattctatgccgtgatggtattggtgctggcaatggtgacctatattccgcaaatcagtatggcattgccaaaagcactgggctactga

SEQ ID NO: 484331 - DNA, 369 bp, Shigella sonnei
gtggccgcctggcgttatgcttcgcaggattacaggacattcagcgaccatctttacgaaaatgataaacactatcatcagagtgattatgatgatttttatgatattggcagaaaaaatagcctttctgccaatattatgcaacctttatccaataatctgggaaatgtatcattaagtgcgctttggcggaattactgggggcgaagtggaaatgctaaagattaccaattcagttactccaataactggcaacacattagttatactttctctgccagccaatcttatgatgaaaataataaagaagaggagcgttttaatctgtttatctccattcctttctactggggggatgatattgggtaa

SEQ ID NO: 484332 - DNA, 132 bp, Shigella sonnei
atgaaattatctgtgatgattattaatacactgcagagaaataaaaaacaatctgaagcatgctctgaaacatcctactctgtcactctaatgatggcaccttgctcttcttataaagaagggaacaattaa

SEQ ID NO: 484333 - DNA, 777 bp, Shigella sonnei
atgtggcagaactttaaaactagcaattcggcatattcaaaactatgtggaaaattatctttatttaaaagcgtgcccagtcggttaatagaaaaatcagcttactgctcaactgaaaacatggccactaataaatttaatgtcgtcttttcttactgcggagataatataaaggaatttatacttttattaccctataataaatcactggagatgtatgaacttaacgatcaaaagatccagtatttgactgctcttaatattaatatacataaaatgttgctatcaaatataacaatagaaaagagcaacctttcatatgggtattatttttgttgtgtattaaccaatatatcatgttttgaaagcgacttatcaaacaccatcttttcaaatggagaaataaacaacctcttcattaaaaaaagcaacatatttggaacatcgttcactaataccatgataaaaaatttgcgctgtgaagatattatgcctggccgatggaccactcaacttgtcaataagcacttaggttacagatacacaggagtattcaaaaccctggcaagtattgatgacaaaccgtcccgtttcgaaattttgataccattggtacaaactttagttcgcgataatgtaaagctaaataatgatgtgtataaagaacttaataagtttatgcacgattacgacaaaacatcatcaaaaatgagaaaataccttcagagcatcaacgagtgcatgctccttataaaaaatatagttcatcaggattaa

SEQ ID NO: 484334 - DNA, 264 bp, Shigella sonnei; identical to SEQ ID NO: 460013

SEQ ID NO: 484335 - DNA, 942 bp, Shigella sonnei
atgaagctgatacgcggcatacataatctcagccaggccccgcaagaagggtgtgtgctgactattggtaatttcgacggcgtgcatcgcggtcatcgcgcgctgttacagggcttgcaggaagaagggcgcaagcgcaacttaccggtgatggtgatgctttttgaacctcaaccactggaactgtttgctaccgataaagccccggcaagactgacccggctgcgggaaaaactgcgttaccttgcagagtgtggcgttgattacgtgctgtgcgtgcgtttcgacaggcgtttcgcggcgttaaccgcgcaaaatttcatcagcgatcttctggtgaagcatttgcgcgtaaaatttcttgccgtaggggatgatttccgctttggcgctggtcgtgaaggcgatttcttgttattacagaaagctagcatggaatacggcttcgatatcactagtacgcaaactttttgcgaaggtggcgtgcgtattagcagcaccgctgtgcgtcaggcgctggcggatgacaatctggctctggcagaaagtttactggggcacccgtttgccatctccgggcgtgtagtccacggtgatgaattagggcgcactataggtttcccgacggcgaatgtaccgctacgccgtcaggtttccccggtgaaaggggtttatgcggtagaagtgctgggcctcggtgaaaagccgttacccggcgtggcaaacatcggaacacgcccaacggttgccggtattcgccagcagctggaagtgcatttgttagatgttgcaatggacctttacggtcgccatatacaagtagtgctgcgtaaaaaaatacgcaatgagcagcgatttgcgtcgctggacgaactgaaagcgcagattgcgcgtgatgaattaaccgcccgcgaattttttgggctaacaaaaccggcttaa

SEQ ID NO: 484336 - DNA, 2817 bp, Shigella sonnei
atgagtgactataaatcaaccctgaatttgccggaaacagggttcccgatgcgtggcgatctcgccaagcgcgaaccgggaatgctggcgcgttggactgatgatgatctgtacggcatcatccgtgcggctaaaaaaggcaaaaaaaccttcattctgcatgatggccctccttatgcgaatggcagcattcatattggtcactcggttaacaagattctgaaagacattatcgtgaagtccaaagggctttccggttatgactcgccgtatgtgcctggctgggactgccacggtctgccgatcgagctgaaagtagagcaagaatacggtaagccgggtgagaaattcaccgccgccgagttccgcgccaagtgccgcgaatacgcggcgacccaggttgacggtcaacgcaaagactttatccgtctgggcgtgctgggcgactggtcgcacccgtacctgaccatggacttcaaaactgaagccaacatcatccgcgcgctgggcaaaatcatcggcaacggtcacctgcacaaaggcgcgaagccagttcactggtgcgttgactgccgttctgcgctggcggaagcggaagttgagtattacgacaaaacttctccgtccatcgacgttgcttttcaggcggtcgatcaggatgcactgaaagcaaaatttgccgtaagcaacgttaacggcccaatctcgctggtgatctggaccactacgccgtggactctgcctgcgaaccgcgcaatctctattgcacctgatttcgactatgcgctggtgcagatcgacggtcaggccgtgattctggcgaaagatctggttgaaagcgtaatgcagcgtatcggcgtgaccgattacaccattctcggcacggtaaaaggtgcggagcttgagttgctgcgctttacccatccgtttatgggcttcgacgttccggcaatcctcggcgatcacgttaccctagatgccggtaccggtgccgttcacaccgcgcctggccacggcccggacgactatgtgatcggtcagaaatacggcctggaaaccgctaacccggttggcccggacggcacttatctgccgggcacttatccgacgctggatggcgtgaacgtcttcaaagcgaacgacatcgtcgttgcgctgctgcaggaaaaaggcgcgctgctgcacgttgagaaaatgcagcacagctatccgtgctgctggcgtcacaaaacgccgatcatcttccgcgcgacgccgcagtggttcgtcagcatggatcagaaaggtctgcgtgcgcagtcactgaaagagatcaaaggcgtgcagtggatcccggactggggccaggcgcgtatcgagtcgatggttgctaaccgtcctgactggtgtatctcccgtcagcgcacctggggcgtaccgatgtcactgttcgtgcacaaagacacggaagagctgcatccgcgtactctcgaactaatggaagaagtggcaaaacgcgttgaagttgacggcatccaggcgtggtgggatcttgatgcgaaagagatcctcggcgatgaagctgatcagtacgtgaaagtgccggacacattggatgtatggtttgactccggatctacccactcttctgttgttgacgtgcgtccggaatttgccggtcacgcagcggacatgtatctggaaggttctgaccagcaccgtggttggttcatgtcttccctaatgatctccaccgcgatgaaaggcaaagcgccgtatcgtcaggtactgacccacggctttaccgtggatggtcagggtcgcaagatgtctaaatccatcggcaataccgtttcgccgcaggatgtgatgaacaaactgggcgcggatattctgcgtctgtgggtggcatcaaccgactacaccggtgaaatggccgtttctgacgagatcctgaaacgtgctgccgatagctatcgtcgtatccgtaacaccgcgcgcttcctgctggcaaacctgaacggttttgatccagcaaaagatatggtgaaaccggaagagatggtggtactggatcgctgggccgtaggttgtgcgaaagcggcacaggaagacatcctcaaggcgtacgaagcatacgatttccacgaagtggtacagcgtctgatgcgcttctgctccgttgagatgggttccttctacctcgacatcatcaaagaccgtcagtacaccgccaaagcggacagtgtggcgcgtcgtagctgccagactgcgctgtatcacatcgcagaagcgctggtgcgctggatggcaccaatcctctccttcaccgctgatgaagtgtggggctacctgccgggcgaacgtgaaaaatacgtcttcaccggtgagtggtacgaaggcctgtttggcctggcagacagtgaagcgatgaacgatgcgttctgggacgagctgttgaaagtgcgtggcgaagtgaacaaagtcattgagcaagcgcgtgccgacaagaaagtgggtggctcgctggaagcggcagtaaccttgtatgcagaaccggaactgtcggcgaaactgaccgcgctgggcgatgaattacgatttgtcctgttgacctccggcgctaccgttgcagactataacgacgcacctgctgatgctcagcagagcgaagtactcaaagggctgaaagtcgcgttgagtaaagccgaaggtgagaagtgcccacgctgctggcactacacccaggatgtcggcaaggtggcggaacacgcagaaatctgcggccgctgtgtcagcaacgtcgccggtgacggtgaaaaacgtaagtttgcctga

SEQ ID NO: 484337 - DNA, 495 bp, Shigella sonnei; identical to SEQ ID NO: 460016

SEQ ID NO: 484338 - DNA, 450 bp, Shigella sonnei
atgtctgaatctgtacagagcaatagcgccgtcctggtgcacttcacgctaaaactcgacgatggcaccaccgccgagtctacccgcaacaacggtaaaccggcgctgttccgcctgggtgatgcttctctttctgaagggctggagcaacacctgttggggctgaaagtgggcgataaaaccaccttctcgttggagccagatgcggcgtttggcgtgccgtcaccggacctgattcagtacttttcccgccgtgaatttatggatgcaggcgagccagaaattggcgcaatcatgctttttaccgcaatggatggcagtgagatgcctggcgtgatccgcgaaattaacggcgactccattaccgttgatttcaaccatccgctggccgggcagaccgttcattttgatattgaagtgctggaaatcgatccggcattggaggcgtaa

SEQ ID NO: 484339 - DNA, 951 bp, Shigella sonnei
atgcagatcctgttggccaacccgcgtggtttttgtgccggggtagaccgcgctatcagcattgttgaaaacgcgctggccatttacggcgcaccgatatatgtccgtcacgaagtggtacataaccgctatgtggtcgatagcttgcgtgagcgtggggctatctttattgagcagattagcgaagtaccggacggcgcgatcctgattttctccgcacacggtgtttctcaggcggtacgtaacgaagcaaaaagccgcgatttgacggtgtttgatgccacctgtccgctggtgaccaaagtgcatatggaagtcgcccgcgccagccgtcgtggcgaagagtcgattctcatcggccacgccgggcatccggaagtggaaggtacaatgggccagtacagtaacccggaagggggaatgtatctggtcgaatcgccggacgatgtgtggaaactgacggtcaaaaacgaagagaagctctcctttatgacccagaccacgctgtcggtggatgacacgtctgatgtgatcgacgcgctgcgtaaacgcttcccgaaaattgtcggtccgcgcaaagatgacatctgctacgccacgactaaccgtcaggaagcggtacgcgccctggcagaacaggcggaagttgtgttggtggtcggttcgaaaaactcctccaactccaaccgtctggcggagctggcccagcgtatgggcaaacgcgcgtttttgattgacgatgcgaaagatatccaggaagagtgggtgaaagaggttaaatgcgtcggcgtgactgcgggcgcatcggctccggatattctggtgcaaaatgtggtggcacgtttgcagcagctgggcggtggtgaagccattccgctggaaggccgtgaagaaaacattgttttcgaagtgccgaaagagctgcgtgtcgatattcgtgaagtcgattaa

SEQ ID NO: 484340 - DNA, 915 bp, Shigella sonnei
atgcgtttacctatcttcctcgatactgaccccggcattgacgatgccgtcgccattgccgccgcgatttttgcccccgaactcgacctgcaactgatgaccaccgtcgcgggtaatgtctcggttgagaaaaccacccgcaacgccctgcaactgctgcatttctggaatgcggagattccgctcgcccagggagccgctgtgccgctggtacgcgcaccgcgtgatgcagcatctgtgcacggcgaatcgggaatggctggctacgactttgttgagcacaaccgaaagccaatcgggataccagcgtttctggcgattcgtgatgccctgatgcgtgcaccagagcctgttaccctggtggccattggcccgttaaccaatattgcgctgttactttcacaatgcccggaatgtaaaccgtatattcgtcgtctggtgatcatgggcggttcttctggtcgcggcaactgtacaccaaatgccgagtttaatatcgctgccgatccagaagcggctgcctgtgtcttccgtagcggaatcgaaatcgtcatgtgcggtctggatgtcaccaatcaggcaatattaacccctgactatctcgctactttgccggagttgaatcgcaccggaaaaatgcttcatgcactgtttagccactaccgtagcggcagtatgcaaagcggtctgcgaatgcacgatctctgcgccatcgcctggctggtgcgcccggacttattcaccctcaagccgtgttttgtcgcggtagaaactcaaggcgaatttacctcaggcacgacggtggttgatatcgacggttgcctgggcaaaccagccaatgtaaaggtggcattggatctggatgtgaaaggcttccagcagtgggtggctgaggtgctggctctggcgtcgtaa

SEQ ID NO: 484341 - DNA, 822 bp, Shigella sonnei
atgcatgatgcaaacatccgcgttgccatcgcgggagccggggggcgtatgggccgccagttgattcaggcggcgctggcattagaaggcgtgcagctgggcgcggcgctggagcgcgaaggatcttctttactgggcagcgacgccggtgagctggctggtgcagggaaaacaggcgttaccgtgcaaagcagcctcgatgcggtaaaagatgattttgatgtgtttatcgattttacccgtccggaaggtacgctgaaccatctcgctttttgtcgccagcatggcaaagggatggtgatcggcactacggggtttgacgaagccggtaaacaggcgattcgtgacgccgccgccgatattgcgattgtctttgccgccaattttagcgttggcgttaacgtcatgcttaagctgctggagaaagcagccaaagtgatgggtgactacaccgatatcgaaattattgaagcacatcatagacataaagttgatgcgccgtcaggcaccgcactggcaatgggagaggcgatcgcccacgcccttgataaagatctgaaagattgcgcggtctacagtcgtgaaggccacaccggtgaacgtgtgcctggcaccattggttttgccaccgtgcgtgcaggtgacatcgttggtgaacataccgcgatgtttgccgatattggcgagcgtctggagatcacccataaggcgtccagccgtatgacatttgctaacggcgcggtaagatcggctttgtggttgagtggtaaggaaaatggtctttttgatatgcgagatgtacttaatctcaataatttgtaa

SEQ ID NO: 484342 - DNA, 1149 bp, Shigella sonnei
ttgattaagtcagcgctattggttctggaagacggaacccagtttcacggtcgggccataggggcaacaggttcggcggttggggaagtcgttttcaatacttcaatgaccggttatcaagaaatcctcactgatccttcctattctcgtcaaatcgttactcttacttatccccatattggcaatgtcggcactaatgacgccgatgaagaatcttctcaggtacatgcacaaggtctggtgattcgcgatctgccgctgattgccagcaacttccgtaataccgaagacctctcttcttacctgaagcgccataacatcgtggcgattgccgatatcgatacccgtaagctgacgcgtttactgcgcgagaaaggcgcacagaatggctgcattatcgcaggcgataacccggatgcggcgttggcgttagaaaaagcccgcgcgttcccaggtctgaatggcatggatctggcaaaagaagtgaccaccgcagaagcctatagctggacacaagggagctggacgttgaccggcggcctgccagaagcgaaaaaagaagacgagctgccgttccacgtcgtggcttatgattttggtgccaagcgcaacatcctgcggatgctggtggatagaggctgtcgcctgaccatcgttccggcgcaaacttctgcggaagatgtgctgaaaatgaatccagacggcatcttcctctccaacggtcctggcgacccggccccgtgcgattacgccattaccgccatccagaaattcctcgaaaccgatattccggtattcggcatctgcctcggtcatcagctgctggcgctggcgagcggtgcgaagactgtcaaaatgaaatttggtcaccacggcggcaaccatccggttaaagatgtggagaaaaacgtggtgatgatcaccgcccagaaccacggttttgcggtggatgaagcaacattacctgcaaacctgcgtgtcacgcataaatccctgttcgacggtacgttacagggcattcatcgcactgataaaccggcgttcagcttccagggtcacccggaagccagccctgggccacacgacgcagcgccgttgttcgaccactttatcgagttaattgagcagtaccgtaaaaccgctaagtaa

SEQ ID NO: 484343 - DNA, 3222 bp, Shigella sonnei
atgccaaaacgtacagatataaaaagtatcctgattctgggtgcgggcccgattgttatcggtcaggcgtgtgagtttgactactctggcgcgcaagcatgtaaagccctgcgcgaagagggttaccgcgtcattctggtgaactccaacccggcgaccatcatgaccgacccggaaatggccgatgcgacctacatcgagccgattcactgggaagtagtacgcaagattattgaaaaagagcgcccggacgcggtgctgccaacgatgggcggtcagacggcgctgaactgcgcgctggagctggagcgtcagggcgtgttggaagagttcggcgtgactatgattggtgcgaccgccgatgcgattgataaagcagaagaccgccgtcgtttcgacgtagcgatgaagaaaattggtctggaaaccgcgcgttccggtatcgcacacacgatggaagaagcgctggcggttgccgctgacgtgggcttcccgtgcattattcgcccatcctttaccatgggcggtagcggcggcggtatcgcttataaccgcgaagagtttgaagaaatttgcgcccgcggtctggatctctccccaaccaaagagctgctgattgatgagtcgctgatcggctggaaagagtacgagatggaagtggtgcgtgataaaaacgacaactgcatcatcgtctgctctatcgaaaactttgatgcgatgggcatccataccggtgactccatcactgtcgcgccagcccaaacgctgaccgacaaagaatatcaaatcatgcgtaacgcctcgatggcggtgctgcgtgaaatcggcgttgaaaccggtggttccaatgtccagtttgcggtgaacccgaaaaacggtcgcctgattgttatcgaaatgaacccacgcgtgtcccgttcttcggcgctggcgtcgaaagcgaccggtttcccgattgctaaagtggcggcgaaactggcggtgggttacaccctcgacgaactgatgaacgacatcactggcggacgtactccggcctccttcgagccgtccatcgactatgtggttactaaaattcctcgcttcaacttcgaaaaattcgctggtgctaacgaccgtctgaccactcagatgaaatcggttggcgaagtgatggcgattggtcgcacgcagcaggaatccctgcaaaaagcgctgcgcggcctggaagtcggtgcgactggattcgacccgaaagtgagcctcgatgacccggaagcgttaaccaaaatccgtcgcgaactgaaagatgctggcgcagagcgtatctggtacatcgccgatgccttccgtgcgggcctgtctgtggacggcgtgttcaacctgaccaatattgaccgctggttcctggtacagattgaagaactggtgcgtctggaagagaaagtagcggaagtgggcatcactggcctgaacgctgaattcctgcgccagctgaaacgcaaaggctttgccgatgcgcgtctggcaaaactggcgggcgtgcgcgaagcggaaatccgcaagctgcgcgaccagtatgacctgcacccggtttataagcgcgtggatacctgtgcggcagagttcgccaccgacaccgcttacatgtactccacttatgaagaagagtgcgaagcgaatccgtctaccgaccgtgaaaaaatcatggttctcggcggcggcccgaaccgtatcggtcagggtatcgaattcgactactgctgtgtacacgcctcgctggcgctgcgcgaagacggttacgaaaccattatggttaactgtaacccggaaaccgtctccaccgactacgacacttccgatcgcctctacttcgagccggtaactctggaagatgtgctggaaatcgtgcgtattgagaagccgaaaggcgttatcgttcagtacggcggtcagaccccgctgaaactggcgcgcgcgctggaagctgctggcgtaccggttatcggcaccagcccggatgctatcgaccgtgcagaagaccgtgaacgcttccagcatgcggttgagcgtctgaaactgaaacaaccggcgaacgccaccgttaccgctattgaaatggcggtagagaaggcgaaagagattggctacccactggtggtacgtccgtcttacgttctcggcggtcgggcgatggaaatcgtctatgacgaagctgacctgcgtcgctacttccagacggcggtcagcgtgtctaacgatgcgccagtgttgctggatcacttccttgatgacgcggtagaagttgacgtggatgccatctgcgacggcgaaatggtgctgattggcggcatcatggagcacatcgagcaggcgggcgtgcactccggtgactccgcatgttctctgccagcctacaccttaagtcaggaaattcaggatgtgatgcgccagcaggtgcagaaactggccttcgaattgcaggtgcgcggtctgatgaacgtgcagtttgcggtgaaaaacaacgaagtctacctgattgaagttaacccgcgtgcggcgcgtaccgttccgttcgtctccaaagccaccggcgtaccgctggcaaaagtggcggcgcgtgtgatggctggcaaatcgctggctgagcagggcgtaaccaaagaagttatcccgccgtactactcggtgaaagaagtggtgctgccgttcaataaattcccgggtgttgacccgctgttagggccagaaatgcgctccaccggggaagtgatgggcgtgggccgcaccttcgctgaagcgtttgccaaagcgcagctgggcagcaactccaccatgaagaaacacggtcgtgcgttgctttccgtgcgcgaaggcgataaagaacgcgtggtggacctggcggcaaaactgctgaaacagggcttcgagctggatgcgacccacggcacggcgattgtgctgggcgaagcgggcattaatccgcgtctggtgaacaaggtgcatgaaggccgtccgcacattcaggaccgcatcaagaatggcgaatatacctacatcatcaacaccacttcaggccgtcgcgcgattgaagactcccgcgtgatccgtcgcagtgcgctgcaatataaagtgcattatgacaccaccctgaacggtggtttcgctaccgcgatggcgctgaatgccgacgcgaccgaaaaagtaatttcggtgcaggaaatgcacgcgcagatcaaataa

SEQ ID NO: 484344 - DNA, 372 bp, Shigella sonnei
ttggagtcattacccgattttctcttttacgcgctggtgccgtttggctttattcttgctgcaccggagcaaaatgcgctggcaggcggctggttgttgtttgcgtttatcggcacgggcagcagttttctcgcctttgctgcactggcagcaaaacatcagattgataaccccggttatgcacataagtcgttttactatctggggggattaaccgaaggcacagaaacgatcttactgtttgtgctgggatgtttattccctgcatggtttgcgtggtttgcgtggatcttcggtgcgttgtgctggatgacgacctttacgcgggtgtggagtgggtatctgacgctgaagtcgctccagcgtcagtaa

SEQ ID NO: 484345 - DNA, 1308 bp, Shigella sonnei; identical to SEQ ID NO: 464626

SEQ ID NO: 484346 - DNA, 654 bp, Shigella sonnei
atgctctgcgtgaaaaatgtttcgctacgtttaccagaaagccgcttgctgacaaacgttaactttacggttgataaaggtgacatcgtcacgttaatggggccgtctggctgtggaaaatccactctgttttcatggatgattggtgcactggctggacagttttcttgtacaggtgagctatggctcaatgagcaacggattgacatgctacccaccgcacagcgtcagattggcattcttttccaggatgcactgttatttgaccagttcagcgtcgggcaaaatttactgctggcgctactgtcgacgctcaaggggactgccaggcgcaatgccgtgaaagacgcgcttgatcgagcgggactggctgaaacttatcaccaggaccctgcgacattatcaggcggtcagcgagcgcgggtggccctgctgcgcgcccttctcgctcagccaaaagcgttactcctggatgagccattcagccgtcttgatgtggctctgcgcgataattttcgccagtgggtgttcagcgaagttcgcgaactggcgatccccgtcgttcaggtaacgcacgatctccaggatgttcctgctgatagttctgttctggatatggcgcagtggtcagaaaattacaacaaactgcgataa

SEQ ID NO: 484347 - DNA, 654 bp, Shigella sonnei
gtgctgtgtgtggttctgctggcgatcctcgcggatcagtcgacgatcaatagtgaagcactcatcaacagtctgacaatggggctggtagcaacattcatcgctttgctcctgttactgctgtggctggaatgggggccacagcgtcgccagttgtggctatggttgcccattctattgcccgatctgccactggtggcgggccagtacacgctggcgctatggctgaacctggatggaagctggacggcggtggtctgggggcatctgctgtgggtaatgccgtggatgctgtttatcctgcaacccgcctggcagcgcattgattcacggttaattttgattgcgcaaacactgggctggtcgcgggccaaaatcttcttttacgtgaaatgcccactcatgttgcgccctgtgctgattgccttcgcggtgggattttcagtcagtattgcgcagtatatgccgacgctgtggctgggcgcggggcgttttccgacgctcaccactgaggcggtggcattaagcagcggcggcagcaacggtattctcgccgcccaggctttatggcaactgttgttaccgcttattatttttgccctgaccgcgttagtcgcaaaatgggtaggttatgtcagacaaggactccgctaa

SEQ ID NO: 484348 - DNA, 675 bp, Shigella sonnei
atgtgcgcccgtctgccgtggctgctcgccattccccatgtggcttttgccaccagcgccctgctgctctttgctgacggagggctgctatatgactatttcccgtatttcactccgccaatggaccgatttggcatcggtctgggcctcacccttgcagtgaaagaaagcgcatttctgctgtggatcttagcggcagtattgagcgaaaaacggctgttgcagcaggtcattgtgctggattcgctgggctacagccgctggcaatgcctgaactggctgctgttgccctccgtcgcgccttcgctggcaatggcgatgctggcgattgttgcctggtcgctttcggtcgtggatgtggcgattattcttgggccaggtaatccaccgacgctggcagtaattagctggcagtggttaactcagggcgacgcggatcaacaaacgaaaggcgcactcgccagtctgctgctgatgctgttactcgccgcctacgttttgctgagctatctgctatggcgcagctggcggcgcactattccccgcgtagatggcattcgcaatgcctgccacacctttattaccaggcactacgctggcgagttttttacccttaaccggtgtgctgtgtgtggttctgctggcgatcctcgcggatcagtcgacgatcaatag

SEQ ID NO: 484349 - DNA, 240 bp, Shigella sonnei
atggttacgccgttacggtacgcattaatctttttgctgtgggcgatggtggcggtgatttatgcaccgctgatcccggcagctctcacgctgatatcgcctgcgttgtcgttgacacactggcaggcgttatttgccgatccacagttaccgcatgcattactggcaacgctggtatcgacaaccatcgcggcggtcggggcattgttgattgccctgctggtgattgtggcgctatag

SEQ ID NO: 484350 - DNA, 1167 bp, Shigella sonnei
atgcgccattgtgggtggttgctgggattgttatcgctgttttctttggcaacacatgccagtgactggcaggaaattaaaaatgaggccaaagggcaaaccgtctggtttaacgcctggggcggcgataccgcaattaaccgctatctcgactgggttagcggcgagatgaaaacccattacgctataaacctgaagattgttcgtctcgcggatgccgcagacgcggtgaagcgcattcagaccgaagctgctgccggtcgtaaaacgggcggctcggtggatctgctctgggtgaacggcgaaaacttccgcaccttaaaagaggccaatttattacaaacgggctgggcggagactctgcccaactggcgctatgtcgacacacagctgccggtgcgggaagatttttcagtgccgacacaaggtgcggaatcgccctggggcggcgcacaactgacgtttatcgcccgccgcgatgttacgccacagccaccacaaacgccgcaagccttactggagtttgctaaagccaatcccggcacggttacttatccgcgcccaccggactttaccggcacggcgtttcttgaacagttgctgattatgctgacgccagatcccgccgcattaaaagaagcgccggacgatgcgactttcgcccgtgtcactgcgcccttgtggcaatatcttgatgcactgcatccgtatttgtggcgcgaaggaaaggatttcccgccttcgcccgcgcggatggatgctctgctgaaagccggcacattgcgcctgtcgctgacctttaaccccgcgcatgcgcagcaaaaaatcgccagcggcgatttgccggcaagcagttacagttttggctttcgcgaggggatgattggcaacgtgcatttcgtcaccattccagccaacgcgaatgccagtgctgcggcgaaggtagttgccaatttcctgctctcacccgatgcgcaactgcgtaaagcagatcccgttgtctggggcgatccttctgttctcgatccgcaaaaactgcctgacgggcagcgcgaaatattgcaatcaagaatgccgcaggatctgccgccggtactggctgaaccgcacgcaggatgggtgaatgcactggaacaagaatggttacgccgttacggtacgcattaa

SEQ ID NO: 484351 - DNA, 549 bp, Shigella sonnei
atgggtttaccgccgcttagcaaaattcctttcattttacgtccgcaggcgtggctgcatcgtcgccattacggcgaggtgctaagcccgattcgctggtgggggcggatcccgtttatcttttatttggtgtcaatgtttgttgggtggctggagcgcaaacgctcaccgctcgatccggtagtgcgatcgcttgtcagcgcgcgcattgcgcaaatgtgcctgtgtgagttttgtgtggatatcaccagtatgaaagtcgccgagcgtaccggcagcagcgataaactgctggcagtggctgactggcggcaaaacccgctctttagcgatgaagaacggctggcgctggagtacgccgaagccgcaagcgtcacaccgccaacagtcgatgatgccctgcgtacccgactggctgcgcattttgacgctcaggcgctcaccgaactgacggcattgatcggcctgcaaaacctgtcggctcgttttaattctgccatggacattcccgctcaggggctgtgccgtattccggaaaaacgttcttaa

SEQ ID NO: 484352 - DNA, 708 bp, Shigella sonnei
atgatgaagatgcaatcgcgtaaaatctggtactaccgtataaccctcatcatcctgttgttcgctatgctgctcgcatgggcgctgcttcccggcgtccatgagtttatcaatcgcagcgttgcggcgtttgccgccgtggaccaacagggtatagaacgctttattcagtcttacggcgcactggcggcagttgtctcgttcttgttgatgattttacaggccattgctgcaccgctacctgcgtttttgatcacctttgccaatgcgtcgctgtttggcgcgttctggggcggcttgctgtcgtggaccagttcgatggcctgcgcggcgctgtgcttttttatcgccagagtgatgggccgcgaagtggtggaaaaattaaccggcaaaaccgtgcttgacagtatggacggctttttcactcgctacggcaaacacaccatcctggtctgtcggttattgccttttgtccctttcgatccaatcagctatgctgccgatctgacttcaatacgttttcgctcgttttttatcgccaccgggcttggtcaattaccgacgactattgtttattcctgggcgggcagcatgttaacaggcggtactttctggtttgtcaccggactgtttattctgtttgccctgaccgtggtgatttttatggcgaagaaaatatggcttgagcgccagaagaggaatgactga

SEQ ID NO: 484353 - DNA, 678 bp, Shigella sonnei
atgtcgcaacattattcagtgtcatggaaaaaaggactggctgcactctgcttactggctgttgccgggcttagcggctgcgatcaaaaagagaatgcggcggcaaaagtggaatacgacggactttcgaacagccaaccgctgcgcgtcgatgccaataaccatacggtaaccatgttggtgcaaattaatggtcgtttcctcaccgacgacactcgtcacggtattgtgtttaaagatggctccaacggacataaatcgctgtttatggcttatgcgaccccgaaagcattttatgaagccctgaaagaggcaggtggtacgccgggcgaaaacatgacgatggataataaagaaacgactcatgtcacaggcagcaaactggatatttcggtcaactggcaaggggcggcaaaagcgtattccttcgatgaagtgattgttgacagtaatggcaagaaactggacatgcgctttggcggtaatttaacggcagcagaagagaagaaaacgggttgcctggtgtgtctggatagctgcccggtcggcatcgtcagcaatgcaacatacacttatggtgcggtggaaaaacgcggcgaagtgaaattcaaaggcaatgcctcagttctcccggcggataacacgctggcaacggttacctttaaaatcaccgaataa

SEQ ID NO: 484354 - DNA, 291 bp, Shigella sonnei
ttgtttccttacaatattcaaaattacgcttacggattaaccaccatcgccttctggccttatacccttatttcggcactcacgaccctgcccggtattgttatttataccgtgatggcaagcgatctcgccaatgaaggcattacgctgcgctttattttacaactctgtctggcgggcctggcgctgtttattctcgtccagctcgcaaaactctacgcccgacacaaacatgtggatctgtctgcttcgcgccgcagcccgcttactcacccaaaaaatgaaggatag

SEQ ID NO: 484355 - DNA, 459 bp, Shigella sonnei
atgaatgctgagcgtaaatttcttttcgcctgtcttatttttgcgctggtcatttacgctatccacgctttcggtttattcgatctgctcaccgatttaccccacttacagacactcattcgccagagcggattgttcggttatagcctctatattctgttattcatcattgccaccctctttgtgttaccaggaagcatactggtgatcgctggaggaatagtttttggcccgctcttagggacactactctcattaattgccgccacgctggcctcctcgtgctcattcctgctggcgcggtggctgggacgtgatttactgctgaaatacgtgggccatagccataccttccaggccattgaaaaaggcattgcgcgtaacggtattgattttcttattctgacccgcttaatccgttgtttccttacaatattcaaaattacgcttacggattaa

SEQ ID NO: 484356 - DNA, 807 bp, Shigella sonnei; identical to SEQ ID NO: 460879

SEQ ID NO: 484357 - DNA, 1221 bp, Shigella sonnei
atgtctcagccaattacgcgtgaaaactttgatgaatggatgatacctgtttacgctccggcaccctttataccggtacgtggcgaaggttcgcgcttgtgggatcagcaggggaaagagtatatcgacttcgcgggtggcattgcggtgaacgcgctgggccatgcgcatccggaactgcgtgaagcgctgaacgaacaggcgagtaagttctggcataccggcaacggttacaccaacgagccggtactgcgactggcgaaaaaattgatcgacgccacgtttgccgatcgcgtcttcttttgtaactccggtgcggaagccaacgaagcggcgctaaaactggcgcgtaaattcgctcacgaccgctacggcagccataagagcggtatcgtggcgtttaaaaatgcgtttcatggtcgcacgctgtttactgtcagtgcgggtgggcagccagcctattcacaggattttgcgccactgccaccagatatccgtcatgctgcatataacgatattaactctgccagcgcgctgattgacgacgccacctgtgcggtgattgtcgaacccatccagggggaaggcggtgtggtgccagccagcaacgcgtttttacaaggtctgcgtgaattgtgtgaccgccacaatgcgctgttgatttttgatgaagtacaaaccggcgtcgggcgcaccggggaactgtatgcctatatgcactacggcgtgacacctgatctgttaactaccgccaaagcgctgggcggcggtttcccggtcggtgcgttgttaacaaccgaagagtgcgccagcgtgatgaccgttggcactcatggcaccacctatggcggcaatccgctggcctcggcggtggcgggcaaagtgctggagctcatcaacacaccagagatgcttaatggcgttaaacagcgtcacgactggtttgttgagcgtcttaataccattaatcaccgctacggtttgttcagtgaagttcgcggcttaggtttgttgattggctgtgtactgaatgccgattacgccggacaagcgaaacagatctctcaggaggcggcgaaagcaggcgttatggtactgattgcgggtggcaacgtggtgcgttttgcgcctgcgctcaatgtcagcgaagaagaggtgacgaccggactggatcgctttgcagctgcttgcgaacactttgttagccgaggttcatcatga

SEQ ID NO: 484358 - DNA, 1035 bp, Shigella sonnei
atgatggtcatccgtcccgttgagcgctcagatgtctcggcgctgatgcagcttgccagcaaaacgggcggcggcctgacgtcgcttcccgccaatgaagccacgctttccgcgcgtatcgaaagggcaatcaaaacctggcaaggcgaactgcccaaaagcgagcagggctatgtgttcgtgctggaagatagcgagacaggcaccgtggcggggatttgcgccattgaggtggcggttgggctgaacgatccctggtacaactatcgggtcggcacgttggttcacgcctcaaaagagctgaatgtctataacgcattgccgacgctgtttcttagtaacgatcacaccggcagcagcgagctgtgcacgctgtttctcgacccggactggcgcaaagagggcaacggctatttgctgtcgaaatcgcgctttatgtttatggcggcttttcgcgacaagtttaatgacaaagtggttgctgaaatgcgcggggtgattgacgaacacggctattcaccgttctggcaaagcctcggtaaacgcttcttttcgatggattttagccgcgtcgattttctctgcggcaccgggcaaaaggcatttattgcagaactgatgccgaaacatccgatctatacccactttttatcccaggaagcccaggacgtcatcggtcaggtacatccgcaaaccgcgcctgcccgcgcggtgctggagaaagaaggttttcgttaccgcaactatatcgacatcttcgacggcgggccaacgcttgagtgtgacatcgaccgcgtgcgcgccatccgtaaaagtcggctggtggaagtggcagaagggcagcctgcgcagggcgattttccggcctgcctggtcgccaatgaaaattatcaccatttccgcgtggtgctggcgcgtaccgatccggcaaccgagcgtttgattttaaccgccgcacaactggatgccctcaaatgccacgcaggggatcgcgttcgtctggtgcgcctgtgcgcagaggagaaaacagcatga

SEQ ID NO: 484359 - DNA, 1002 bp, Shigella sonnei
atgactttatggattaacggtgactggataacgggccagggcgcatcgcgtgtgaagcgtaatccggtatcgggcgaggtgttatggcaaggcaatgatgccgatgccgctcaggtcgaacaggcttgtcgggcagcccgtgcggcgtttccgcgctgggcgcggctctcattggctgaacgtcaggtcgttgtcgaacgctttgccggattgctggaaagcaataaagccgaattaaccgcgattattgccagagaaacgggtaagccgcgctgggaagcggcaaccgaagtgacggcgatgatcaataaaatcgcgatatcaattaaggcgtatcacgttcgtaccggcgagcagcgtagtgaaatgccggacggtgcggcgagcctgcgacatcgcccgcacggcgtgctggcggtgtttgggccgtataatttccctggtcatttgccgaacggacatatcgttccggcattgctggcaggtaacaccattatctttaaacccagcgaactgacaccgtggagtggcgaagcggtaatgcgtttatggcagcaggctggcttgccgccgggcgtgctgaacctggtgcagggcgggcgtgaaacgggtcaggcgctgagtgcgctggaggatctcgacggtttgctgtttaccggtagcgccaataccggctaccagctgcatcgccagctctccggtcagccggagaaaattctcgcccttgagatgggcggtaataatccgctaattatcgatgaggtggcggatatcgactcggctgtccatctgaccattcagtcggcgtttgtcacagccgggcaacgctgcacctgcgcccgccgtttattgctcaaaagcggagcacagggcgatgcgtttcttgctcgtctggttgccgtcagccagcgattaacgccgggcaactgggatgacgaaccgcagccgtttattggcgggctgatttctgaacaggccgcacagcaggtggttactgcctag

SEQ ID NO: 484360 - DNA, 462 bp, Shigella sonnei
atgggcggacgaaccctgcttgcgccgcgcttattacaatcagagacatcgttgctgacgccggggatcattgaaatgacaggcgttgctggcgtaccagatgaagaggtgttcggaccgttattgcgcgtctggcgttatgattctttcgaggaagcgattctaatggcgaataacactcgcttcggactctcttgcggtctggtttcccccgagcgggaaaaattcgatcaactgttgctggaggcgcgggtggggattgttaactggaacaaaccgcttactggtgctgccagtaccgcgccattcggcggcattggtgcatccggtaaccatcgccccagcgcctggtatgccgcagattactgcgcatggcctatggcgagcctggagtcggactcgttaactttgcccgcaacgcttaaccccgggctggatttttccgatgaggtggtgcgatga

SEQ ID NO: 484361 - DNA, 1344 bp, Shigella sonnei
atgaacgcctgggaagttaatttcgacgggctggtagggctgacgcatcattacgctggcctgtcgtttggtaatgaagcctctacccgtcaccgttttcaggtgtctaacccgcgactggcggcgaaacagggcttactgaaaatgaaaacccttgccgatgcgggattcccccaggccgtgatcccgccgcacgagcgtccgtttattccggtgctgcgtcagttgggattcagtggtagcgatgagcaggtactggaaaaagttgcacgccaggcaccgcactggctttccagcgtcagctccgcttcgccaatgtgggtagccaatgcggcaacgatcgcgccatctgccgatacgctggatggcaaagtgcatctcaccgttgccaacctgaacaataaatttcaccgttcgctggaagcgcccgtcactgaatcgctgttaaaagctatttttaacgacgaagagaaatttagcgtccattcggcgttgccgcaggtagcgttgctcggtgatgagggggcggcaaaccacaatcgtctcggcggtcattacggtgagccgggtatgcaactttttgtctacgggcgagaagaaggcaatgatacccggccttcccgttatccggcgcgacagactcgcgaagccagcgaggcggtggcaaggcttaatcaggtgaatccccaacaggtgattttcgcccagcaaaacccggacgttatcgaccagggtgtttttcataatgacgtgattgccgtaagtaaccgccaggtgctgttttgccaccaacaggcgttcgctcgccagtcacagttactggcaaacctgcgggcgcgggtgaacggttttatggcgatagaagttccggcaactcaggtttccgtgtcggatgcggtgtctacctatctgtttaacagccaactgttgagccgcgatgatggttccatgatgttggtgctgcctcaggagtgtcgggaacacgccggagtatggggttatctcaatgaactccttgccgctgacaacccgattagcgaactaaaagtctttgatttacgtgaaagcatggcgaatggcggcggcccggcgtgcctgcggttgcgggtagtattgacagaagaagaacgccgggcggtgaatccggcggtgatgatgaacgatacgctgtttaatgcgctcaatgactgggtggatcgttactaccgcgatcgccttactgctgccgatctggccgacccgcaattgctgcgcgaagggcgggaagcactggatgtattgagccaattactgaatctcggttcggtttatccgttccagcgcgagggagggggcaatggataa

SEQ ID NO: 484362 - DNA, 969 bp, Shigella sonnei
atggataattttcttgctctgaccttaacgggtaaaaaaccggttatcaccgagcgagaaatcaacggcgttcgctggcgctggctgggcgatggtgtgctggaactgacgccattaacgccaccgcaaggcgcgctggtgatttctgcggggatccacggtaatgagacggcacctgtggaaatgctggacgcgttgcttggcgcgatatctcacggcgagatcccgttacgttggcggttgctggtgatcctcggggatcctcctgcgctgaagcaagggaaacgttattgccatagcgatatgaaccgaatgtttggcggtcgttggcagctatttgctgaaagcggagaaacctgtcgggcgcgcgaactggaacagtgcctggaagatttttatgaccagggcaaagaatctgtgcgttggcaccttgatctacataccgcaattcgtggctccttgcatcctcagttcggtgtattaccgcaacgcgacattccctgggacgagaaatttctgacgtggctgggtgcggcggggctggaggcgctggtgttccatcaggagcctggtggtacgtttacccatttcagcgccagacattttggcgcgctggcctgtacgctggaacttggcaaagcgttgccctttgggcaaaacgatcttcgccagtttgcagtaactgccagcgcaattgctgcgctgctatctggtgagagtgtcggtatcgtgagaacaccgccgctccgttatcgggtggtttcgcaaattactcgccactcgccgtccttcgaaatgcatatggcaagtgacacgctgaattttatgccgtttgagaaaggaacattgctggcgcaggacggagaggaacgttttaccgtaacccatgatgtagagtatgtgttattccctaatccgttggtagcgttgggattacgcgcgggattaatgctcgaaaaaataagctaa

SEQ ID NO: 484363 - DNA, 462 bp, Shigella sonnei
atgcgtaaattaactgcactgtttgttgcctctaccctggctcttggcgcggctaacctggcccatgccgcagacaccactaccgcagcaccggctgacgcgaagccgatgatgcaccacaaaggcaagttcggtccgcatcaggacatgatgttcaaagacctgaacctgaccgacgcgcagaaacagcagatccgcgaaatcatgaaaggccagcgtgaccagatgaaacgtccgccgctggaagaacgccgcgcaatgcatgacatcattgccagcgataccttcgataaagcaaaagctgaagcgcagatcgcaaaaatggaagaacagcgcaaagctaacatgctggcgcacatggaaacccagaacaaaatttacaacatcctgacgccggaacagaaaaagcaatttaatgctaattttgagaagcgtctgacagaacgtccagcggccaggtga

SEQ ID NO: 484364 - DNA, 657 bp, Shigella sonnei
gtgctggccttcctgttcaaaacgtccggcccagccggggcgtttaaaggtgtagtctttggtcaccacggaagaagggcggatttgtgcgctgtagcggaactggctgatgcagagggtgctcacctcggtacgggtgttcgggttccatgggatttcaaaagattcgggcagatggcggactgtgtcgcacagcaccaggctctggtcggtacttttgtaagcatgctcctcataaaagaagatgccttcctccgccgccatccggcacaggaaatcgtaatcagtctcaccgtactggacacaaaactcacgggaaggatgcggctcgctgaacagcggactccattcggtcaccccgttttcctgcaacatcgtgccgaggatgcttttgatgtcctcgttctggaagatacggaagttctggcgcagaccggcacgccacagcggcgggtgcaccttcatgctgtacagcatctggtttttgtcgttctccccgagttcaaaccaggtcaccacgcctttcacccggcgctgtacttcatcgccctgccatatcgtcaggtaggccattttgtccagcacctgcgcaaattcaagggagagaaactgctggctgaccagggagagatcgagggaaaagagcgaagagagtga

SEQ ID NO: 484365 - DNA, 1449 bp, Shigella sonnei
atggtcagtaagccatttcagcgcccgttttcgctggcaacccgtctgaccttttttatcagcctggccaccatcgcggcgtttttcgcctttgcatggatcatgatccactcagtgaaagtgcattttgccgagcaggatattaatgatttaaaagaaattagcgccacccttgaacgggtacttaatcatcctgacgagacgcaagcccgacgcttaatgacgctggaagatatcgtcagtggttattccaacgtgttgatttccctggcagatagccacggcaaaacggtgtatcactcccccggtgcgccggatatccgcgagtttacgcgtgacgccatacccgataaagacgctcagggtggcgaggtgtatctcctttccggcccgacgattatgatgccaggccacggtcacgggcatatggaacacagcaactggcggatgattaacttgccggttggcccgttggtggacggcaaaccgatttatacgctctacatcgcgctttcgatcgattttcatcttcattacataaatgatttgatgaataaacttattatgaccgcatctgtcatcagcatcctgatcgtctttatcgtgctattggcggtacataaaggtcacgcgccgatccgcagcgtcagccgtcaaatccagaatatcacctcgaaagatctcgacgttcgccttgacccgcagaccgagcccattgagctggaacagctggtactgtcgttcaaccatatgatcgagcgtattgaggatgtctttacccgccagtccaatttctcagcggatatcgctcacgaaattcgcacgccgattaccaatctcatcacgcaaacggaaatcgccctcagccagtctcgcagccagaaggagctggaagatgtgctctactctaatctcgaagagctgacgcgaatggcgaaaatggtcagcgatatgctatttctcgctcaggccgataacaaccagctaatccccgaaaagaaaatgctcaacctggcggatgaagtcggcaaagtgttcgattttttcgaggcgttagcggaagatcgcggcgtggagttgcgatttgttggcgacaaatgtcaggttgcgggcgatccgctgatgctgcgtcgggcgttaagcaacctgctttctaatgccctgcgttatacgccaaccagagagacaattgtagtgcgctgtcagacggtcgatcaccaggtgcaagttaccgtcgaaaaccccggtacgcccattgcgcccgagcacttaccgcgattgtttgaccgtttctaccgcgttgacccttcccgccagcgaaaaggcgaaggtagcggcattgggctggcgatagtgaaatcgattgttgtcgcgcataaaggcacggttgcagtaacgtcagatgcgcgggggacaaggtttgtgattatgctgccggagagagagtga

SEQ ID NO: 484366 - DNA, 684 bp, Shigella sonnei
atgaaactgttgattgtcgaagatgaaaagaaaaccggagaatacttgaccaaagggttaaccgaagccggttttgtggtcgatttggccgacaacgggctgaatggctaccatctggcgatgaccggtgattatgacctgataatcctcgatattatgctgccggacgtgaacggctgggatatcgtgcgcatgttgcgctccgccaataaagggatgccgattctgttgcttaccgcgcttggcaccattgaacatcgcgtcaaggggctggagttgggggccgatgactatctggtgaagccgttcgcttttgctgaactgctggcgcgggtgcgcactctcctgcggcgcggggcggcggtgattatcgaaagtcagtttcaggttgccgatctgatggtcgatctcgtcagccgcaaagtcacccgcagcggcacgcgcatcactctgaccagtaaagagtttactctgctggagttttttctccgccatcagggcgaagtgctgccccgctcgcttatcgcctcgcaggtgtgggacatgaatttcgacagcgacactaacgccattgatgtggcggtgaagcggctacgcggcaaaatcgacaacgactttgagccgaagctgattcagaccgtgcgcggcgtgggctatatgcttgaggtgccggatggtcagtaa

SEQ ID NO: 484367 - DNA, 1383 bp, Shigella sonnei
atgtctccttgtaaacttctgccattttgtgtggcccttgcgctaaccggttgttcactggcaccggattatcagcgtacggcaatgcccgtgccgcagcagttctcactcagccagaacggcttggttaacgcagcagataactaccagaacgtgggctggcgcaccttttttgttgataatcaggtgaagacgctgattagcgaggcgctggtgaataaccgggatttgcgcatggcgacgctgaaagtgcaggaggcacgggcgcaatatcgtctgaccgatgccgaccgctacccacagctcaatggcgagggcagcggcagctggagcggtaatcttaaagggaataccgccacgacacgggagttttcgaccggccttaacgccagctttgacctcgattttttcggtcgcttaaagaacatgagcgaagccgagcgacaaaattatttagccactgaggaagctcagcgcgcggtgcatattctgctggtttctaatgtcgcgcaaagctatttcaatcagcaactggcgtatgcgcaattgcaaatagccgaagaaacgctgcgtaattatcagcagtcatatgcgtttgtcgaaaaacaactgttgaccggtagcagcaatgttctggcgctggaacaggctcgcggggtgatagaaagtacccgcagtgacatcgctaaacgtcagggggaactggcgcaggcgaataatgcattgcaactgttattgggaagctacggcaaactgccgcaagcgcagacagtaaacagcggcagcctgcaaagcgttaaattaccggcgggcttgtcgtcgcaaatcttattgcagcgcccggatattatggaagctgaacacgcgttaatggcggctaatgctaatattggtgctgcgcgtgcggcatttttcccgtctatcagcctgaccagcggaatatcaaccgccagcagcgatctgtcttcattatttaacgctagcagcgggatgtggaattttattcctaaaattgagatccccatttttaatgccggacgcaaccaggccaatctggatatcgccgaaattcgccagcagcagtcggtagtgaattatgaacagaaaatccagaacgcctttaaagaagtggcagatgcgctggcattacgtcaaagcctgaacgatcaaatcagcgcccagcagcgttatctggcgtcgctgcaaattactttgcaacgggcgcgggcattatatcagcacggcgcggtaagttatctggaagtgctggatgccgagcgttctttatttgcaacccgacaaactttactcgacctgaattatgcccgtcaggttaacgaaatttctttgtataccgccttagggggcggttggcagcaataa

SEQ ID NO: 484368 - DNA, 333 bp, Shigella sonnei
atgaaaaaagcactgcaagtcgcaatgttcagtctgtttaccgttattggctttaatgcccaggctaacgaacatcatcatgaaaccatgagcgaagtacaaccgcaggttattagcgccactggcgtggtaaagggtattgatctggaaagcaaaaaaatcaccatccatcacgatccgattgctgccgtgaactggccggagatgactatgcgctttaccatcaccccgcagacgaaaatgagtgaaattaaaaccggcgacaaagtggcgtttaattttgtccagcagggcaacctttctttattacaggatattaaagtcagccagtaa

SEQ ID NO: 484369 - DNA, 1224 bp, Shigella sonnei
atgaaaaaaatcgcgcttattatcggcagcatgatcgcgggcggtattatttctgcggcaggttttacctggtttgcaaaggctgaaccacccgcagaaaaaacgtcgaccgcagaacgtaaaatcttattctggtacgacccgatgtaccccaatacgcggttcgataaaccaggtaaatcgccgtttatggatatggatctggtgccgaaatatgccgatgaagagagttctgcgtctggtgtgcgcattgacccgactcagacgcagaatctgggggtgaaaacggctaccgtcacgcgcggaccgctgacttttgcccagagtttcccggcgaatgtcagttacaacgagtatcagtatgccattgtgcaggctcgcgctgccgggtttatcgacaaggtgtatccgcttaccgtgggcgataaagtacaaaagggcacaccgcttctcgacctgaccattcctgactgggtggaagcgcagagtgagtatttactgctgcgcgaaaccggcggtacggcgacccagactgaaggcattcttgagcggctgcgactggcgggaatgccggaggcggatattcgccgcctgatcgccacgcaaaaaatccagactcgctttacgctcaaagcacccattgatggcgtgatcaccgcgtttgatctgcgcgcgggaatgaatatcgccaaagataacgtggtagcgaaaattcagggtatggacccggtgtgggtcactgctgcgatcccggagtctatcgcctggctggtgaaagatgcctcgcagtttacgctcaccgttccggcgcgaccggataaaacactcaccatccgcaaatggacgctgctacctggcgtggatgccgcgacccgcacgctgcagctgcgtctggaagtcgacaacgccgacgaggcgctaaaaccgggcatgaacgcctggttgcaactcaacaccgccagcgaaccgatgctgctcattccgtcacaggcgctgattgataccggcaacgaacagcgggtgattaccgttgatgccgacggacgctttgtaccgaaacgcgttgccgttttccaggcatcgcaaggcgtcaccgcgttacactctggtctggcggaaggtgaaaaggtggtttccagcggcctgttcctgattgattccgaagccaatatttctggcgcactggagcggatgcgctctgaaagtgctaccaatgcgcattga

SEQ ID NO: 484370 - DNA, 3144 bp, Shigella sonnei
atgattgaatggattattcgtcgctcggtggcgaaccgttttttggtgctgatgggcgcgttgtttctgagcatctggggcacctggaccatcattaacacgccagtggatgcgctgccggatctctccgatgtgcaggtgattattaaaaccagctatcccggtcaggcaccgcaaatcgttgaaaatcaggtgacttatccgctaaccaccaccatgttgtcggtgcctggcgcgaagactgtgcgcggtttctcgcagtttggagactcttatgtgtatgtcattttcgaagatggtaccgatccgtactgggcgcgttcgcgggtgctggagtacctcaaccaggtacagggtaagctgcctgcgggagtcagcgccgagctgggaccagatgccacgggtgttggctggatctatgaatatgcactggtggatcgcagcggtaagcacgatctggccgatttacgctcattgcaggactggtttctcaaatatgagctaaaaaccatccctgacgttgcggaagtggcgtcggtgggcggcgtggtgaaagagtatcaggtggttatcgatccccagcgcctggcgcaatatggcatcagtctagccgaagtaaaaagcgcgctggatgcttcaaaccaggaagcgggcggttcgtcgatcgaactggcggaagcggaatatatggtgcgcgccagcggctatctgcaaacgctcgacgactttaatcacatcgttttaaaagccagtgaaaatggcgtgcccgtttatctgcgtgatgttgcgaaggtccagattggcccggagatgcgccggggcattgccgaactgaatggcgaaggcgaagtggcgggcggggtggtgatcctgcgctccggcaaaaacgcccgagaagtgatcgcctccgtgaaggacaaactggaaacgctgaaaagtagtctgccggaaggcgtggagatagttacaacatacgatcgcagccagctcattgaccgcgccatcgacaacctcagcggcaagttgctggaagagtttatcgtggtggcggtagtctgtgcgctgtttctctggcatgtgcgctcggcgctggtggcgattatttcgttgccgctggggttgtgtattgcttttattgtcatgcacttccagggactgaatgccaatattatgtcgttgggcggcattgcgattgccgtcggggcgatggtcgatgccgctatcgtcatgatcgaaaatgcacataaacggctggaagagtggcagcaccagcatcctgacgccacgctggataataaaacgcgctggcaggtgatcaccgatgcatctgttgaagtgggtccggcgctatttatcagtctgctgattatcacgttgtcgtttatcccgatcttcaccctggaagggcaggaagggcgtctgtttggcccgttggcgttcactaaaacctatgcgatggcgggcgcggcgctgctggcgatcgtagtgatccctatcctgatggggtactggatccgtggcaaaattccgccggaaagcagtaacccgctcaatcgctttttgattcgtgtttatcatcctctattgctgaaagtactgcactggccgaaaaccacgctgttggtggcagcgctttcggtgctgacggttctctggccgctcaataaagttggcggggaatttttaccgcagatcaatgaaggcgacttgttgtatatgccatcgacgctgccggggatttccgcagcagaggcggcgagtatgctgcaaaaaaccgacaagctaattatgagcgtacctgaagtggcgcgggtatttggcaaaaccgggaaagcggaaaccgccaccgattctgctccgctcgagatggttgaaacgaccatccagcttaagccgcaggatcagtggcggcctggcatgacgatggacaaaatcattgaggaactggataacaccgtgcggctgccggggctggcgaatctgtgggtgccgccaattcgtaaccgtatcgatatgctctcaaccggcattaaaagccccatcggcattaaagtttccggcactgtgctggcggatatcgacgcgatggctgagcaaattgaagaagtagcgcgaacggtgccaagcgtggcttctgctctagccgagcgtctggaaggtgggcgctatatcaacgttgagattaaccgtgaaaaagccgcgcgttacggtatgacggtggcggatgtgcagttgtttgtgacttctgcggtgggcggggcgatggttggcgaaacggtggaagggattgcccgttatcccattaatctgcgttatccgcaaagctggcgcgatagcccgcaggcactgcgccagctaccgatcctgacgccgatgaagcagcaaatcaccctggcagacgtggccgacgttaaagtctctaccggaccgtcgatgctgaaaaccgagaatgcgcgcccgacgagctggatttatattgatgcccgcgatcgtgacatggtgtcggtggttcacgatttgcaaaaagcgatagctgaaaaagtgcagttaaaaccgggcaccagcgtggcattctccgggcagttcgagctactggagcgcgccaaccataagctgaaactcatggtgccgatgacactgatgatcatcttcgtgctgttgtatctggcattccgtcgggtgggcgaagcgttgctgattatcagcagcgtaccgtttgcgctggtgggcggcatctggttgctgtggtggatgggctttcatctttctgtggcaacgggcaccggttttattgcccttgccggggtcgccgccgaatttggcgtggtgatgctgatgtatttacgtcacgccatagaggccgagccgtcgttgaataatccgcaaacattcagtgagcagaagctggatgaggcgttgtatcacggcgcggtactgcgcgtgcgcccgaaagcgatgacggtggcggtgattatcgccggtctgctgccgattctgtggggaacgggggctggttcagaggtgatgagccggattgccgcaccgatgattggcggcatgatcaccgcacctttgctgtcgctgtttattatcccggcggcgtataagctgatgtggctgcaccgacatcgggtacggaaataa

SEQ ID NO: 484371 - DNA, 1377 bp, Shigella sonnei
gtgaaaaacgcgtcaaccgtatcggaagatactgcgtcgaatcaagagccgacgcttcatcgcggattacataaccgtcatattcaactgattgcgctgggtggcgcaattggtactggtctgtttcttggcattggtccggcgattcagatggcgggtccggctgtattgctgggttacggcgtcgccgggatcatcgctttcctgattatgcgccagcttggcgagatggtggtcgaagagccggtatccggttcatttgcccactttgcctataaatactggggaccgtttgcgggcttcctctctggctggaactactgggtaatgttcgtgctggtgggaatggcagagctgaccgctgcgggcatctatatgcagtactggttcccggatgttccaacgtggatttgggctgccgccttctttattatcatcaacgccgttaacctggtgaacgtgcgcttatatggcgaaaccgagttctggtttgcgttgattaaagtgctggcaatcatcggtatgatcggctttggcctgtggctgctgttttctggtcacggcggcgagaaagccagtatcgacaacctctggcgctacggtggtttcttcgccaccggctggaatgggctgattttgtcgctggcggtaattatgttctccttcggcggtctggagctgattgggattactgccgctgaagcgcgcgatccggataaaagcattccaaaagcggtaaatcaggtggtgtatcgcatcctgctgttttacatcggttcactggtggttttactggcgctctatccgtgggtggaagtgaaatccaacagtagcccgtttgtgatgattttccataatctcgacagcaacgtggtagcttctgcgctgaacttcgtcattctggtagcatcgctgtcagtgtataacagcggggtttactctaacagccgcatgctgtttggcctttctgtgcagggtaatgcgccgaagtttttgactcgcgtcagccgtcgcggtgtgccgattaactcgctgatgctttccggagcgatcacttcgctggtggtgttaatcaactatctgctgccgcaaaaagcgtttggtctgctgatggcgctggtggtagcaacgctgctgttgaactggattatgatctgtctggcgcatctgcgttttcgtgcagcgatgcgacgtcaggggcgtgaaacacagtttaaggcgctgctctatccgttcggaaactatctctgcattgccttcctcggcatgattttgctgctgatgtgcacgatggatgatatgcgcttgtcagcgatcctgctgccggtgtggattgtattcctgtttgtggcatttaaaacgctgcgtcggaaataa

SEQ ID NO: 484372 - DNA, 1248 bp, Shigella sonnei
atgcaggatttaatatcccaggttgaagatttagcgggtattgagatcgatcacaccacctcgatggtgatgattttcggtattatttttctgaccgccgtcgtggtgcatattattttgcattgggtggtactgcggaccttcgaaaaacgagccatcgccagttcacggctttggttgcaaatcataacccagaataaactcttccaccgtttagcttttaccctgcaggggattatcgtcaatattcaggcggtattctggctgcaaaaaggcaccgaagcggcagatattctgactacctgcgcgcagttgtggatcatgatgtatgcgctgctttcagtcttctcgttgctggatgttattttgaatctggcgcagaaattcccggcggcatctcagttaccgctgaaagggatatttcaggggattaaactgatcggcgcgatcctggtcggcattttgatgatctcgctgctgattggtcagtcgccagcgattctgatcagcggtcttggtgcaatggctgccgtgctgatgttggtatttaaagatccgattcttggtctggtggccggtattcagctttccgcgaacgatatgctgaaactgggcgactggctggagatgccgaaatacggcgcagatggcgcggtgatcgatattgggttaaccaccgtcaaagtgcgtaactgggacaataccattaccactattcccacctggtctctggtttctgactcctttaaaaactggagcgggatgtcagcatctggcgggcgacgtattaagcgcagtatcagtattgatgtcaccagtattcgttttcttgatgaagacgaaatgcaacgtctgaataaagcgcatttgttaaagccttatttaaccagccgccatcaggaaattaatgagtggaatcgccagcaaggttctacggagtcggtattaaacctgcgccgaatgaccaatattggaacctttcgtgcctatctgaacgaatatctgcgtaaccatccgcggattcgtaaagatatgaccttaatggtacgccaactggctccaggtgataacggtttaccgctcgagatctacgcgtttactaacaccgtggtgtggctggaatatgaaagcattcaggctgatatattcgatcacatatttgcgattgtcgaagagtttggtctgcgacttcatcagtcgccaaccggcaatgatattcgctctctggcgggtgcatttaagcagtaa

SEQ ID NO: 484373 - DNA, 654 bp, Shigella sonnei
atggatatcatttctgtcgccttaaagcgtcattccactaaggcatttgatgccagtaaaaaacttaccccggaacaggccgagcagatcaaaactctcctgcaatacagcccatccagcaccaactcccagccgtggcattttattgttgccagcacggaagaaggtaaagcgcgtgttgccaaatccgctgccggtaattatgtgttcaacgaacgtaaaatacttgatgcctcgcacgtcgtggtgttctgtgcaaaaaccgcgatggacgatgcctggctgaagctggttgttgaccaggaagatgctgatggccgctttgccacgccggaagcgaaagccgcgaacgataaaggtcgcaagttcttcgctgatatgcaccgtaaagatctgcatgatgatgcagagtggatggcaaaacaggtttatctcaacgtcggtaacttcctgctcggcgtggcggctctgggtctggacgcggtacccatcgaaggttttgacgccgccatcctcgatgcagaatttggtctgaaagagaaaggctacaccagtctggtggttgttccggtaggtcatcacagcgttgaagattttaacgctacgctgccgaaatctcgtctgccgcaaaacatcaccttaaccgaagtgtaa

SEQ ID NO: 484374 - DNA, 369 bp, Shigella sonnei
atggataagcaatcactgcacgaaacggcgaaacgcctggcccttgagttaccctttgtcgagctttgctggccttttggcccggagttcgatgtttttaaaattggcggcaaaatttttatgctgtcgtcggagctgcgcggcgtcccctttatcaatctgaagtccgatccacaaaaatccctgttaaatcagcagatatacccgagcattaagccagggtatcacatgaataaaaagcactggatttcggtgtatcccggcgaggaaatctccgaagcgttacttcgcgatctgatcaacgattcgtggaatctggtggttgatggtctggctaaacgcgatcaaaaaagagtgcgtccaggctaa

SEQ ID NO: 484375 - DNA, 1119 bp, Shigella sonnei
atgccattacccgattttcatgtttctgaaccttttaccctcggtattgaactggaaatgcaggtggttaatccgccgggctatgacttaagccaggactcttcaatgctgattgacgcggttaaaaataagatcacggccggagaggtaaagcacgatatcaccgaaagtatgctggagctggcgacggatgtttgccgtgatatcaaccaggctgccgggcaattttcagcgatgcagaaagtcgtattgcaggcagccgcagaccatcatctggaaatttgcggcggtggcacacacccgtttcagaaatggcagcgtcaggaggtatgcgataacgagcgctatcaacgaacgctggaaaactttggctatctcatccagcaggcgaccgtttttggtcagcatgtccatgttggctgcgccagtggcgatgacgccatttatttgctgcacggcttgtcacggtttgtgccgcactttatcgccctttccgccgcgtcgccatatatgcaaggaacggatacgcgttttgcctcctcacgaccgaatattttttccgcctttcccgataatggcccgatgccgtgggtcagtaactggcaacaatttgaagccctgtttcgctgtttgagttacaccacgatgatcgacagcattaaagatctgcactgggatattcgccccagtcctcattttggcacggtggaggttcgggtgatggataccccgttaacccttagccacgcggtaaatatggcgggattaattcaggctaccgcccactggttactgacagaacgcccgttcaaacatcaggagaaagattacctgctgtataaattcaaccgtttccaggcctgtcgctatgggctggaaggcgtcattaccgatccgcacactggcgatcgtcgaccgctaacggaagacaccttgcgattgctggaaaaaatcgccccttccgcacataaaattggtgcatcgagcgcgattgaggccctgcatcgccaggtcgtcagcggtctgaatgaagcgcagctgatgcgcgatttcgtcgccgatggtggctcgctgattgggctggtgaaaaagcattgtgagatctgggccgatgactaa

SEQ ID NO: 484376 - DNA, 252 bp, Shigella sonnei
atgaagccccaggagatatttctatcaaccctggggctgccactccaaacccgaacaatttggatggtagtcccttcttcgcatggaggcaatataaacatgctgacgaaatatgcccttgcggcagtcatagtgctgtgtttgacggtgctgggatttacgcttctggtcggagactcgctgtgtgagtttacggtgaaggaacgtaatattgagtttaaggctgttctcgcttacgaaccgaagaagtag

SEQ ID NO: 484377 - DNA, 1251 bp, Shigella sonnei
atgctgaccttgcaattccatgacatccttcccggctcatgtatttcaagagtttatcatgaaactgaaaaggaatatcttaaactagaagcaaaaaccgagaaaattatttctgatgcgcagtctactttattaagtaaaattgacacttcttcttataaagatccgcacattttgtttaataccacctgttttgctcgtaacgaatggatcaatataaacaacaactggctcaaagcacgagtaaactcttatggttatgctgtgattgttccaaagaataagatcgtaaatggtctgaaggcagaatctcaaagtattgaaaataattacattaaacttcttttttcagaaagcggtgatttaatttcgctatatgataaaagatatggtaaagaatacattactgaaaatatgcacagtgagatccgtgcataccacgaagatgcaggttttttcgcggcctgggattttgcttcaaattatcgtgatggggaatcatatgttttactcgctgaaaaaatgacaactgtgatcagcgggcctaaaactacgatgacgctgatttatcactacaattcctcttatcttcgtttagcctttaccctgacacaggatagtccacgcgttgatgtccaaacgtttattgattggcacgaacctaatgtttctctcaaagtaaaattcccggtgtcagtacaaacatctcttgcacaatgtcaaattcagttcggtgtaattgacagaccaacgcatagcgatgattcgttcgcttttgccaaagatgaaataccagcacatcactgggtcgacctttctgatcgagaaactggcatagctttaatagcaaaaaacaaatatggctatcgtgtcaaagaccagacgcttgaattaactttgctgcgttcgcagcataaacctggggaagttgttaagacagacaattatgataatttcctgattaataattttgcagatattggtaaacaaaaattcatattctccttatttcctcatcatggagattaccgtgtgggtggtgttattaatcaagcctatataatgaatcatcccttacaggtcgtccctgtcaaaccgcacccgggtgaattacccccttcactatcattttttgctatcgatactaacagcgttatcatcgaaacaataaaattagctgaagacggcgacggtataatcgtaagattatatgagagtcatggattagaaatttcagccatgctttcgtga

SEQ ID NO: 484378 - DNA, 972 bp, Shigella sonnei
atggaaacgaaaaaaaataatagcgaatacattcctgagtttgataaatcctttcgccacccgcgctactggggagcatggctgggtgtagcagcgatggcgggtatcgctttaacgccgccaaagttccgtgatcccattctggcacggctgggacgttttgccggacgactgggaaaaagctcacgccgtcgtgcgttaatcaatctgtcgctctgctttccagaacgtagtgaagctgaacgcgaagcgattgttgatgagatgtttgccaccgcgccgcaagcgatggcaatgatggctgagttggcaatacgcggaccggagaaaattcagccgcgcgttgactggcaagggctggagatcatcgaagagatgaggcgtaataacgagaaagttatctttctggtgccgcacggttgggccgtcgatattcctgccatgctgatggcctcgcaagggcagaaaatggcagcgatgttccataatcagggcaacccggtttttgattatgtctggaacacggtgcgtcgtcgctttggcggtcgtctgcatgcgagaaatgacggtattaaaccattcatccagtcggtacgtcaggggtactggggatattatttacccgatcaggatcatggcccagagcacagcgaatttgtggatttctttgccacctataaagcgacgttgcccgcgattggtcgtttgatgaaagtgtgccgtgcgcgcgttgttccgctgtttccgatttatgatggcaagacgcaccgtctgacgattcaggtgcgcccaccgatggatgatctgttagaggcggatgatcatacgattgcgcggcggatgaatgaagaagtcgagatttttgttggtccgcgaccagaacaatacacctggatattaaaattgctgaaaactcgcaaaccgggcgaaatccaaccgtataagcgtaaagatctttatcctatcaaataa

SEQ ID NO: 484379 - DNA, 1323 bp, Shigella sonnei
gtgcaacagatagcccgctctgtcgccctggcgtttaataatttaccgcgaccacaccgcgttatgttggggtcgctcaccgttcttactctggccgtcgctgtctggcggccctatgtttatcaccgcgatgccacgccaattgtcaaaaccattgagctggaacagaacgaaattcgttcgctcttacctgaagccagtgagccgattgatcaagctgcacaagaagatgaagccattccccaggacgaactggatgacaaaatcgccggtgaagcgggcgtgcatgaatatgttgtttccactggcgatacgctaagcagcattctcaatcagtatggtattgatatgggtgatatcacccaactggctgcggccgacaaagaattgcgtaacctgaaaatcggtcaacaactctcctggacattaaccgcggacggcgaactgcagcgcctcacctgggaagtgtctcgtcgtgaaacccgaacctatgaccgtactgccgctaacggttttaaaatgaccagcgaaatgcagcaaggagagtgggttaacaatctgctgaaaggtaccgtcggggggagctttgttgccagcgccagaaacgccggtttaaccagcgccgaagtgagcgcagtgattaaagccatgcagtggcaaatggatttccgcaaactgaaaaaaggcgatgaatttgcggtgttaatgtctcgagaaatgcttgatggtaaacgtgagcaaagccagctgctgggcgtacgtttgcgttcagaaggtaaagattattacgctatccgcgctgaagatggcaaattctacgatcgtaacggtactggtctggcgaaaggattcttgcgattcccgacggcgaaacagttccgtatctcgtctaactttaacccgcgtcgtactaatccggtgaccggtcgcgttgcagcacacagaggtgttgatttcgccatgccgcagggtacgccagtgctttcagtgggtgacggtgaagtggtggttgccaaacgcagtggcgcagcaggttattatgtggctattcgtcatggtcgcagctacaccacgcgttatatgcacttgcgcaagattctggtgaaaccgggacagaaggtgaaacgtggcgaccgtatcgcgctttccggtaataccggacgttcaaccgggccgcatctgcactatgaagtatggataaaccagcaggccgtaaacccgctgacggcaaaactgccgcgtaccgaagggctgaccggctccgatcgtcgcgaattcctggcgcaggccaaagagattgtgccgcagctacggtttgattaa

SEQ ID NO: 484380 - DNA, 987 bp, Shigella sonnei
atgaaatgttataatatcacacttctcatattcattacgatgattggtcgcattatgttacataaaaaaacgcttcttttcgcagcattatccgccgctctctggggaggtgcaacacaggccgcagatgccgccgttgtcgcttcgcttaaacccgttgggttcatcgcttctgccattgctgatggggtaacagaaacagaggttttacttcctgacggcgcttcagaacatgattattcactgcgcccatcggatgtaaaacgcttacagaacgcggacttagtcgtttgggttggcccggagatggaagcgtttatgcaaaaaccggtaagcaaattaccaggagcgaagcaggtaacgattgcgcagcttgaagatgtgaaaccgctactgatgaaaagtattcacggcgatgatgatgatcacgaccacgcggaaaaaagtgacgaagatcaccatcacggcgatttcaacatgcatctttggctttccccagagatagcgcgggctacagcggttgcaatccatggaaaattagtggaacttatgccgcaaagtcgagccaaacttgacgccaacctgaaggattttgaggcacaattagcctcaaccgaaacgcaggttggtaacgagctcgcgccgctcaaggggaaaggttatttcgtttttcacgatgcttacggctatttcgaaaaacagttcggactgacaccgcttggtcattttaccgttaaccctgagattcaacctggcgcgcagcgtttacatgaaataagaacacagttggttgagcaaaaagcaacctgcgtttttgctgagccacagttcaggccagcggtcgttgagagcgtcgcacgagggacatccgttcgtatgggaacgttggatcccctggggacgaatatcaaactgggtaaaacaagctattcagaattcctgagtcaattagccaaccagtatgcgagctgcctgaaaggagattaa

SEQ ID NO: 484381 - DNA, 756 bp, Shigella sonnei
atgacaagtctggtttccttggaaaatgtctcggtttcttttggccaacgccgcgtcctctctgatgtgtcgctggaacttaaacctggaaaaattttgactttacttgggccaaatggcgcaggtaagtcgacactggtacgggtagtgctcgggctggtaacacccgatgaaggggttatcaagcgcaacggaaaactgcgcatcggctatgtaccgcagaagctgtatctcgacaccacgttgccactgaccgtaaaccgttttttacgcttacgccctggtacacataaagaagatattttgcctgcactgaaacgtgtccatgccgggcacctgattaacgcaccgatgcaaaagctctctggtggcgaaacgcagcgtgtactgttagcgcgagcattgttaaatcgcccgcaattattagtgctggatgaacccactcaaggcgtggatgtaaatggccaggtggcgttatatgaccttattgaccaactgcgtcgtgaactggattgtggcgttttaatggtttctcacgatctgcatctggtgatggcaaaaaccgatgaagtgctgtgcctgaatcaccacatttgttgttccggcacaccggaagttgtttccctgcatccggagtttatttcaatgtttggtcctcgtggtgctgaacaactgggtatctatcgccatcatcataaccatcgtcacgatttacagggacgaattgttttgcgtcggggaaatgatcgctcatga

SEQ ID NO: 484382 - DNA, 786 bp, Shigella sonnei
atgattgaattattatttcccggttggttagccgggatcatgctcgcctgtgccgcgggtccgctgggttcgtttgtagtctggcgtcgtatgtcttatttcggtgatacgctggctcatgcctcattacttggtgtcgcgtttggtttgttgctggacgtgaatccattctatgcggtgattgccgttacgctgctgctggcgggcggtctggtatggctggagaagcgtccacagctggcgatcgacacgttattagggattatggcgcacagtgccctgtcgctgggcctggtggtcgttagtctgatgtctaatattcgtgttgatttgatggcttacctgttcggtgatttgctggcagtgacgccagaagatctcatctctattgcgattggcgtggtcatcgtggtggctattttgttctggcaatggcgcaatttgctgtcgatgacgattagcccggatctggcgtttgttgatggtgtgaaattacagcgcgtgaaattgttgttgatgctggtgacggcattgacgattggtgtagcgatgaaatttgtcggtgcgttgattattacttcgttgctgattattcctgcagctactgcgcgtcgctttgcccgtacgccggaacagatggctggtgtcgctgttttggtggggatggtggcagtaactggcggtttaaccttttccgcgttttacgatacgccggcgggtccgtcggtagtgctatgtgctgcactgttatttattatcagtatgatgaaaaagcaggccagctaa

SEQ ID NO: 484383 - DNA, 1011 bp, Shigella sonnei
atgattgaagcagaccgtctgatttctgccggtaccactttgccggaagatggggcagatcgcgccattcgccctaaattactggaagagtatgttggtcagccgcaggttcgttcacagatggagattttcatcaaagcagcgaaactgcgcggcgatgccctcgatcatctgttgatttttggtcctccggggttgggtaaaactacgcttgccaacattgtcgccaatgaaatgggcgttaatttacgcacgacttctggtccggtgctggaaaaggcgggcgatctggcagcgatgctcactaaccttgaaccgcatgacgtgctgtttattgatgagatccaccgtctatcgccagttgttgaagaagtgctgtacccggcaatggaagactaccaactggatatcatgattggtgaaggtccggcggcacgctccattaaaattgatttgccgccgtttaccctgattggtgcaaccacgcgcgcaggttcgctgacatcaccgttgcgcgaccgttttggtattgtgcaacgtctggagttttatcaggtgccggatctgcaatatatcgtcagtcgcagcgcacgctttatggggcttgagatgagtgatgacggcgcgctggaagttgctcgtcgcgctcgcggtacgccacgtattgccaaccgtctgctgcgtcgagtgcgtgatttcgccgaagtgaagcacgatggcaccatctcggcagatatcgctgctcaggcgctggatatgttgaatgtcgatgctgaaggtttcgattatatggaccgcaaattgttgctggcggtaatcgataagttctttggtgggccggtaggtctggataacctggcggcagccattggcgaagaacgtgaaaccattgaggatgtgctggagccttatctgattcagcaaggctttttgcagcgtacaccgcgtgggcgtatggcgacgacgcgggcgtggaatcactttggcataacgccgccagaaatgccgtaa

SEQ ID NO: 484384 - DNA, 612 bp, Shigella sonnei
gtgataggcagactcagaggcatcatcattgaaaaacaacccccgctggtgttaattgaagtgggcggcgtaggctatgaagtgcatatgccgatgacctgtttttatgaactccctgaagcgggtcaggaagcgatcgttttcacccactttgtggtgcgtgaagacgcgcaactgctgtacggttttaacaataaacaagagcgcacgttgtttaaagagttaatcaaaaccaacggcgtcggcccgaagttggcgctggcgatcctctccggaatgtcagcgcagcagttcgttaatgccgttgaacgtgaagaagtgggagcactggtgaaactgccgggcattggtaaaaaaaccgccgagcgtttaattgtcgaaatgaaagaccgatttaaaggtttgcacggcgatctctttacgccagccgccgatctggtgctcacgtcgcctgccagcccggcaaccgacgatgctgaacaggaagcggttgccgcgctggtggcgctgggctataaaccacaagaagcaagccgcatggtgagcaaaatcgctcgcactgacgccagcagtgaaacattaattcgcgaagccctacgcgccgcgttatga

SEQ ID NO: 484385 - DNA, 603 bp, Shigella sonnei
gtgaatattaattaccctgctgaatatgaaattggagatatcgtctttacatgtataggtgctgccttatttggtcaaatatcagctgcatcaaattgctggagtaatcacgtcgggatcattatcggtcataacggtgaagacttcctggttgcagaaagccgggttcccctttcaaccatcaccacgctatctcgttttattaaacgttcgtctaatcaacgctatgctataaagcgattagacgctgggctgacagaacaacaaaaacaacgaattgttgaacaggttccctcccggctacgcaaactttaccacaccggttttaaatacgaatcttcgcgccagttctgttcaaaatttgtttttgatatttataaagaagcgctatgcattccggtgggtgaaatagaaacgtttggagaactgttaaatagcaatccgaatgcaaaactcactttctggaaattctggttcttaggttctattccgtgggagcgtaaaaccgtcacgccagccagtttgtggcatcatccgggtctggtgttgattcacgcggagggagttgaaacgcctcagcctgaactgaccgaggcggtataa

SEQ ID NO: 484386 - DNA, 522 bp, Shigella sonnei
atggctattattctcggcattgacccgggttcgcgcgtgatcggctatggtgtcatccgccaggtaggcaggcaactgtcctacctgggtagcggatgcatacgcaccaaagtggatgatttaccgtctcgtctgaagctcatctatgcgggcgtgacggaaatcatcacccagttccagccagattatttcgccattgaacaagtctttatggccaaaaatgccgactcggctctgaaactggggcaggcgcgcggcgtggcgattgtggcggcggtgaatcaggaattgccggtatttgaatacgcggcacgtcaggtaaagcaaacggtggtaggtattggtagtgccgaaaaaagccaggtgcagcatatggtccgcaccttgctgaaactgcccgctaatccacaggcggatgccgccgatgcgttagctatcgcgattacccattgtcacgtcagccagaatgcaatgcagatgagcgaatcgcggctgaacctggcgagagggcgactgcgttaa

SEQ ID NO: 484387 - DNA, 741 bp, Shigella sonnei
atggcaggtcatagtaaatgggccaacaccagacatcgtaaagctgcgcaggatgctaagcgcggtaaaatcttcactaaaatcattcgtgagctggtaaccgcggctaagctgggcggtggcgatccggacgctaacccgcgtctgcgtgcggcggtggataaagcactgtctaacaacatgacccgtgacacactgaaccgcgcaattgcacgtggtgtgggcggtgatgatgatgcaaacatggaaaccatcatctacgaaggttacggtcctggcggcacggcaatcatgattgaatgtctgtctgacaaccgcaaccgtaccgttgctgaagtgcgtcatgcatttagcaaatgtggcggtaacctcggtactgatggttccgttgcctatctgttcagcaaaaaaggcgtgatctccttcgagaaaggcgatgaagacaccattatggaagcagcactggaagcaggtgctgaagacgttgtgacctatgatgacggcgcgattgacgtctacactgcatgggaagaaatgggtaaagtgcgcgacgctctggaagcggcaggtctgaaagcagacagcgcggaagtttccatgatcccgtccaccaaagctgatatggatgcagaaaccgcaccgaaactgatgcgtctgatcgatatgctggaagattgcgacgacgtgcaggaagtctaccataacggtgaaatctctgatgaggttgcagcaactctctga

SEQ ID NO: 484388 - DNA, 510 bp, Shigella sonnei
atgagcatagataactatgtgaatgggatgagcgaaggcagtcaacgaagaggcagcgtgaaggataaagtgtataagcgtcccgtttcgatcttagtggtcatctatgcacaagatacgaaacgggtgctgatgttgcagcggcgtgacgatcccgatttctggcagtcggtaaccggcagcgtggaagagggtgaaaccgcgccgcaagctgccatgcgcgaagtaaaggaagaggtcaccattgatgttgtcgctgaacaactgaccttaattgactgtcagcgcacggtagagtttgaaattttttcacatttacgtcatcgctatgcgccgggcgtgacgcgtaatacggaatcatggttctgtcttgcgctcccgcacgaacgccaggtagtcttcactgaacatctggcttacaagtggcttgatgcgcctgctgccgcggcgctcactaagtcctggagcaaccggcaggcgattgaacagtttgtaattaacgctgcctga

SEQ ID NO: 484389 - DNA, 1773 bp, Shigella sonnei
atgcgtacagaatattgtggacagctccgtttgtcccacgtggggcagcaggtgactctgtgtggttgggtcaaccgtcgtcgtgatcttggtagcctgatcttcatcgatatgcgcgaccgcgaaggtatcgtgcaggtatttttcgatccggatcgtgcggacgcgttaaagctggcctctgaactgcgtaatgagttctgcattcaggttacgggcaccgtacgtgcgcgtgacgaaaaaaatattaaccgcgatatggcgaccggcgaaattgaagtgctggcgtcctcgctgactatcatcaaccgcgcagatgttctgccgcttgactctaaccacgtcaacaccgaagaagcgcgtctgaaataccgctacctcgacctgcgtcgcccggaaatggcgcagcgcctgaaaacccgcgctaaaatcaccagcctggtgcgccgttttatggatgaccacggcttcctcgacatcgaaactccgatgctgaccaaagccacgccggaaggcgcgcgtgactacttggtgccttctcgtgtgcacaaaggtaaattctacgcactgccgcaatccccacagttgttcaaacagctgctgatgatgtccggttttgaccgttactatcagatcgttaaatgcttccgtgacgaagacctgcgcgctgatcgtcagcctgaatttactcagatcgatgtggaaacttctttcatgaccgcgccgcaagtgcgtgaagtgatggaagcgctggtgcgtcatttgtggctggaagtgaagggcgtggatctgggcgatttcccggtaatgacctttgcggaagcagaacgccgttatggttctgataaaccggatctgcgtaacccgatggaactgaccgacgttgccgatctgctgaaatctgttgagtttgcagtatttgcggggccggcgaacgatccgaaaggccgtgttgccgctctacgtgttccgggtggcgcatcgctgacccgtaagcagatcgacgaatacggtaacttcgttaaaatctacggcgcgaaaggtctggcttacatcaaagttaacgaacgcgcgaaaggtctggaaggtatcaacagcccggtagcgaagttccttaatgcagaaatcatcgaagccatcctggatcgtactgccgcgcaagatggcgatatgattttcttcggtgccgacaacaagaaaattgttgccgacgcgatgggcgcactgcgcctgaaagtgggtaaagaccttggtctgaccgacgaaagcaaatgggcaccgctgtgggttatcgacttcccgatgtttgaagacgacggtgaaggcggcctgacggcaatgcaccatccgttcacctcaccgaaagacatgactgctgcagaactgaaagctgcaccggaaaatgcggtggcgaacgcttacgatatggtcatcaatggttacgaagtgggcggtggttcagtacgtatccataatggtgatatgcagcagacggtgtttggtattctgggtatcaacgaagaggaacagcgcgagaaattcggcttcctgctcgacgccctgaaatacggtactccgccgcacgcaggtctggcattcggtcttgaccgtctgaccatgctgctgactggcaccgacaatatccgtgacgttatcgccttcccgaaaaccacggcggcagcgtgtctgatgactgaagcaccgagctttgctaacccgactgtactggctgagctgagcattcaggttgtgaagaaggctgagaataactga

SEQ ID NO: 484390 - DNA, 567 bp, Shigella sonnei
atgcttgaacttaatgctaaaaccactgcgttggtggtgatcgatttacaagaaggcatcttaccttttgccggtggtccacatactgccgatgaggtagttaatcgcgccgggaagctggcggcgaaatttcgcgccagcggtcagcccgtgtttctggtgcgagttggctggtctgccgattacgccgaagcattaaaacagccggttgatgccccctcccccgctaaagtgttgcccgaaaactggtggcaacatccagctgcattaggtgcaactgacagtgatatcgaaatcatcaaacgtcagtggggtgcgttttacggtacggatctggagttgcaactgcgccgccgaggtatcgatacaatagtgttatgtgggatctcgaccaatatcggtgttgaatccaccgcccgcaatgcctgggaacttggctttaatctggtgattgccgaagacgcctgtagtgccgccagcgccgagcaacacaataacagcattaatcatatctacccgcgcatcgcccgtgtgcgtagcgtggaagagatccttcacgcgttatga

SEQ ID NO: 484391 - DNA, 249 bp, Shigella sonnei
atgcgtattgaaatctgcatagccaaagagaaaatgactaaaatgccaaccggtgctgtggatgcgttaaaggaagaattaacccgacgcatcagtaaacgttatgacgatgtagaggtgatcgtaaaagccaccagcaacgatggcctttctgttacgcgcaccgccgataaagattcagctaaaacttttgttcaggaaactctgaaagatacctgggagtctgctgacgagtggtttgttcactaa

SEQ ID NO: 484392 - DNA, 138 bp, Shigella sonnei
atgaatggccttcagtccatcgcagaggcattagaacaggaaggaagcaatcacgaggttcttgatgaaaggctgcgagagagggcgctggtgccgctcaatcgtatgctggattttgcggctacactacgtggataa

SEQ ID NO: 484393 - DNA, 720 bp, Shigella sonnei
atggatttttttagtgtgcagaatatcctggtacatataccaataggggcaggcggttatgatctctcatggatcgaagcggtaggcacgatcgccgggttgctgtgtattggccttgccagtctggagaagatcagcaactacttctttggcctgatcaacgtcaccttgtttggcattattttctttcagattcagctgtatgccagcctgctattacaggtgtttttctttgccgcgaatatttacggttggtatgcgtggtcgcgacaaaccagtcagaacgaggcggagttgaaaattcgctggttaccattgccgaaggcgctcagctggttggcggtttgcgttgtttcgattggtctgatgacggtatttatcaatccggtgtttgcatttttgacccgcgtggcagtcatgatcatgcaagcattaggattacaggttgtgatgcctgaactgcaaccggacgctttcccgttctgggattcatgcatgatggtgttatctatcgtggcaatgattctgatgacgcgtaagtatgtggaaaactggctgttgtgggtgattattaacgtgattagcgtcgttatttttgcacttcagggcgtttacgccatgtctctggagtacatcatcctgacctttattgcgctcaacggcagtcggatgtggatcaacagcgcacgtgaaagaggctcacgcgcgctgtcccattaa

SEQ ID NO: 484394 - DNA, 942 bp, Shigella sonnei
atggcgcactcacactcacacacgtcctcacacctgccagaagataataatgctcgtcgcttgttgtatgctttcggcgtgactgccgggtttatgctggtagaagtcgttggtggttttctttctggttctctggcattgctggccgatgcgggtcatatgttgaccgatactgccgccctgcttttcgccctactcgccgtgcaattttcacgtcgtcctcccaccattcgccacactttcggttggctaagactgaccacgctcgcggcgtttgtgaatgccatcgccctcgtggtaattaccattttgattgtctgggaggcgatagaacgcttccgcacgccgcgtccggtcgagggcggcatgatgatggcaattgccgtggctgggttgctggcaaatatactttctttctggttacttcatcacggcagcgaagagaaaaacctcaacgtacgagcagcggcattgcatgtgctcggggacctgttgggttcggttggggctattattgccgcgttgattattatctggaccggctggacacctgctgaccccattctctcgatagtggtgtcgcttctggttctgcgtagcgcgtggcgactgttgaaagatagcgtgaatgaattacttgaaggtgcaccggtatcgctggatatcgctgaactgaagcgtcgtatgtgccgggaaatcccggaagtccgcaatgtgcaccatgtacatgtatggatggtaggcgagaagccggtgataacgctgcatgtgcaggtgatcccgccacacgatcacgatgccttgttggatcagatccaacactacctgatggatcactatcagattgagcacgccaccattcagatggaatatcaaccttgtcatgggccagactgccacctgaatgaaggggtgtctggccattcacatcatcaccattaa

SEQ ID NO: 484395 - DNA, 381 bp, Shigella sonnei
atgaaaatgacaaaactggccacattatttctgactgccactctaagccttgccagcggtgccgcactggctgccgatagcggagcgcaaactaataacggccaggcaaacgccgcagctgatgcgggccaggtagcccctgacgcccgtgaaaatgtcgcgccaaataacgtcgacaataacggggtaaataccggttctggcggcacaatgctgcattcggatggttcttcaatgaacaatgacggaatgaccaaagatgaagagcacaagaacaccatgtgcaaagatggtcgatgtccggatatcaataaaaaggtacaaatcggtgatggcatcaataatgatgtcgataccaaaaccgacggtaccacgcagtaa

SEQ ID NO: 484396 - DNA, 1053 bp, Shigella sonnei
atgaattatcagaacgacgatttacgcatcaaagaaatcaaagagttacttcctcctgtcgcattgctggaaaaattccccgtaactgaaaatgccgcgaatacggttgcccatgcccgaaaagcgatccataagatcctgaaaggtaatgatgatcgcctgttggtggtgattggcccgtgctcaattcatgatcctgtcgcggctaaagagtatgccactcgcttgctggcgctgcgtgaagagctgaaagatgagctggaaatcgtaatgcgcgtctattttgaaaagccgcgtaccacggtgggctggaaagggttgattaacgatccgcatatggataacagcttccagatcaacgacggtctgcgtatagcccgtaaattgctgcttgatattaacgacagcggtctgccagcggcgggtgagtttctcgatatgatcactcctcagtatctcgctgacctgatgagctggggcgcaattggtgcacgtaccacggaatcgcaggtgcaccgcgaactggcgtctggtctttcttgtccggtaggttttaaaaatggcacagacggtacgattaaagtggctatcgatgccattaatgccgccggtgcgccgcactgcttcctgtccgtaactaaatgggggcattcggcgattgtgaataccagcggtaacggtgattgccatatcattctgcgcggcggtaaagagcctaactacagcgcgaagcacgttgctgaagtgaaagaagggctgaacaaagcaggcctgccagcacaggtgatgatcgatttcagccatgctaactcgtccaaacaattcaaaaagcagatggatgtttgtgctgacgtttgccagcagattgccggtggcgaaaaggccattattggcgtgatggtggaaagccatctggtggaaggcaatcagagcctcgatagcggggagccgctggcctacggtaagagcatcaccgatgcctgcattggctgggaagataccgatgctctgttacgtcaactggcgaatgcagtaaaagcgcgtcgcgggtaa

SEQ ID NO: 484397 - DNA, 753 bp, Shigella sonnei
atggctgtaactaagctggttctggttcgtcatggcgaaagtcagtggaacaaagaaaaccgtttcaccggttggtacgacgtggatctgtctgagaaaggcgtaagcgaagcaaaagcagcaggtaagctgctgaaagaggaaggttacagctttgactttgcttacacttctgtgctgaaacgcgctatccataccctgtggaatgtgctggacgaactggatcaggcatggctgcccgttgagaaatcctggaaactgaacgaacgtcactacggtgcgttgcagggtctgaacaaagcggaaaccgccgaaaagtatggcgacgagcaggtgaaacaatggcgtcgtggttttgccgtgactccgccggaactgactaaagatgatgagcgttatccgggtcacgatccgcgttacgcgaaactgagcgagaaagagctgccgctgactgaaagcctggcgctgaccattgaccgcgtgatcccttactggaatgaaactattctaccgcgtatgaagagcggtgagcgcgtgatcatcgctgcacacggtaactctttacgtgcgctggtgaaatatcttgataacatgagtgaagaagagattcttgagctgaatatcccgaccggcgtgccgctggtgtatgagttcgacgagaatttcaaaccgctgaaacgctattatctgggtaatgctgacgagatcgcagcgaaagcagcggcggttgctaaccagggtaaagcgaagtaa

SEQ ID NO: 484398 - DNA, 1041 bp, Shigella sonnei
gtgctgaacgaaactcccgcactggcacccgatggtcagccgtaccgactgttaactttgcgtaacaacgcagggatggtagtcacgctgatggactggggtgcgactttactttcagctcgtattccgctttccgatggcagcgtccgcgaggcgctgctcggctgtgccagcccggaatgctatcaggatcaggccgcgtttctgggggcctctattggtcgttatgccaaccgcatcgccaatagccgttatacctttgacggtgaaacggtgacgctttcgccaagtcagggcgttaaccagctgcacggcggcccggaagggttcgacaaacgtcgctggcagattgtgaaccagaacgatcgtcaggtgctgtttgccctgagttcagatgatggcgatcagggcttcccgggtaatctcggcgcgacggtgcaatatcgtctgaccgacgataaccgtatctccattacttatcgcgccacagttgataaatcttgcccggtgaatatgactaatcacgtctatttcaatcttgacggcgagcagtctgacgtgcgcaatcacaagttgcagattctggcgggcgaatatctgccggttgatgaaggcggcattccgcacgacggcctgaaatctgtcgccggaacctcttttgatttccgcagcgccaaaatcatcgccagtgagtttcttgccgacgacgatcagcgcaaagtgaaaggttacgatcacgcattcttgttacaggccaaaggcgatggcaagaaagtggcggcgcatgtctggtcagcagatgaaaaattgcagctgaaggtctacaccaccgctcccgctcttcaattctactccggcaacttcctcggcggcacaccgtcgcggggaaccgaaccttacgccgactggcaaggactggcgttggaaagcgagtttctgccggacagcccgaaccaccctgaatggccgcaaccggactgcttcctgcgtcctggcgaagagtattccagcctgacggaatatcagtttattgctgagtaa

SEQ ID NO: 484399 - DNA, 1149 bp, Shigella sonnei
atgagtctgaaagaaaaaacacaatctctgtttgccaacgcatttggctaccctgccactcacaccattcaggcgcctggccgcgtgaatttgattggtgaacacaccgactacaacgacggtttcgttctgccctgcgcgattgattatcaaaccgtgatcagctgtgcaccacgcgatgaccgtaaagttcgcgtgatggcagccgattatgaaaatcagctcgacgagttttccctcaatgcgcccattgtcgcgcatgaaaactatcaatgggcgaactacgttcgtggcgtggtgaaacatctgcaactgcgtaacaacagcttcggcggtgtggacatggtgatcagcggcaatgtgccgcagggtgccgggttaagttcttccgcttcactggaagtcgcggtcggaaccgtattgcagcagctttatcatctgccgctggacggcgcacaaatcgcgcttaacggtcaggaagcagaaaaccagtttgttggctgtaactgcgggatcatggatcagctaatttccgcactcggcaagaaagatcatgccttgctgattgactgccgctcactggggactaaagcagtttccatgccgaaaggtgtggctgtcgtcatcatcaacagtaacttcaaacgtaccctggttggcagcgaatacaacacccgtcgtgaacagtgcgaaaccggtgcgcgtttcttccagcagccagctctgcgcgatgtcaccattgaagagttcaacgctgttgcacatgagctggacccaatcgtggcgaaacgcgtgcgtcatatcctgactgaaaacgcccgcaccgttgaagctgccagcgcgctggagcaaggcgatctgaaacgtatgggcgagttgatggcggagtctcatgcctctatgcgcgatgatttcgaaatcaccgtgccgcaaattgacactctggtagaaatcgtcaaagcagtgattggcgacaaaggtggcgtacgcatgaccggcggcggatttggcggctgtatcgtcgcgctgatcccggaagagctggtgcctgccgtacagcaagctgtcgctgaacaatatgaagcaaaaacaggtattaaagagactttttacgtttgtaaaccatcacaaggagcaggacagtgctga

SEQ ID NO: 484400 - DNA, 1047 bp, Shigella sonnei
atgacgcaatttaatcccgttgatcatccacatcgccgctacaacccgctcaccgggcaatggattctggtttcaccgcaccgcgctaagcgcccctggcagggggcgcaggaaacgccagccaaacaggtgttacctgcgcacgatccagattgcttcctctgcgcaggtaatgtgcgggtgacaggcgataaaaaccccgattacaccgggacttacgttttcactaatgactttgcggccttgatgtctgacacgccagatgcgccagaaagcaacgatcctttgatgcgttgccagagcgcgcgcggtaccagccgggtgatctgcttttcaccggatcacagtaaaacgttgccagaactgagcgttgcggcattgacggaaatcgtcaaaacctggcaggagcaaaccgcagagctgggaaaaacgtacccgtgggtgcaggtctttgaaaacaaaggtgcggcgatgggctgctctaacccgcatccgcacggacagatttgggcaaatagcttcctgcctaacgaagctgagcgcgaagaccgcctgcaaaaagaatattttgccgaacagaaatcaccaatgctggtggattatgttcagcgcgagctggcagacggtagccgtaccgttgtcgaaaccgaacactggttagccgttgtgccttactgggctgcctggccgttcgaaacgctactgctgcccaaagcccacgttttgcggatcaccgatttgaccgacgcccagcgcagcgatttggcgctggcgttgaaaaagctgaccagtcgttatgacaacctcttccagtgctccttcccctactctatgggctggcacggcgcaccatttaatggcgaagagaatcaacactggcagctgcacgcgcacttttatccgcctctgctgcgctccgccaccgtacgtaaatttatggttggttatgaaatgctggcagagacccagcgagacctgaccgcagaacaggcagcagagcgtttgcgcgcagtcagcgatatccattttcgcgaatccggagtgtaa

SEQ ID NO: 484401 - DNA, 1017 bp, Shigella sonnei
atgagagttctggttaccggtggtagcggttacattggaagtcatacctgcgtgcaattactgcaaaacggtcatgatgtcatcattcttgataacctctgtaacagtaagcgcagcgtactgcctgttatcgagcgcttaggcggcaaacatccaacgtttgttgaaggcgatattcgtaacgaagcgttgatgaccgagatactgcacgatcacgctatcgacaccgtgatccacttcgccgggctgaaagccgtcggcgaatcggtacaaaaaccgctggaatattacgacaacaatgtcaacggcactctgcgcctgattagcgccatgcgcgccgctaacgtcaaaaactttatttttagctcctccgccaccgtttatggcgatcagcccaaaattccatacgttgaaagcttcccgaccggcacaccgcaaagcccttatggcaaaagcaaattgatggtggaacagatcctcaccgacctgcaaaaagcccagccggactggagcattgccctgctgcgctacttcaacccggttggcgcgcatccgtcgggcgatatgggcgaagatccgcaaggcattccgaataacctgatgccatacatcgcccaggttgctgtaggccgtcgcgactcgctggcgatttttggtaacgattatccgaccgaagatggtactggcgtacgcgattacatccacgtaatggatctggcggacggtcacgtcgtggcgatggaaaaactggcgaacaagccaggcgtacacatctacaacctcggtgctggcgtaggcagcagcgtgctggacgtggttaatgccttcagcaaagcctgcggcaaaccggttaactatcattttgcaccgcgtcgcgaaggcgaccttccggcctactgggcggacgccagcaaagccgaccgtgaactgaactggcgcgtaacgcgcacactcgatgaaatggcgcaggacacctggcactggcagtcacgccatccacagggatatcccgattaa

SEQ ID NO: 484402 - DNA, 1473 bp, Shigella sonnei
atgtcatcgttgcaaattttgcaaggcacgtttcgtcttagcgacacaaaaacgctgcaattgcctcagctaacgttaaacgcgggtgatagttgggcgtttgtcggttcgaatggaagcgggaaatcggccctggcccgcgcgctggcgggggaacttccgcttttgaaaggtgaacggcaaagccagttttcccacatcactcgtctctccttcgagcaattgcaaaaactcgtcagcgacgaatggcagcggaataacaccgatatgctcggccctggcgaagatgacaccggacgcactacggctgaaatcattcaggatgaagtaaaggatgcaccgcgttgcatgcaactggcgcagcagttcggtattaccgccctcctcgaccgacgctttaaatacctttccactggcgagacgcgaaaaaccctgctgtgtcaggcgctgatgtcggagcctgacttgttgattcttgatgagtcgttcgatggcctggatgttgcctcacgtcagcagctggctgagcgactcgcctcgttacatcagtccggtattactctggtactggtgctcaatcgcttcgatgagatcccggagtttgtccagtttgctggcgtgctggcggattgcacgttagcggaaactggcgctaaagaggaactgctccaacaagcactcgtcgcgcaactggcgcatagtgaacagcttgaaggtgtgcaactgccggagccggatgaaccttcagcacgtcacgccttacccgccaacgaaccgcgcattgtgctgaacaatggcgtggtttcttataacgatcgccccattcttaataaccttagctggcaggtgaatccaggtgaacactggcaaattgtcgggccaaatggtgcaggaaaatcgacgttattaagcctggttactggcgatcatccgcaaggttacagcaacgatttgacgcttttcggacgacgtcgcggcagcggcgaaaccatctgggatatcaaaaagcatatcggttacgtcagcagtagtttgcatctggattaccgggtcagcactaccgtgcgtaatgtgattctttctggctattttgattcgattggcatttatcaggccgtttcggatcgccagcaaaaactggtgcagcagtggctggatattctcggcattgataaacgtacggctgacgctccgttccatagtctttcctggggacagcagcgtctggcgctgatcgtccgcgcactggtgaaacatccgacgttgcttattctcgatgaaccactacaggggcttgatccgctcaatcgccagcttatccgccgttttgttgatgtgctgattagcgaaggtgaaacgcaattgttatttgtttcgcaccacgctgaagatgcgcctgcctgtattacccatcgccttgagttcgtgccggacggtggactctatcgctatgtgctgacaaaaatatattga

SEQ ID NO: 484403 - DNA, 789 bp, Shigella sonnei
atgcaggccgaaatccttctcacccttaagctccaacaaaaattattcgccgacccgcgccggatttcgctactaaaacacattgcgctttccggttccattagccagggagcgaaagatgccggtatcagctataaaagcgcctgggatgccattaacgagatgaatcagttaagcgagcatattctggttgagcgcgcaacaggcggtaaaggtggcggcggcgcagtactgacccgctatggtcagcgactgattcagctctatgacttactggcgcaaatccagcaaaaagcctttgatgtgttaagtgacgatgacgccctgccgctgaacagcctgctggccgcgatctcacgtttttcactgcaaaccagcgcccgtaaccagtggttcggtaccatcaccgcccgcgatcatgatgacattcaacagcatgttgatgtcttactggctgacggaaaaacacgcctgaaagtcgcaattaccgcacaaagcggcgcacgtctggggctggatgaaggcaaagaagtgttgatattgctaaaagcgccgtgggtaggcattactcaggacgaagcggtcgcacaaaacgccgacaaccaattaccgggtattattagtcatattgagcgcggcgcagagcagtgcgaagtattaatggcgctacccgacgggcaaacactgtgcgccacagtgccggtaaatgaagcgacttctcttcagcaagggcagaatgtcacggcctactttaatgccgacagcgtgattatcgccacgctgtgctaa

SEQ ID NO: 484404 - DNA, 150 bp, Shigella sonnei; identical to SEQ ID NO: 261810

SEQ ID NO: 484405 - DNA, 774 bp, Shigella sonnei
atggctcgtaaatggttgaacttgtttgccggggcggcactctctttcgctgttgctggcaatacactggcagatgaagggaaaatcacggtgttcgccgccgcatcactgactaacgcaatgcaggacattgctacgcagtataaaaaagaaaaaggcgtggatgtggtttcttctttcgcttcgtcatctactctggcccgtcagattgaagcgggagcgcctgcggatctgtttatctctgccgatcagaaatggatggattatgcggttgataaaaaagcgatcgatacggcttcgcgccagacactgctcggcaatagcctggtcgttgtagcaccgaaagccagcgagcagaaagatttcatcatcgacagcacaactaactggacttcgctgctgaatggcggtcgcctcgcggttggcgatccggaacatgtccctgctggcatttatgcaaaagaagcactgcaaaaactgggcgcatgggatacgctctccccgaaactggctccggcggaagatgttcgtggcgcgctggtgttggtcgaacgcaatgaagcgccgttgggcattgtttacggttctgacgcagttgtcagcaaaggggtaaaagtggttgccaccttcccggaagattcacataaaaaagtggaatatccggttgctgttgtggaagggcataacaatgcgacagtgaaagcattttatgattatctgaagggaccgcaggcagcggaaatctttaaacgttacggatttacaaccaagtaa

SEQ ID NO: 484406 - DNA, 690 bp, Shigella sonnei
atgatactgaccgatccagaatggcaggcagttttattaagcctgaaagtttcttccctggctgtgctgtttagcctgccgtttgggatcttttttgcctggttactggtgcgttgcacgtttccgggcaaagctctgctcgacagcgtactgcatctaccgctggtgttaccgcccgtggtcgtcggttacttattattagtttcgatgggacggcgcggatttatcggtgaacgtctgtatgactggtttggtattaccttcgcctttagctggcgcggcgcggttctcgctgccgccgtcatgtcgtttccgctgatggtgcgggcaattcgtctggcgctggaaggggttgatgtcaaactcgaacaggccgcaagaacactaggtgccgggcgctggcgcgttttctttactatcacgttaccgctgaccttaccgggaattattgttggtacggtactggcttttgctcgttctctcggtgagtttggtgcaaccatcacctttgtgtcgaacattcctggcgaaacgcgaaccattccctctgccatgtataccctgatccagacccccggcggggaaagtggcgcggcgagactgtgcattatttctattgcgctggcgatgatctccctgttgatttcagaatggctggccagaatcagccgtgaacgggcggggcgctaa

SEQ ID NO: 484407 - DNA, 1059 bp, Shigella sonnei
atgctggagctgaatttttcccagacgttgggcaaccattgcctgaccattaatgaaacactgcccgccaatggcatcactgctatctttggcgtctccggtgccggaaaaacttcgctgattaacgccatcagtggactgacgcgcccgcaaaaagggcggattgtcctcaatgggcgggtactaaatgatgccgaaaaaggtatctgcctgacgccggaaaagcgtcgcgttggctatgtttttcaggatgcgcggctgttcccgcattacaaagtgcgtggcaatctgcgctacggcatgtcgaaaagtatggtcgatcagttcgataagctggtggcgcttttaggcattgaaccgttgcttgaccgtttaccaggcagcctgtccggaggcgaaaaacagcgcgtggcgattggtcgggctttgctgacagcaccggaattgctgttgctggatgaaccgctggcgtcactggatattccgcgtaaacgcgaactgttgccttatctgcaacggctgacacgggaaatcaacattccgatgttgtatgtcagccattcgctggatgagatcctccatctggcagacagagtgatggtactggaaaacggtcaggtgaaagcctttggcgcgctggaggaagtgtggggcagtagcgtgatgaatccgtggctgccgaaagagcaacaaagtagcattctgaaagtgacggtacttgagcatcatccgcattacgcgatgaccgcgctggcgctgggcgatcagcatttgtgggtcaataagctggacgaaccgctgcaagctgcgctacgtatccgcattcaggcttccgatgtttctctggttttacaaccgccgcagcaaaccagcattcgtaacgtattgcgggcaaaagttgttaatagttatgacgacaacggccaggtggaagtggagctggaagtcggcggtaaaacgctgtgggcgcgtatcagcccgtgggccagggatgaactggcgatcaaacctggcctgtggctgtacgcgcaaattaaaagtgtgtcgataaccgcctga

SEQ ID NO: 484408 - DNA, 135 bp, Shigella sonnei
atgaactgggcaatgctgtcggtggtgttatcaccaatcacaatgttggcgcgcgcttttaccgcgtcatttaagaattttcgtctgcgcgaatggtacaccgataccactatcggacaaaattctgcgttttaa

SEQ ID NO: 484409 - DNA, 483 bp, Shigella sonnei
gtgtccgttaaactcaggctacctcagttcggcctttgcatggatcttgcactggtaacaggacagcgcgaaggagatctggcggctatgagatgggaggatataagagatggcaggctatacgtggaacaacaaaaaacaggggcaaaaattcgcatttctctccccaccacgatttccagattgaatttaacacttgccgatgtactggataacttgaaaaaaataaacggtaaaaacgaaaagttactcggagggaagacagccaggacaatcgcagcacagttcaggattgcccgagacacatccggattgaaatgggaaggtgacccaccgccatttcatgaaatccgaagtttatccggtcgcctgcactcagcagaaaaaggcggtgatttcactcaggcgctccttggacatcgttcatccagcatgacggataaataccgtgacggacgagggagggaatggaaagacatttaa

SEQ ID NO: 484410 - DNA, 303 bp, Shigella sonnei
atgagcagaaaaacccaacgttactctaaagagttcaaagccgaagctgtcagaacggttcctgaaaatcaactttcgatcagtgaaggcgcttcccgattatctcttcctgaaggcactttaggacaatgggttaccgccgccagaaaagggctcggtactcctggttcccgcacggtggctgaactggaatctgaaattctgcaactgcgtaaggcgttaaatgaagctcgccttgagcgagatatattaaaaaaagcaacagcgtattttgcacaggagtcgctgaaaaatacgcgttaa

SEQ ID NO: 484411 - DNA, 147 bp, Shigella sonnei
atgccggaactggaagaactggcggcagcaatggctcaggcacaggttgagcgcaatgacgagatttatcgccgtcagcgggagctgaaggaagagctgaatagtctgaaggatttgaattcggttaggaattttatcgtggaataa

SEQ ID NO: 484412 - DNA, 858 bp, Shigella sonnei
atgatggcattattactggagccactgcagttcacctttatgagtcacgcactgctgatttcactggtagtttccataccctgtgcgctgctgtcggtctttctggtcctgaaaggttgggcactgatgggtgacgcgatgagtcatgcggtttttcctggcatcgtgcttacctggattctggggttacctctggctacaggggcattcgtcgccggagtattctgcgcggtggcgacgggatacctgaaagacaacagccgaatcaagcaagatacagttatggggattgttttttctggcatgtttgccgcaggtctgatcttgtatattgcaatcaaaccagacgtacatcttgaccatattcttttcggcgacatgctcgggataaccatcggcgatataatccagacggtgattattgccgggctggttacacttgttattagcgcaaaatggcgggattttttgctgttcagctttgattatcaacaggcgcaggtaagcggtttgcatacgagatggctgcattatgggctgctgtgcatggtttccctgaccattgtggcgacgctgaaagcagtaggtatcattctctctatttctctgctcattgcgcctggcgccattgcagtactcctgacacaacgctttcatattgcgctcctactggcgactggcatatcggtaatagtgtcaatgactggtgtctggctgtccttttttatcgacagcgcaccagctccgacgattgtcgtcttattcgcggtcgtgttcatcatgacgtttaccgttaccagcatcaacgcacgcacaaagggaaacgcccatacacaggatctgttatcacccaattag

SEQ ID NO: 484413 - DNA, 858 bp, Shigella sonnei; identical to SEQ ID NO: 461758

SEQ ID NO: 484414 - DNA, 828 bp, Shigella sonnei
atgatgcaatctgcaggcattgtcgttaatgatgttactgtcacctggcgtaacgggcacacagcactgcgcgatgcatccttcacagtaccaagtggatctattgccgctctggttggggtaaacggttccggaaaatcgacgttgtttaaagcgattatgggatttgtgcgtctgaccagcggaaagatatctgttctgggtattcccacgcgacaggcgctacagaaaaacctggttgcctacgtccctcagtcagaagaggttgactggtcatttcctgtactggtggaagatgtggtgatgatgggccgctatgggcatatgggtatgttgcgtatagccaaaaagagggatcgtcagattgtcaccgatgcgctggaacgtgtcgatatggtggattttcgccatcgtcaaatcggcgagctttccggtggacaaaagaaacgcgtctttctggcgagagcgattgcacagcagggtgatgtgatcctgctggatgaaccttttaccggcgttgatgtgaaaaccgaagcgaaaatcatcagcctgttgagggagttacgcgcggaaggcaaaacgatgcttgtctcaacgcacaatctcggctcagtcacgacattttgcgattatacggtcatggtcaaaggcaccgtcctggcaagcgggccgacagacaccacttttacagccgagaacctggagctggcttttagcggcgtactgcgccatgtcacacttaacgactcggaagaaagcattattactgacgatgaacgcccttttgtggcacatcgaccgtcagcggtgcagagggaagcaagatga

SEQ ID NO: 484415 - DNA, 915 bp, Shigella sonnei; identical to SEQ ID NO: 474263

SEQ ID NO: 484416 - DNA, 435 bp, Shigella sonnei
atgaacagaacgattcttgtccctatcgatatttccgattcagaattaactcaacgcgtgattagccacgttgaggcagaggcaaagattgacgatgcagaggttcatttcctgacggtaataccttcactgccttactatgcctctctgggtttagcgtattccgcagaattaccggcaatggatgacctgaaagcggaagccaaatcgcaactggaagagatcattaaaaaatttaaactgccaaccgacagagtgcatgtccatgttgaggaaggctcgcccaaagaccgcattctggaattggcgaagaagatccccgctcatatgatcatcattgcttcccatcgaccggatatcaccacttatctgctcggttccaacgccgcagctgtagtgcgtcacgcagagtgctccgtgctggttgtgcgctga

SEQ ID NO: 484417 - DNA, 1134 bp, Shigella sonnei
atgaaaagcaaagtactggcacttttaattcctgccctgctcgccgcaggtgctgcacatgcagccgaagtttataataaagacggcaacaaattagatctgtatggcaaagttgatggcctgcattatttttctgataattcagcgaaagatggcgatcagagctatgcgcgtctgggttttaaaggcgaaacccaaattaacgatcaactcactggctacggtcaatgggaatacaatattcaggcaaacaacactgaatcttcaaaaaaccagtcatggacccgtctggcatttgccgggctgaaatttgcagattacggttctttcgattacggacgtaattatggcgtaatgtacgacatcgaaggctggaccgatatgctgcctgaatttggcggtgactcttataccaatgcagacaactttatgactggtcgtgccaacggcgtcgcgacttatcgtaatactgatttcttcggtctggtaaatggtctgaacttcgcggtgcagtatcaaggtaacaacgaaggtgccagtaatggtcaggaaggcaccaacaacggacgtgatgttcgccatgaaaatggtgacggctggggtctttccacaacatatgatttaggcatgggctttagcgctggtgcggcatacacctcatctgaccgcaccaatgaccaggttaaccatactgcggcgggtggtgataaagcagacgcgtggactgctgggctaaaatacgatgctaacaatatttacctggcaaccatgtattcagaaacgcgtaatatgaccccgtttggcgacagcgattatgctgttgcaaacaaaacccagaactttgaagtcactgcacagtaccagtttgattttggtctgcgtccggcagtctctttcctgatgtctaaaggccgtgacctgcacgctgccgatggtgcagacaacccggcaggtgttgatgataaagatcttgttaaatacgccgatgttggcgcgacttactatttcaataaaaacatgtccacttatgttgactataaaatcaacctgttggatgaagatgacagtttctacgctgccaacggcatctctaccgatgatattgtcgctttaggtctggtttatcagttctaa

SEQ ID NO: 484418 - DNA, 3525 bp, Shigella sonnei
atgattactattgatggtaatggcgcggttgcttcggtggcgtttcgcaccagtgaagttatcgccatctaccctattacccccagttccacgatggcagaacaggctgatgcctgggccggaaacggcttgaagaacgtttggggagacacaccatgcgtggttgaaatgcagtcggaagcgggtgctatcgctaccgtgcatggcgctttgcagacgggtgccctttcaacatcgtttacgtcatcgcagggtttgctgctgatgatcccgacactgtacaaactggcaggcgaactcacaccgtttgtcctgcatgtagcggcacgtaccgttgccacacatgcactctctatttttggcgatcattccgacgtcatggcggtgcgccagacgggttgcgcgatgttgtgtgcggcaaacgtccaggaagcgcaagactttgctctcatttcgcacatcgcgacgctgaaaagccgcgtgccatttattcatttctttgatggtttccgcacgtcccacgaaatcaacaaaattgtcccgctggccgatgacacgattcttgatctcatgccgcaggccgaaattgatgctcatcgcgcccgggcgctcaacccggaacatccggtgatccgtggtacgtccgccaatcctgacacttatttccagtctcgcgaagccaccaacccctggtacaacgcagtctatgaccatgttgaacaggcgatgaatgatttctctgccgcgacaggtcgtcagtatcagccgtttgaatattacgggcatccgcaagctgaacgggtgattatcctgatgggctcagccattggcacctgtgaagaagtggttgatgaattgctaacccgtggcgaaaaagtcggcgtgctgaaagttcgcctgtaccgccccttctcagccaaacacttgctacaaactctaccgggatccgtacgcagcgtggcggtactggacagaaccaaagaacccggtgcccaggcagaaccgctctatctggatgtgatgaccgcactggcagaagcctttaataatggcaagcgcgaaactctgccccgtgtcattggtgggcgctatggtctttcatccaaagaatttggcccggactgtgtactggcggtatttgccgagctcaacgcggctaaaccgaaagcgcgctttacggttggtatttacgatgatgtaaccaatctgtccctgccgttgccggaaaacacccagccaaactcggcgaaacttgaagccttgttttatggccttggtagtgatggcagcgtttccgcgaccaaaaacaatatcaagattatcggtaattccacgccgtggtacgcacagggctattttgtttacgactccaaaaaagcgggcggcctgacggtttctcaccttcgcgtgagcgaacagccgattcgttccgcttatctcatttcccaggctgattttgttggctgccaccagttgcagtttatcgataaatatcagatggctgagcgtttaaaacctggcggcattttcctgctcaacacgccgtacagcgcagatgaagtgtggtcgcgcttgccgcaagaagttcaggccgtgttaaaccagaaaaaagcgcgcttctatgtgattaacgcggcgaaaatcgcccgcaaatgtggcctggcggcccgtattaataccgtcatgcagatggcttttttccatctgacgcaaattctgcctggcgatagcgccctcgcagaattgcagggtgcgattgccaaaagttacagtagcaaaggccaggatctggtggaacgcaactggcaggctctggcgctggcgcgtgaatccgtagaagaagttccgttgcaaccggtaaatccgcacagcgccaatcgaccgccagtggtttccgatgccgcccctgatttcgtgaaaaccgtaaccgcagcgatgctcgcagggcttggtgatgccctccccgtttcggcgctgccgccagacggcacctggccgatgggcaccactcgctgggaaaaacgcaatatcgccgaagagatccccatctggaaagaggaactctgtacccaatgtaaccactgcgtcgcagcttgcccacactcagctattcgcgcaaaagtggtaccacccgaagcgatggaaaacgcccctgccagcctgcattcgctggatgtgaaatcgcgtgatatgcgcgggcagaaatatgtcttgcaggtggctccggaagattgcaccggttgtaacctgtgcgtcgaagtttgcccggcgaaagaccgtcagaatccagagattaaagccatcaatatgatgtcgcgcctggaacatgtcgaagaagagaaaatcaattacgatttcttcctcaacctgccagaaatcgaccgtagcaaactggaacgtattgatattcgtacatcgcagctgattacaccgctgtttgaatattccggtgcttgctccggttgtggcgagacgccgtatattaaattgctgactcagctctatggcgaccggatgttgatcgctaacgccaccggctgttcttcaatttatggcggtaacctgccctctacaccgtataccaccgatgccaacggtcgtgggccggcatgggcgaactctctatttgaagataatgccgaatttggccttggtttccgcctgacggtcgatcaacaccgtgtccgcgtgctgcgtctgctggatcaatttgccgataaaatcccggcggaattactgacggcgttgaaatcagacgctacgccagaggttcgtcgagaacaggtcgcagctttacgccagcaactcaacgatgttgccgaagcacatgaactgctacgtgatgcagatgcactggtggaaaaatcaatctggctgattggtggtgatggctgggcttacgatatcggctttggcggtctggatcatgtattgagtttgacggaaaacgtcaacattctggtgctggatacgcaatgctattccaacaccggtggtcaggcgtcgaaagcgacaccgctgggtgcagtaactaaatttggcgagcacggcaaacgtaaagcgcgtaaagatcttggcgtcagtatgatgatgtacggtcatgtttatgtggcgcagatttctctcggcgcgcagctgaaccagacggtgaaagcgattcaggaagcggaagcgtatccgggaccatcgctgatcattgcttatagcccgtgtgaagagcatggttacgatctggcactcagccatgaccagatgcgccaactcacagctaccggcttctggccgctatatcgcttcgatcctcgtcgtgccgatgaaggcaaactgccgctggcgctggattcacgcccgccgtcagaagcactggaagaaacgttacttcacgagcaacgtttccgtcgtctgaattcgcagcagccagaagtggcagaacagttatggaaagatgctgcagctgatttgcaaaaacgctatgacttcctggcacaaatggccggaaaagcggaaaaaagcaacaccgattaa

SEQ ID NO: 484419 - DNA, 267 bp, Shigella sonnei; identical to SEQ ID NO: 261588

SEQ ID NO: 484420 - DNA, 423 bp, Shigella sonnei; identical to SEQ ID NO: 461751

SEQ ID NO: 484421 - DNA, 990 bp, Shigella sonnei
atgaaactcgccgtttatagcacaaaacagtacgacaagaagtacctgcaacaggtgaacgagtcctttggctttgagctggaattttttgactttctgctgacggaaaaaaccgctaaaactgccaatggctgcgaagcggtatgtattttcgtaaacgatgacggcagccgcccggtgctggaagagctgaaaaagcacggcgttaaatatatcgccctgcgctgtgccggtttcaataacgtcgaccttgacgcggcaaaagaactggggctgaaagtagtccgtgttccagcctatgatccagaggccgttgctgaacacgccatcggtatgatgatgacgctgaaccgccgtattcaccgcgcgtatcagcgtacccgtgacgctaacttctctctggaaggtctgaccggctttactatgtatggcaaaacggcaggcgttatcggtaccggtaaaatcggtgtggcgatgctgcgcattctgaaaggttttggtatgcgtctgctggcgttcgatccgtatccaagtgcagcggcgctggaactcggtgtggagtatgtcgatctgccaaccctgttctctgaatcagacgttatctctctgcactgcccgctgacaccggaaaactaccatctgttgaacgaagccgccttcgatcagatgaaaaatggcgtgatgatcgtcaataccagtcgcggtgcattgattgattctcaggcagcaattgaagcgctgaaaaatcagaaaattgggtcgttgggtatggacgtctatgagaacgaacgcgatctattctttgaagataaatccaacgacgtgatccaggatgacgtattccgtcgcctgtctgcctgccacaacgtgctgtttaccgggcaccaggcattcctgacagcagaagctctgaccagtatttctcagactacgctgcaaaacttaagcaatctggaaaaaggcgaaacctgcccgaacgaactggtttaa

SEQ ID NO: 484422 - DNA, 2640 bp, Shigella sonnei
atgctgggtaaatataaagccgttctcgcgctgttattactgattattcttgtgccgttgacgctgctgatgacgctcgggctgtgggttcccacgctggcgggcatctggctaccgctcgggacacgtattgcattagatgaaagcccacgcattacgcgtaaaggtttaatcattcccgatctccgttatctggtgggagattgtcagcttgcgcatatcaccaacgccagcctttcacatcccagccgctggttattgaacgtcggcatggtagaacttgattctgcttgtctggcgaaattgccgcagacggagcaatcgccagctgctccaaaaaccctcgcgcagtggcagtccatgctgcctaacacctggatcaatatcgataaactgattttttctccctggcaggaatggcagggaaaactctctctcgcattaacctctgatattcagcaactgcgttatcagggcgaaaaagttaaatttcaaggccagctgaaagggcaacaacttacagtcagcgaactggatgtcatcgcgtttgaaaatcagccgccggttaaactggtgggggaatttactatgccgctcgtgccggatggacttcctgtaagtgggcatgctactgcgacgttaaacttgccgcaggaaccgtcactggtggatgcagagctggactggcaggaaaatagcgggcaattgattgtgctggcacgggataacggcgatccgttgctcgatttgccgtggcaaattactcgtcaacaattgaccgtaagcgatggtcgctggagttggccgtatgcaggttttcctttgagtggccgactgggtgtcaaagtcgacaactggcaggcagggcttgagaacgctctgatcagcggacgactgagtgtgctgacccaggggcaagcgggtaaaggcaacgcggtgctaaattttggcccaggaaaattaagcatggataacagccagctgcctctgcagctgaccggtgaagcgaaacaggcggacctcattttatatgcccgcttacccgcgcagctaagtggaagtctgactgacccaacgctggcctttgagccaggcgcgttattacgttcgaagggaagagtcatcgattcgctggacatcgatgaaatccgctggcctttagcgggtgtaaaagtcacccaacgtggtgttgacggacgtttgcaggccattttgcaggcgcatgaatatgaactgggcgatttcgtgctgcatatggatgggctggcgaatgattttctccctgacgcgggccgctggcagtggcgctactggggaaaaggcagttttacaccgataaatgccacctgggatgtcgcaggaaaaggtgaatggcatgacagcacgattacgctgaccgacctctccaccggtttcgaccagttacaatacggtacgatgacggtagaaaagccgcgattaattctcgacaagcccgtcgtctgggtacgtgacgcacagcatccctccttcagcggcgcgctgtcactggacgccgggcaaacgctgttcactggcggcagtgtgttaccgccatcaaccttaaaatttagcgtcgatgggcgcgatccgacgtatttcctctttaaaggcgatttacatgctggtgagattggcccggttcgggtaaatggtcgctgggacggtattcgtctgcgcggtaacgcctggtggccaaaacaatcactgactgtattccagccgctggtgccacccgactggaagatgaacttacgcgatggggaactgtatgctcaggttgcattttctgctgcgcctgaacaaggattccgcgcgggaggacacggcgtgttgaaaggcggtagtgcctggatgccagataatcaggttaacggtgtcgattttgtcctgcctttccgttttgccgatggagcctggcatctggggactcgcggccccgttacgttgcgaattgccgaagtgattaatctggtgacagcgaaaaatattacggctgatttgcaagggcgttatccgtggactgaagaagaacccttgctgttgactgatgttagcgtcgatgtgttaggcggtaacgtactgatgaaacaattacgtatgccgcaacatgacccggcgctgttgcggctgaataatctctcatccagcgaactggttagcgccgtcaatccgaaacaattcgccatgtccggggcatttagtggtgcattgccgttatggctaaacaacgaaaaatggatagtgaaagatggttggctggcaaatagcgggccaatgaccttgcggctggataaagacaccgcagatgcggtggtgaaagacaatatgactgcgggttcagcaattaactggttgcgctatatggaaattagccggtcatcgacaaaaattaacttagataatctcggtttattaaccatgcaggccaacattacaggtaccagtcgcgttgatggtaaaagcggtacggtaaaccttaattaccatcatgaagagaatatttttacgctgtggcgcagtttacgctttggcgataatctccaggcatggttggagcagaacgcacgtctgccgggaaatgactgtccgcaaggaaaagagtgtgaggaaaaacaatga

SEQ ID NO: 484423 - DNA, 186 bp, Shigella sonnei
atgaaaattttactggctgcgttgacgtcatcttttatgctggttggctgtacgccgcgtattgaagtcgctgcgcccaaggaaccgatcactatcaatatgaacgttaaaattgagcatgagatcatcatcaaggcagacaaagatgtcgaagagctgcttgaaactcgtagcgatcttttctga

SEQ ID NO: 484424 - DNA, 327 bp, Shigella sonnei
atgaagaaaacattacttctttgtgcgtttcttgttgggctggtaagcagcaatgtaatggcattgactctggatgaagccagaactcaggggcgggtaggtgaaacattttatggttatctggttgcgctgaaaacggatgctgaaacagagaaattagtaaccgacattaatgccgaacgtaaagcgagttaccaacaactggcaaagcaaaataatgtgtcggtagatgatatcgcgaaactcgccgggcaaaagctcgtagctcgggccaaaccgggggaatatgtacaagggataaacggtaaatgggtgcgaaaattttaa

SEQ ID NO: 484425 - DNA, 630 bp, Shigella sonnei
atgctggatcgcgttaaagacaaagattatatcaatgtcaatctgacctacgaacttgataagttaacaaaagggaatcagcaactcggtagtggtgagtggtcattgattgctgaatctattgatccctcagcagtgcgccaatttatcatccagtataacattgctatgcagaagcagcttgctgtacaccctgagttagcaaacgatgaagttgctctgcaagaagtgaatgctgcattgttcaaagagtatttaccgttattacaaaaaagtgagccgaccattaaacaaccggtaagatggaagaacgcactcggcgaactaaatgccaatctggatatcagtattgccgacccagccaaatcttcatcatccacaaacaaagatatcaaattgctcaattttgatgtgaagttaccgcttaatgtcgtcacagaaaccgcaaaacagcttaatttatctgaaggaatggatgcggaaaaagcgcaaaagcaggctgataaacaaatcagcgggatgatgacattgggtcagatgtttcagttaatcacgattgacaacaataccgcctcgctgcagctgcgttactctgctcattcagaggcgagtaaaacttacttattctga

SEQ ID NO: 484426 - DNA, 933 bp, Shigella sonnei
atggctaaccttttgaataaattcattatgacgagaatactcgctgcgataacccttttgctgagtatcgtattgaccattttggtcactattttttgttccgtcccgatcatcattgccgggattgtaaaactattgctacctgtgccagtcatttggcgaaaggtttcgcgtttttgtgattttatgatgtattgctggtgtgaaggtctggcggtattactgcatctgaacccacacctgcaatgggaagttcacgggctggaagggttaagtaagaagaactggtatctgcttatttgtaaccaccgtagttgggcagatattgtcgtactgtgcgtgctgtttcgtaagcacattccgatgaataaatatttcctcaagcaacagctggcctgggtgccatttcttggcctggcgtgctgggcgctggatatgccgtttatgaagcgttattcccgcgcttatttattacgtcatccggagcgacgtggtaaagatgttgaaaccactcggcgttcttgtgaaaagtttcgcctgcatcccaccaccattgtcaatttcgttgaaggctcccgtttcacgcaagaaaaacatcagcaaacccactccacttttcaaaacttgttgccaccaaaggcggcaggcattgcgatggcgctaaatgtactgggtaaacaattcgataaactgcttaatgttacgctgtgttatccggacaataaccgtcagccgttcttcgatatgttaagcggtaaactgacgcggattgtcgtacatgtggatttacagcctattgccgatgagttacatggcgactacatcaatgacaaaagctttaagcgccattttcagcaatggctgaactcattgtggcaggaaaaagaccggcttctgacgtctctcatgtcatcacagcgtcagaataagtaa

SEQ ID NO: 484427 - DNA, 243 bp, Shigella sonnei
atgtccgtgcctgtttatcagattatgggtaaaggatgccacagacaggatgaaaacatgagtttttcaccgcttttcgtgaaaatcttttgtagatcttctggatcgctcgcaaatcgtcatgtggataactttgtgcataaattatttacatcgcttttaatttattatcatgctttttacagcatgatgtttgtctttgtttttcatgcagttaaaaataaagccatccctaataattga

SEQ ID NO: 484428 - DNA, 2787 bp, Shigella sonnei
atggttcagatcccccaaaatccacttatccttgtagatggttcatcttatctttatcgcgcatatcacgcgtttcccccgctgactaacagcgcaggcgagccgaccggtgcgatgtatggtgtcctcaacatgctgcgcagtctgatcatgcaatataaaccgacgcatgcagcggtggtctttgacgccaagggaaaaacctttcgtgatgaactgtttgaacattacaaatcacatcgcccgccaatgccggacgatctgcgagcacaaatcgaacccctgcacgcgatggttaaagcgatgggactgccgctgctggcggtttctggcgtagaagcggacgacgttatcggtactctggcgcgcgaagccgaaaaagccgggcgtccggtgctgatcagcactggcgataaagatatggcgcagctggtgacgccaaatattacgcttatcaacaccatgacgaataccatcctcggaccggaagaggtggtgaataagtacggcgtgccgccagaactgatcatcgatttcctggcgctgatgggtgactcctccgataacattcctggcgtaccgggcgtcggtgaaaaaaccgcgcaggcattgctgcaaggtcttggcgggctggatacgctgtatgccgagccagaaaaaattgctgggttgagcttccgtggcgcgaaaacaatggcagcgaagctcgagcaaaacaaagaagttgcttatctctcataccagctggcgacgattaaaaccgacgttgaactggagctgacctgtgaacaactggaagtgcagcaaccggcagcggaagagttgttggggctgttcaaaaagtatgagttcaaacgctggactgctgatgtcgaagcgggcaaatggttacaggccaaaggggcaaaaccagccgcgaagccgcaggaaaccagtgttgcagacgaagcgccagaagtgacggcaacggtgatttcttatgacaactacgtcaccatccttgatgaagaaacactgaaagcgtggattgcgaagctggaaaaagcgccggtatttgcatttgataccgaaaccgacagccttgataacatctctgctaacctggtcgggctttcttttgctatcgagccaggcgtagcggcatatattccggttgctcatgattatcttgatgcgcccgatcaaatctctcgcgagcgtgcactcgagttgctaaaaccgctgctggaagatgaaaaggcgctgaaggtcgggcaaaacctgaaatacgatcgcggtattctggcgaattacggcattgagctgcgtgggattgcgtttgataccatgctggagtcctacattctcaatagcgttgccgggcgtcacgatatggacagcctcgcggaacgttggttgaagcacaaaactatcacttttgaagagattgcgggtaaaggcaaaaatcaactgacctttaaccagattgccctcgaagaggccggacgttacgccgccgaagatgcggatgtcaccttgcagttgcatctgaaaatgtggccagatctgcaaaaacacaaagggccgttgaacgtcttcgagaatatcgaaatgccgctggtgccggtgctttcacgcattgaacgtaacggtgtgaagatcgatccgaaagtgctgcacaatcattctgaagagctcacccttcgtctggctgagctggaaaagaaagcgcatgaaattgcaggtgaggaatttaacctttcttccaccaagcagttacaaaccattctgtttgaaaaacagggcattaaaccgctgaagaaaacgccgggtggcgcgccgtcaacgtcggaagaggtactggaagaactggcgctggactatccgttgccaaaagtgattctggagtatcgtggtctggcgaagctgaaatcgacctacaccgacaagctgccgctgatgatcaacccgaaaaccgggcgtgtgcatacctcttatcaccaggcagtaactgcaacgggacgtttatcgtcaaccgatcctaacctgcaaaacattccggtgcgtaacgaagaaggtcgtcgtatccgccaggcgtttattgcgccagaggattatgtgattgtctcagcggactactcgcagattgaactgcgcattatggcgcatctttcgcgtgacaaaggcttgctgaccgcattcgcggaaggaaaagatatccaccgggcaacggcggcagaagtgtttggtttgccactggaaaccgtcaccagcgagcaacgccgtagcgcgaaagcgatcaactttggtctgatttatggcatgagtgctttcggtctggcgcggcaattgaacattccacgtaaagaagcgcagaagtacatggacctttacttcgaacgctaccctggcgtgctggagtatatggaacgcacccgtgctcaggcgaaagagcagggctacgttgaaacgctggacggacgccgtctgtatctgccggatatcaaatccagcaatggtgctcgtcgtgcagcggctgaacgtgcagccattaacgcgccaatgcagggaaccgccgccgacattatcaaacgggcgatgattgccgttgatgcgtggttacaggctgagcaaccgcgtgtacgtatgatcatgcaggtacacgatgaactggtatttgaagttcataaagatgatgttgatgccgtcgcgaagcagattcatcaactgatggaaaactgtacccgtctggatgtgccgttgctggtggaagtggggagtggcgaaaactgggatcaggcgcactaa

SEQ ID NO: 484429 - DNA, 633 bp, Shigella sonnei; identical to SEQ ID NO: 458889

SEQ ID NO: 484430 - DNA, 510 bp, Shigella sonnei
atgaaaccatcatcttcaaactcacgcagcaaaggtcatgcaaaagcgcgtcgaaaaacacgcgaggagctggatcaggaagctcgtgatcgcaagcgtcagaaaaaacgtcgtggtcatgcgccgggcagccgcgcagcgggcggaaacaccacgtcaggcagcaaaggccagaacgcaccaaaagatccacgtattggcagtaaaacccctattccattgggcgtggctgaaaaagtcaccaaacagcacaaaccgaagagtgagaaacctatgctttcaccgcaggcggagttggaattactggaaacggatgagcgtctggatgcgctgctggaacgtctggaagcaggcgaaaccctgagcgccgaagagcaatcctgggtggatgctaaactggatcgtattgatgagttgatgcagaaactcggcctctcttatgacgatgacgaagaagaggaagaagacgagaagcaagaagacatgatgcgtctgctgcggggtaactaa

SEQ ID NO: 484431 - DNA, 1374 bp, Shigella sonnei
atgtctgtacagcaaatcgactgggatctggccctgatccagaaatataactattccgggccacgatacacctcgtacccgaccgcgctggagttttcagaagacttcggcgaacaggcgtttttacaagccgtggcgcgctatcctgagcgtccattatctctctacgtacatatcccgttctgccataagctttgttacttctgcggttgcaataagattgttactcgccagcagcacaaggccgatcagtatctggacgcgctggagcaagaaatcgtccatcgtgcaccgctgttcgccgggcgtcacgtcagccaattgcactggggcggcggaacgccgacgtatctgaataaagcgcaaatcagccgcctgatgaagctgctgcgcgaaaacttccagttcaatgccgatgcggagatttcgatcgaagtcgatccgcgggaaatcgaactggatgtactcgatcatttacgcgccgaaggctttaatcgcctgagcatgggcgtgcaggacttcaacaaagaagtgcaacgtctggttaaccgcgagcaggatgaagagttcatctttgcactgcttaaccatgcgcgtgagattggttttacctccaccaacatcgacctgatttacggcctgccgaaacagacgccggagagtttcgcctttaccctgaaacgtgtggcggagctgaaccccgatcgtctgagtgtctttaactacgcgcatctgccgaccatttttgctgctcagcgcaaaatcaaagatgctgacctgccgagtccgcagcaaaaactcgatatcctgcaggaaaccatcgccttcctgacgcaatcgggctatcagtttatcggtatggatcactttgcccgtccggatgacgagctggcggtggcccagcgtgaaggcgtgctgcatcgtaacttccagggctacaccactcagggcgataccgatctgctggggatgggcgtttccgccatcagcatgattggcgactgctacgcgcagaaccagaaagagttgaagcagtactatcagcaagtggatgaacaaggcaatgctctgtggcgtggtattgcgctaacgcgtgatgactgtattcgccgcgatgtgattaagtcgctcatctgcaacttccgtctggattacgcccctattgagaaacagtgggatttgcacttcgctgattactttgcggaagatctcaagctgctcgccccgttagcaaaagatgggctggtggatgtggatgagaagggaatacaggtgacggcgaaaggtcgcttgctgatccgcaacatttgcatgtgctttgatacctatctgcgccagaaagcgcggatgcagcagttctcacgggtgatttaa

SEQ ID NO: 484432 - DNA, 1410 bp, Shigella sonnei
atgcaacgagggatagtctgggtagtcgatgacgatagttccatccgttgggtgcttgaacgtgcgctcgctggagcgggtttaacctgtacgacatttgagaacggcgcggaagtactggaggcgctggcgagcaaaacgccggatgtgctgctttcagatatccgtatgccgggaatggacgggctggcgctgctcaagcagattaaacagcgccatccaatgcttccggtcatcattatgaccgcacattccgatctggatgctgccgtcagcgcctatcaacaaggggcgtttgattatctgcccaaaccgtttgatatcgacgaagcagtggcgctggttgagcgcgctatcagtcattaccaggaacagcagcagccgcgtaatattcagcttaacggcccaacgaccgatatcatcggcgaagcgccagccatgcaggacgtgttccgtattatcggtcggctttcgcgttcttctattagcgtgctgattaacggcgaatccggcaccggtaaagaactggtcgctcatgccctgcatcgccacagtccgcgcgccaaagcgccgtttatcgcgctgaatatggcagctatcccaaaagatttgatcgaatcagaactgtttggccacgagaaaggcgcgtttactggcgcgaataccattcgtcaggggcgttttgaacaggccgatggcggtacattattcctcgacgaaattggtgatatgccgctggatgtgcagacgcgtttgctgcgcgtgctggcagacggtcagttttaccgcgttggcggctatgcgccggtgaaagtggatgtgcgtattatcgctgccactcaccagaatctcgaacagcgagtgcaggaaggtaagttccgtgaggatctgttccaccgcctgaacgttatccgcgttcatctgccgccgctgcgcgaacgtcgggaagatattccccgtctggcgcgccattttttacaggttgccgcgcgcgaactgggcgtagaagcgaagttactgcatccggaaaccgaagctgctctgacgcgtctggcgtggccaggcaacgtgcgccagctggaaaacacctgccgctggctaacggtgatggccgccgggcaggaagtgttgattcaggatttgcccggcgaactgtttgaatcaacggttgcggagagtacttcgcaaatgcaaccggacagctgggcaacgcttcttgcgcagtgggcagacagagcgctgcgttccggtcatcaaaatctgctttccgaagcgcagccagagctggagcggacgttactgacgaccgcgttacgacatacgcaggggcataaacaggaagcggcgcggctactcggctggggccgcaacaccctgacgcgtaagttaaaagagctggggatggagtga

SEQ ID NO: 484433 - DNA, 1050 bp, Shigella sonnei
atggcaacaggcacgcagcccgatgctgggcagatcctcaactcgctgattaacagtattttgttaattgatgacaatctggcgatccattacgccaaccccgccgcgcaacaactgctcgcccaaagctcccgcaaattgtttggtacaccgttaccggaactgttgagctacttctcattaaatatcgagctgatgcaagaaagtctggaggcggggcaaggttttaccgataacgaagtgacgctggtcatcgacgggcgctcgcatatcctttctgtgacggcccagcgtatgccggacggcatgatcctgctggagatggctccgatggataaccagcgccgcttaagtcaggaacagctacagcacgcccagcaggttgctgcccgtgatttagtgcgcggcctggcacatgagattaaaaatccgcttggaggtttacgtggcgcggcgcagctgctcagcaaagcgttacctgacccatcactactcgaatataccaaagtgattatcgaacaggcggaccggctgcgaaatctggtcgaccgtctgttggggccgcagctgcccggtacgcgcgttaccgaaagtattcacaaagtagctgaacgcgtggtgacgctggtgtcgatggaactgccggacaacgtgcggttgattcgtgattacgaccccagcctgccggaactggcgcacgacccggatcaaattgaacaggtcttgctgaatattgtgcgcaatgcgctacaggcgctggggccggaaggcggtgaaatcattctgcgtacccgcaccgcgtttcaactgaccttacacggcgagcgctaccggctggcggcgcggattgatgtggaagataacgggccgggcattccgcctcatttgcaggatacgctgttttacccgatggtcagcggccgcgaaggtggcaccgggcttggcttatccatcgcccgtaatttgattgatcagcattcaggcaaaattgaatttaccagttggccaggtcataccgagttctcggtttacctgcctatcaggaaataa

SEQ ID NO: 484434 - DNA, 1410 bp, Shigella sonnei
atgtccgctgaacacgtactgacgatgctgaacgagcacgaagtgaagtttgttgatttgcgcttcaccgatactaaaggtaaagaacagcacgtcactatccctgctcatcaggtgaatgctgaattcttcgaagaaggcaaaatgtttgacggctcctcgattggcggctggaaaggcattaacgagtccgacatggtgctgatgccagacgcatccaccgcagtgattgacccgttcttcgccgactccaccctgattatccgttgcgacatccttgaacctggcaccctgcaaggctatgaccgtgacccgcgctccattgcgaagcgcgccgaagattacctgcgttccactggcattgccgacaccgtactgttcgggccagaacctgaattcttcctgttcgatgacatccgtttcggatcatctatctccggttcccacgttgctatcgacgatatcgaaggcgcatggaactcctccacccaatacgaaggtggtaacaaaggtcaccgtccggcagtgaaaggcggttacttcccggttccaccggtagactcggctcaggatattcgttctgaaatgtgtctggtgatggaacagatgggtctggtggttgaagcccatcaccacgaagtagcgactgctggtcagaacgaagtggctacccgcttcaataccatgaccaaaaaagctgacgaaattcagatctacaaatatgttgtgcacaacgtagcgcaccgcttcggtaaaaccgcgacctttatgccaaaaccgatgttcggtgataacggctccggtatgcactgccacatgtctctgtctaaaaacggcgttaacctgttcgcaggcgacaaatacgcaggtctgtctgagcaggcgctgtactacattggcggcgtaatcaaacacgctaaagcgattaacgccctggcaaacccgaccaccaactcttataagcgtctggtcccgggctatgaagcaccggtaatgctggcttactctgcgcgtaaccgttctgcgtctatccgtattccggtggtttcttctccgaaagcacgtcgtatcgaagtacgtttcccggatccggcagctaacccgtacctgtgctttgctgccctgctgatggccggtcttgatggtatcaagaacaagatccatccgggcgaagccatggacaaaaacctgtatgacctgccgccagaagaagcgaaagagatcccacaggttgcaggctctctggaagaagcactgaacgaactggatctggaccgcgagttcctgaaagccggtggcgtgttcactgacgaagcaattgatgcgtacatcgctctacgtcgcgaagaagatgaccgcgtgcgtatgactccgcatccggtagagtttgagctgtactacagcgtctaa

SEQ ID NO: 484435 - DNA, 1824 bp, Shigella sonnei
gtgatcgaaaaattgcgtaatatcgccatcatcgcgcacgtagaccatggtaaaaccaccctggtagacaagctgctccaacaatccggtacgttcgactctcgtgccgaaacccaagagcgcgtgatggactccaacgatttggagaaagagcgtgggattaccatcctcgcgaaaaacaccgctatcaaatggaatgattaccgtatcaacatcgttgataccccggggcacgccgacttcggtggtgaagttgaacgtgtaatgtccatggtagactcagtgctgctggtggttgacgcatttgacggcccgatgccgcaaacgcgcttcgtaaccaaaaaagcgtttgcttacggcctgaagccgattgttgttatcaacaaagttgaccgccctggcgcgcgtcctgattgggttgtggatcaggtattcgatctgttcgttaacctcgacgcgaccgacgagcagctggacttcccgatcgtttacgcttctgcgctgaacggtatcgcgggtctggaccacgaagatatggcggaagacatgaccccgctgtaccaggcgattgttgaccacgttcctgcgccggacgttgaccttgacggtccgttccagatgcagatttctcagctcgattacaacagctatgttggcgttatcggcattggccgcatcaagcgcggtaaagtgaagccgaaccagcaggtcactatcatcgatagcgaaggcaaaacccgcaacgcgaaagtcggtaaagtgctgggccacctcggtctggaacgtatcgaaaccgatctggcggaagctggcgatatcgtggcgatcacgggccttggcgaactgaacatttctgacaccgtttgcgacacgcaaaacgttgaagcgctgccggcactctccgttgatgagccgaccgtttctatgttcttctgcgttaacacctcgccgttctgcggtaaagaaggtaagttcgtaacgtctcgtcagatcctggatcgtctgaacaaagaactggtacacaacgttgcgctgcgcgtagaagaaaccgaagacgccgatgcgttccgcgtttctggtcgtggcgaactgcacctgtctgttctgatcgaaaacatgcgtcgtgaaggtttcgaactggcggtatcccgtccaaaagtaatcttccgtgaaatcgacggtcgtaaacaagagccgtatgaaaacgtgactctggacgttgaagaacagcatcagggttctgtaatgcaggcgctgggcgaacgtaaaggcgacctgaaaaacatgaatccagacggtaaaggccgcgtacgtctcgactacgtgatcccaagccgtggtctgattggcttccgttctgagttcatgaccatgacttccggtactggtctgctgtactccaccttcagccactacgacgacgtacgtccgggtgaagtgggtcagcgtcagaacggcgtactgatctctaacggtcagggtaaagcggtcgcgttcgcactgttcggtctgcaggaccgcggtaagctgttcctcggtcacggtgcagaagtttacgaaggtcagattatcggtattcacagccgctctaacgacctgactgtaaactgcctgaccggtaagaaactgaccaacatgcgtgcttccggtactgacgaagctgttgttctggttccgcctatccgcatgactctggaacaagctctggagttcatcgatgatgacgaactggtagaagtgactccgacctctatccgtattcgtaaacgtcacctgacggaaaacgatcgtcgtcgcgccaaccgcgcaccgaaagacgattaa

SEQ ID NO: 484436 - DNA, 3555 bp, Shigella sonnei
atgagacacgatcgcggctattttaatgtctccaacggcggcaaaatccatgttaagggcaccagccgtctgacctatttgcagggaaatgtcagtggtgaaggcagccaggtaaattctaaaaccttctttatgggcgtttacggcagttacggtggtaatcagtacctgtcagttaataacggcggtgaagttaatgccagtgagaaaattagcctgggttattatgatcaaaactccgatacaacacttgctgtttcggaaggtggtaaaatctctgcgccgactattagtttaagcaccaactctgagttagcgttaggtgcacaggaaggaagcgcagcgaaggctgcagggattattgatgccgaaaaaattgagtttgtgtgggcaaagacatccgagaagaaaatcaccttaaaccacacggataaaaacgcgactatttccgcggatattgtcagtgacagcgagggcctgggctatatcaatgcgctcaatggtacgacttacttaaccggggataactccgcctttagcggtaaagtcaaaattgagcaaaatggcgctttagggatcacccaaaatataggtaccgcagaaatcaacaaccgcgggaaattacacctgaaggctgacgatagcatgacctttgccaataagatttccggcaacggtacaataagtatcgacagtgggacagtggcgctgaccggcaataactatgcattcagcggatatattgatgtcgcttctggtgctgtcgcggttatttctgaagacaagaacatcggccgtgcggacctggatgttgatggcaaactgcaaatcaatgccaataaagattgggtatttgataacgatcttcaaggtagaggtattgttgaaataaacatggggaatcacgaattctccttcgatgagtttgcttatacagactggttccagggttcactggcgttccagaacacgacatttaacctggaaaagaatgctgagtttctgcagagaggcgggatcactgcgggtcagggaagcctggtaacagtgggtaagggcgctcactccattagcactttgggattctccagcggaaccgttgattttggtgccctgacagcaggtgcacagatgacagaagggacggtcaacgttagtaaaacgctggatttgcgcggcgagggtgtgattcaggtttctgacagtgacgttgtccgctcagtatctcgtgatattgactctgcgttatcgctcactgaagtcgatgatggtaacagcgccattaagctggttgatgcgcaaggtgcggaagttctgggcgatgcgggcaatctgcaattgcaggataaaaatgggcaaatcctctccagcagtgcccaacgtgatattcagcagaatgggcaaaaagcggccgtcggcacttacgactatcgtctgacgagtggggtaaacaatgacggtctgtatatcggttacggcctgacccagcttgatttacacgctaccgacagcgatgctctggtgctgagctctaacggtaaaagcgagaatgccgccgatctcagcgcaaagattaccggcagtggtgacctggcattcagcagccagaagggtcagaccgtatcgctttctaacaaagacaacgactataccggtgttaccgatctgcgcagtgggacgcttttgttgaataacgataacgtgttgggtaatacccatgaactgcgtctggcggcagagactgaactggatatgaatggtcacagccagaccgtgggcacgctcaatggcagcgccgattcactgctgagcttaaatggcggcagtctgacggttaccaacgggggcacttcaaccggttcgttaacggggagcggagagctgaatattcagggcggcacgctggacatcgcgggcgataacagcaacctgacagcgaatgtgaacattgctaattcggctaatgtcctggtaagtcatgcgcagggattgggtagcgcaaacgttgagaacaacggtaccctggcgttgaataatagcgctgaaaaaagagcggctgcgtctgtgaattacaccctgggcggcaatctgaccaacaacggtacgctgatgaccggaatgtcaggacagcaagctggcaatgtgttagtggtgaaggggaactaccacggtaataacggtcaactagtaatgaatacggtactgaatggcgatgactcagtaaccgataaattggttgtcgagggcgatactagcggcacgactgccgttacggtgaataacgctggcggtacaggtgcgaaaacccttaacggtatcgaacttatccatgtagacggtaagtctgagggcgaatttgttcaggctggtcgtatcgttgcgggggcgtatgactacactctcgcgcgtggacaaggggcaaatagtggtaactggtatctgaccagcggcagtgattctcctgaactgcagccggagccagacccgatgccgaatccggagccaaacccgaatccagagccgaaccctaacccgacacctacgccgggtccggatctgaatgtggataatgacctgcgaccggaggcgggtagctacattgcgaaccttgcagcagcgaatacaatgttcaccacgcgtctgcatgagcgtctgggtaatacgtactataccgacatggtgacgggtgagcagaaacaaaccactatgtggatgcgccatgaaggtggtcataataaatggcgtgatggcagcggccagctgaaaacccaaagcaatcgctatgttctgcaactgggaggcgatgtcgcgcagtggagccaaaacggcagcgacagctggcatgttggggtcatggcgggatatggcaacagcgacagcaaaaccatttcctcgcgaaccggttatcgtgcaaaagcgagtgtgaacggatatagcaccggcctctatgccacctggtatgccgatgacgagtcgcgtaatggcgcgtatctcgacagttgggcgcagtacagctggtttgataacacagtgaaaggggatgacttacaaagtgaatcctataaatcaaaaggatttaccgcttcactggaagctggatacaaacacaaattagctgaatttaatggcagccagggaacgcgtaatgaatggtatgttcagccgcaagcacaggttacctggatgggagtcaaagccgataagcaccgcgaaagcaacggaaccctcgttcatagcaacggtgatggcaatgttcaaacccgacttggcgtaaaaacctggctgaagagccaccataaaatggatgacggtaaatcccgcgagttccagccgtttgtagaagtgaactggctgcataacagtaaggatttcagcaccagtatggatggcgtgtccgtcactcaggatggagcccgaaatattgctgagataaaaaccggggtggaaggacagctaaatgccaacctgaatgtctgggggaatgtgggcgttcaggttgccgataggggatataatgacacctctgcaatggttggcattaagtggcaattctga

SEQ ID NO: 484437 - DNA, 1089 bp, Shigella sonnei
atggcttcgcatgatttgagtgtttttttggaagagttcggggcaacggtgaatttgacgttgcctggtatcgtgtccgaaaaagaacggcttttactcaagctgctaatggagggaatgtcggttacagaaatctcacagtacagaaatcgcagtgcaaagacaatttcacatcaaaagaagcagctgtatgaaaaactaggcatccagagtgatattaccttctggcgggatatcttttttcaatatcatccgcaagtcatcagtggcacgggaaataaaaataatttttatatccctgataaccgttgtcaccatatcgtcacgcctgaagccatcagtctggcgttggaaaaccacgaattcaaaccgtggatccaaccggttttctgcgcgcagactggggtactgacgggctgtgaggtacttgtccgctgggaacatccacaaacgggaattatcccaccggatcagtttattcctctggcggagtcatccggtcttattgtcataatgacccgccaactgatgaaacagactgcggatattctgatgccggtaaaacatttgctgccggacaatttccatattggcatcaacgtctcggcgggttgttttttggcagcgggatttgaaaaagagtgtctgaacctggttaagaaattaggtaacgataaaatcaagctggttctcgagctaacggaacgtaaccctattccggtaacgccagaagccagagcgatatttgacagccttcatcagcacaacattacctttgcgctggatgactttggtacgggttatgcgacctatcgttacttgcaggcgttcccggtcgattttattaagatcgataagtcatttgtgcaaatggcgagtgtcgacgaaatctccggtcatattgtggacaatattgtcgaactagcgcgtaagcctggtctgagtatcgtggcggaaggggtagaaacccaggagcaggcggatttaatgatcggtaaaggcgttcactttttgcagggctatttgtactctccgccagtaccgggtaataaatttatctctgaatgggtaatgaaagcaggtggttga

SEQ ID NO: 484438 - DNA, 933 bp, Shigella sonnei
atgaactcaatttttaccgaagagaatctgttggcatttactaccgctgcgcgttttggcagcttcagtaaagccgcagaagagttgggtttaaccacttccgccattagctacaccatcaagcgtatggagacggggctggatgtggtgctgttcactcgcagtacccgcagcattgagttaacggagtccgggcgttattttttccgcaaagctaccgacctgctgaatgatttttatgccatcaaacgcagtatcgatactatttcgcagggcatagaagcgcgtgtgcgcatttgtattaatcagctgctttatacgcccaaacacaccgcacgcttgttacaggtgctgaaaaagcagtttcctacctgccagattaccgtcaccaccgaagtgtataacggcgtctgggatgcgattattaataatcaggccaatatcgccatcggcgcacccgatacactactggacggcggcggtattgattacactgaaattggcgcgattcgctgggcttttgctatcgccccggatcacccgttagcctttgtgccggaacccatcgccgaaagccaactgcgtctctaccctaatattatggtggaggacaccgcgcatacgattaataaaaaagtgggctggttgctgcacgggcaggagtcaattctggtgccagatttcaacaccaaatgtcagtgccagattttaggtgaaggaattggttttttgccggattacatggtccgtgaggcgatgacgcaatccctgctggttacccgacaaatccataatccgcgccaggattcgcgcatgttactggcgactcagcattctgctacgggtcaggtgacgcagtggattaaaaaacaatttgcgccaaatggcatattaacggggatctatcaggatttactgcatcgggagaattaa

SEQ ID NO: 484439 - DNA, 498 bp, Shigella sonnei
atgaacggactcacggcaacgggtgtcaccgtcggtatttgtgcagggctttggcagttagtgtcttcacatgtcgggctctctcaaggatgggaattattaggaaccattggcttcgtcgccttttgcagtttttatgccgcaggcggcggtaaatcggggtttatcagaagtctggcggttaattattccgggatggtgtgggcgtttttcgccgcgctgactgctggttggctggcctctgtaagtggactgtccgcgttctgggcgagcgtaattactaccgtacccttctcggcggtagtggtctggcaagggcgtttctggttactgtcctttattcccggtggctttctcggcatgacgctgttttttgccagcgggatgaactggacggtgacgttactgggttttctggcgggtaactgcgtggggataatttcagaatatggtggacaaaaattaagcgaagcgacgactaaacgcgacgggtattaa

SEQ ID NO: 484440 - DNA, 606 bp, Shigella sonnei
atgagtataaaaaatctacctgccgactatttattggctgcacaacagggtgatatcgataaagtaaaaacctgccttgcgctgggtgtcgatattaatacctgcgatcgtcaggggaaaacggcaattacgctggcaagtttatatcagcaatatgcttgcgttcaggcattaattgatgccggagcggatattaataagcaagatcatacctgtttaaatccttttttaattagctgtctgaacgatgatttaacgctactacgaattattttaccggctaaacccgatcttaattgcgtaacccgttttggcggtgtcggcctgacgcctgcctgtgaaaaaggccatttaagtattgtaaaagagcttttggcgcatacggagattaacgttaaccagaccaaccatgtaggctggacgccgctactggaagcgattgtgcttaatgatggtggtattaaacagcaggcgattgtgcagttattgctggaacacggtgccagcccgcatctgaccgataaatatggcaaaacgccactggaactggcgcgggaacggggctttgaagagattgcgcagttactgattgccgcaggtgcataa

SEQ ID NO: 484441 - DNA, 864 bp, Shigella sonnei
gtgtgggcgctaactgcggatgcggattttctggcgcagcgggggcaaggacaggttgaacaggtctttgccagagcggtaaatatcgcactcccggctcgccagcagttgctgacgctgctttgtgaagagtacgacaatgcgccaaacagttgtcggttggcactcactcactttgatgatctgttccggcatggtgataaggttcagtttgacgatcaaggtattacggttggtcaacatcttcatatagagatgagtcgttgtcggcgttggctgtccccaaccttgcaaatgaccgctgtgaattttcaccttatcgcctggctacagtggcacgacattattcatcagcacctgggggaaaatgaaaccctgtttaattatcgcggcgataatccgttttatcaggcgttaaataaagaattacatattaaacgacgggcagttattcagacagtaaacgataagcaaaatatcgccgcagcggtcgccagtatgattgggttagggattggccttacgccatcagccgatgattatttaacaggtctggcgcttattttatttattcccgggcatccggcagaaaaatacaaagaggaattttatcgcggtctgctacgcggcagaaataacaccacgttattaagtgccataacgctggaagccgcattacaacaacgctgccgggaaaatattcatcgctttattcacaacattatttatggcgtccctgggaattcaactcaggcaatagaaaaaattaaacatattggctccagttccggctgcgacatgctgtatggcatggccgatggttgtgcgctgagccaaacctacggagggaattatgtcagttaa

SEQ ID NO: 484442 - DNA, 1548 bp, Shigella sonnei
atgtcagttaaaatagtcattaaaccgaatacctattttgattctgtctcgctgatgtctatctccacgcgtgcaaataaactcgacggcgtcgagcaggcatttgtggcgatggcgaccgaaatgaacaaaggtgtgctgaaaaatttaggactgctgacgccgacgctggaacaggcgaaaaacggcgacctgatgattgtcatcaatggtaaatcgggtgcggacaacgagcagttgctggtggagattgaagaactgttcaacaccaaagcgcaaagcggctcgcacgaggcgcgttacgccactattgccagcgccaaaaagcatatcccggaaagtaacctggcggtgatttcggtcaacggtctgtttgccgctcgcgaagcgcgtcaggcgctgcaaaacgatctcaacgtgatgctgttttccgataacgtctcagttgaagatgaactggcgctcaagcagttggcccacgaaaaagggctgctgatgatggggccggactgcggcacggcgattattaacggcgcggcgctctgttttggtaacgccgtgcgtcgcggcaatatcggtattgttggcgcatccggcaccggcagccaggagctgagcgtccgcattcatgaatttggtggcggtgtttcacaactgattggcaccggcgggcgcgacctgagcgagaaaatcggcggcctgatgatgctcgacgccatcgggatgctggaaaacgatccgcaaactgaaattatcgcactgatttcaaaacctcccgcgcctgcggtggcccgcaaagtgctggaacgcgcacgtgcctgccgcaagccggtggtggtctgcttcctcggtcgcgttgaaacgccggtggatgagcaggggctacagtttgcccgcggcagcaaagaggcggcgctaaaagcggtgatgctctccggcgtgaaacaggaaaatctcgacctgcatacgcttaaccagccgttgattgctgatgtgcgtgcgcgtctgcaaccgcagcagaaatacattcgtggcctgttctgcggcggcacgctgtgcgacgaaaccatgttcgcggtgatggaaaaacatggcgatgtctacagcaacattcagcccgatccggaattccgcctgcaagatatcaaccgcagcatcaaacacaccttcctcgactttggcgatgacgacttcacgaacggcaagccgcatccaatgattgaccccaccaaccgcatcagtcgcttgatcgaagaggcgcgcgatccagaagtggcggtgatcgtgatggattttgtgctcggatttggatcgcatgaagatccggtcggctccaccatcgaggcgatcaaagaagcgaaagcgatcgccgctgccgaaggacgcgagttgatcattctcgcctatgtgctgggtaccgatcttgatacgccatcgttagaacaacaaagccagatgctgcttgatgccggagtgattctggcgagcagcagcaccaataccggattgctggcgcgtgaatttatctgcaaaggggaggaagcctga

SEQ ID NO: 484443 - DNA, 1359 bp, Shigella sonnei
atgagccagtcactgtttagccaaccattgaacgttattaacgtcggcatcgccatgtttagcgatgacctgaaaaagcagcatgtagaagtgactcaactcgactggacgccgccggggcagggcaatatgcaggtggtgcaggcgctggagcgcattatccagtcgcatccggtgctgattggttttgatcaggcgattaacgtggtgccgggcatgacgccgaaaaccattcttcacgccgggccgccgatcacctgggaaaaaatgtgcggcgcgatgaaaggcgcggtcaccggagcgctggtgttcgaaggactggcgaaagatctcgacgaggcggctgaactggcggcctccggggagatcaccttctcgccgtgccacgaacacgactgtgtgggatcgatggcgggcgttacctcggcctcgatgtttatgcacatcgtgaaaaacaaaacctacggcaacatcgcttacaccaatatgagcgagcagatggcgaagattttgcgtatgggtgccaacgatcagagcgtgatcgaccgcctcaactggatgcgcgatgtgcaggggccaatgctgcgcgacgcgatgaaaattatcggtgagatcgatctgcgcttaatgctggcgcaggcgctgcatatgggcgatgagtgccataaccgcaataacgccgggacgacgctgctgattcaggcactgacgccggggatcattcaggcaggctattccgtcgagcaacagcgcgaagtgttcgagtttgtcgccagcagcgactacttctccggcccgacgtggatggcgatgtgtaaagcggcgatggatgcggcgcacggcatcgaatacagcaccgtggtcaccaccatggcgcgtaacggcgtcgagttcggcctgcgggtcagcggcctgccggggcaatggtttaccggcccggcgcagcaggtgatcggcccgatgtttgccggttataagccggaagattcggggctggatatcggcgacagcgccatcaccgaaacctacggtattggtggatttgctatggcgaccgcgcctgcaatcgtcgcgctggtgggcggcacggtggaagaggctatcgatttctcccgtcagatgcgtgaaatcactctcggtgaaaaccccaacgtcaccattccgctgctcggttttatgggcgtgccgtcggcaatcgacatcacccgcgtgggtagcagcggcattctgccggtgatcaacaccgccatcgcccataaagatgcgggcgtcggcatgattggcgcgggcattgtgcatccaccattcgcttgcttcgagaaagccattctcggctggtgcgaacgttacggcgtctga

SEQ ID NO: 484444 - DNA, 951 bp, Shigella sonnei
atgaaagagcttgtggtcgttgccattggtggcaacagcattatcaaagataacgccagccagtcgattgagcatcaggcggaggcggtgaaagccgtggccgatatggtgctggaaatgctggcttccgattacgacattgtgctgacccacggtaacgggccgcaggtcgggctggatttacgccgtgcggagattgcccacgagcgcgaagggctgcccttaacgccgctggcgaactgtgtggcagatacgcagggcggcatcggctatctgatccaacaggcgctgaataaccgactggcgcgtcacggcgagaaaaaagccgtcaccgtggtaactcaggtggaagtggataaaaacgatccaggttttgcccatcccaccaagcccattggtgcattcttcagtgaaagccagcgtgacaaactacaaaaggcaaaccctgactggtgttttgttgaagatgccggacggggctatcgccgcgtggtcgcctcgccggaaccgaaacgtattgtcgaagcacccgccattaaggcgctgatccaacaaggttttgtcgtaattggcgcgggcggcggtggaattccggtagtgcgtactgaagcgggggattaccaaagcgtggacgcggttattgacaaagatctctctaccgcgctgctggcccgtgaaattcacgccgacattctggtgatcaccaccgacgtcgaaaaagtctgtatccactttggtaaaccgcagcagcaggcgctggatcgggtggatattgccaccatgactcgctatatgcaggaagggcatttttctcccggcagcatgttgccaaaaatcatcgccagcctgacgttcctggagcagggcggcaaagaagtgattatcaccacgccggaatgcctgcctgcggcgctgcgcggtgaaacgggcacccatattattaaaacgtaa

SEQ ID NO: 484445 - DNA, 1383 bp, Shigella sonnei
atgaaagaaagcaatagccgccgtgaatttctgagccagagcggtaagatggtcaccgccgccgcgctgtttggtacctatgtgccgctcgcccatgcggcggtagctggcaccctaaactgcgaagcgaacaacaccatgaaaatcactgacccgcattactatctcgataacgtgctgctggaaaccggttttgactacgaaaacggtgtggcggtgcagacccgcacggcgcgccagaccgtggagattcaggacggcaaaattgtcgccctgcgcgagaacaagcagcatccggacgccacgctgccgcactatgacgctggcggtaagttgatgctacccaccactcgcgacatgcatattcatctcgacaaaaccttctacggcgggccgtggcgctcgctcaatcgtccggcaggcaccactatccaggacatgatcaaactcaagcagaaaatgctgccggagttacaaccgtatacgcaggagcgggcggaaaaactgatcgatctattgcagtcgaaaggcaccaccattgcccgcagccactgcaatatcgaaccggtttccggcctaaaaaatctgcaaaatttgcaggcggtgctggcgcggcgtcaggcgggcttcgagtgtgaaatcgtcgccttcccgcagcacggtttgctgctgtcgaaatcggaacccttaatgcgcgaagcgatgcaggcgggtgcgcattacgtcggcgggctggacccgaccagtgtcgatggcgcgatggaaaaatccctcgacaccatgtttcagattgcgctggactacgacaaaggtgtcgatattcacctgcacgaaaccactccgtcgggcgtggcagccatcaattatatggttgaaacggtagagaaaacgccgcaactgaaaggtaagctgaccatcagccacgcctttgcgctggctacgctcaacgaacaacaggtcgatgcgctggcgaatcggatggcggcgcagcaaatttctatcgcctcgacggtgccgattggcacgctgcatatgccgctcaaacagttgcacgacaaaggcgtaaaagtgatgactggcactgacagcgttatcgaccactggtcgccttatggtctgggcgacatgctggaaaaagccaatctctacgcgcagctctatattcgtcctaacgaacagaacctctcccgttcgctgtttctagccactggcgatgtattgccgctgaatgaaaaaggcgagcgtgtatggccaaaagcgcaggatgatgccagctttgtgctggtggacgcctcctgttccgccgaggcggtggcgcgtatctcgccgagaaccgcaacgttccataaagggcaactggtgtgggggagtgtggcaggttga

SEQ ID NO: 484446 - DNA, 1050 bp, Shigella sonnei
atgaagatcaaagctgttggtgcatattccgctaaacaaccacttgaaccgatggatatcacacggcgtgaaccgggaccgaatgatgtcaaaatcgaaatcgcttactgtggcgtctgccattccgatctccaccaggtccgttccgagtgggcggggacggtttacccctgcgtaccgggtcatgaaattgtggggcgtgtggtagccgttggtgatcaggtagaaaaacatgcgccgggcgatctggtcggtgtcggctgcattgtcgacagttgtaaacattgcgaagagtgtgaggacgggctggaaaactactgtgatcacatgatcggcacctataactcgccgacgccggacgaaccgggccatactctgggcggctactcacaacagatcgtcgttcatgagcgatatgttctgcgtattcgtcacccgcaagagcagctggcggcggtggctcctttgttgtgtgcagggatcaccacgtactcgccgctacgtcactggcaggccgggccgggtaaaaaagtgggcgtggtcggcatcggcggtctgggacatatggggattaagctggcccacgcgatgggggcacatgtggtggcatttaccacttctgaggcaaaacgcgaagcggaaaaagccctgggggccgatgaagttgttaactcacgcaatgccgatgagatggcggctcatctgaagagtttcgatttcattttgaatacagtagctgcgccacataatctcgacgattttaccaccttgctgaagcgtgatggcaccatgacgctggttggtgcgcctgcgacaccgcataaatcgccggaagttttcaacctgatcatgaaacgccgtgcgatagccgattctatgattggcggcattccagaaactcaggagatgctcgatttttgcgccgaacatggcatcgtggctgatatagagatgattcgggccgatcaaattaatgaagcctatgagcgaatgctgcgtggtgatgtgaaatatcgttttgttatcgataatcgcacactaacagattga

SEQ ID NO: 484447 - DNA, 759 bp, Shigella sonnei
atgtctgtcatggaactgcgcgacctgctgattgcgctggaaagtcgtctgcatcaaaagcataaactgaatgctgctgcacgccttcagtatgagcaagctcgcaataaagtcattaagaaaatggcagaaaacatcccagaaattctggttgatgagcttaaaaatgccgatattaatcgtcgggttaacacgctggaacttaccgataatcaaggcgaaaatcttaccttcgtattaacgctacatgacggtagcaaatgtgagttagtcgtcaatgagttgcagattgaaatgctggcgcgagcaatcattcatgcaattaataatgcggaaatgcgtgaactggcattacgtattacctcactgttagatttcctgccgttatacgacgttgactgccaggacaatggcaatctggaatatgacacctattcccaaccggaatggaaacataacctgttcgaccattatctggcggtgctttaccgctttaaagatgaaagtggcaaagaacaatttagcggcacagtggtgaaaacgcgtgaagcaacgccgggtaaagaaatagaggcgatcactcgccgaatgcttgatttcagcccacgactgaaaaaactcgcgggtgtgccatgtcaggtctatgttcgcaccgtagcggcgaataacgcccaaccgctaacccaggatcaatgcttacgcgcgctgcatcacttacgtgttcaatccaccagcaaaactgcaccacaggcgaaataa

SEQ ID NO: 484448 - DNA, 354 bp, Shigella sonnei; identical to SEQ ID NO: 459006

SEQ ID NO: 484449 - DNA, 1647 bp, Shigella sonnei
atggcagctaaagacgtaaaattcggtaacgacgctcgtgtgaaaatgctgcgcggcgtaaacgtactggcagatgcagtgaaagttaccctcggtccgaaaggccgtaacgtagttctggataaatctttcggtgcaccgaccatcaccaaagatggtgtttccgttgctcgtgaaatcgaactggaagacaagttcgaaaacatgggtgcgcagatggtgaaagaagttgcctctaaagcgaacgacgctgcaggcgacggtaccaccactgcaactgtactggctcaggctatcatcactgagggtctgaaagctgttgctgcgggcatgaacccgatggacctgaaacgtggtatcgacaaagccgttaccgctgcagttgaagaactgaaagcgctgtccgtaccgtgctctgactctaaagcgattgctcaggttggtaccatctccgctaactccgacgaaaccgtaggtaaactgatcgctgaagcgatggacaaagtcggtaaagaaggcgttatcaccgttgaagacggtaccggtctgcaggacgaactggacgtggttgaaggtatgcagttcgaccgtggctacctgtctccttacttcatcaacaagccggaaactggcgcagtagaactggaaagcccgttcatcctgctggctgacaagaaaatctccaacatccgcgaaatgctgccggttctggaagccgttgccaaagcaggcaaaccgctgctgatcatcgctgaagatgtagaaggcgaagcgctggcaactctggttgttaacaccatgcgtggcatcgtgaaagttgctgcagttaaagctccgggcttcggcgatcgtcgtaaagctatgctgcaggatatcgcaaccctgactggcggtaccgtgatctctgaagagatcggtatggaactggaaaaagcaaccctggaagacctgggtcaggctaaacgtgttgtgatcaacaaagacaccaccactatcatcgatggcgtgggtgaagaagctgcaatccagggccgtgttgctcagatccgtcagcagattgaagaagcaacttctgactacgaccgtgaaaaactgcaggaacgcgtagcgaaactggcaggcggcgttgcagttatcaaagtaggtgctgctaccgaagttgaaatgaaagagaaaaaagcacgcgttgaagacgccctgcacgcgacccgtgctgcggtagaagaaggcgtggttgctggtggtggtgttgcgctgatccgcgtagcgtctaaactggctgacctgcgtggtcagaacgaagaccagaacgtgggtatcaaagttgcactgcgtgcaatggaagctccgctgcgtcagatcgtcctgaactgcggcgaagaaccgtctgttgttgctaacaccgttaaaggcggcgacggcaactacggttacaacgcagcaaccgaagaatacggcaacatgatcgacatgggtatcctggacccaaccaaagtaacccgttctgctctgcagtacgcggcttctgtggctggcctgatgatcaccaccgagtgcatggttaccgacctgccgaaaaatgatgcagctgacttaggcgctgctggcggtatgggcggcatgggtggcatgggcggcatgatgtaa

SEQ ID NO: 484450 - DNA, 294 bp, Shigella sonnei; identical to SEQ ID NO: 2204

SEQ ID NO: 484451 - DNA, 1257 bp, Shigella sonnei
atgagtggactcaaacaagaactggggctggcccagggcattggcctgctatcgacgtcattattaggcaccggcgtgtttgccgttcctgcgttagctgcacaggtagcaggcaataacagcctgtgggcgtggcccgttttgattatcttagtgttcccgattgcgattgtgtttgcgattctgggtcgccactatcccagcgcaggcggtgtcgcgcacttcgtcggtatggcgtttggttcgcggcttgagcgagtcaccggctggttgtttttatcggtcattcccgtgggtttgcctgccgcgctacaaattgccgccgggttcggccaggcaatgtttggctggcatagctggcaactgttgttggcagaactcggtacgctggcgctggtgtggtatatcggtactcgcggtgccagttccagtgctaatctacaaaccgttattgccggacttatcgtcgcgctgattgtcgctatctggtgggcgggcgatatcaaacctgcgaatatccccttcccggcacctggtaatatcgaacttaccgggttatttgctgcgttatcagtgatgttctggtgttttgtcggtctggaagcatttgcccatcttgcctcggaatttaaaaatccagagcgtgattttcctcgcgcattgatgattggtctgctgctggcaggattagtctactggggctgtacggtagtcgtcttacacttcgacgcctatggtgaacaaatggccgcggcagcatcgcttccaaaaattgtagtgcaactgttcggtgtaggagcgttatggattgcctgcgtaattggctatctgacctgctttgccagtctcaacatttatatacagagcttcgcccgcctggtctggtcgcaggcgcaacataatcctgaccactacctggcacgcctctcttctcgccatatcccgaataatgccctcaatgcggtgctcggctgctgcgtggtgagcactttggtgattcatgctttagagatcaatctggacgctcttattatttatgccaatggcatctttattatgatttatctgttatgcatgctggcaggctgtaaattattgcaaggacgttatcgactactggcggtggttggcgggctgttatgcgttctgttactggcaatggtcggctggaaaagtctctatgcgctgattatgctggcggggttatggctgtttctgccaaaacgaaaaacgccggaaaatggcataaccacataa

SEQ ID NO: 484452 - DNA, 471 bp, Shigella sonnei
ttgcgctggttaccttttattgccattttcctttatgtctatattgagatttcaatctttattcaggttgcccatgtattgggggtattgctgaccctcgtgctggttatattcacgtcagttatcggtatgtcactggtacgtaaccagggctttaagaatttcgtgctgatgcagcaaaaaatggcggcgggtgaaaaccctgcggcggagatgattaaaagtgtttcgctgattattgccggtttgctgcttttattaccgggctttttcaccgacttcctcggtcttctgcttttattgccgccggtgcaaaagcatctgacagtgaagttgatgccacatttgcgcttttctcgcatgccaggcggcggttttagcgccgggaccggtggcggtaatacttttgatggtgagtaccagcgaaaggatgatgaccgcgaccgccttgatcataaagacgatcgctag

SEQ ID NO: 484453 - DNA, 1437 bp, Shigella sonnei
atgtcaaacaacattcgtatcgaagaagatctgttgggtaccagggaagttccagctgatgcctactatggtgttcacactctgagagcgattgaaaacttctatatcagcaacaacaaaatcagtgatattcctgaatttgttcgcggtatggtaatggttaaaaaagccgcagctatggcaaacaaagagctgcaaaccattcctaaaagtgtagcgaatgccatcattgccgcatgtgatgaagtcctgaacaacggaaaatgcatggatcagttcccggtagacgtctaccagggcggcgcaggtacttccgtaaacatgaacaccaacgaagtgctggccaatatcggtctggaactgatgggtcaccagaaaggtgaatatcagtacctgaacccgaacgaccatgttaacaaatgtcagtccactaacgacgcctacccgaccggtttccgtatcgcagtttactcttccctgattaagctggtagatgcgattaaccaactgcgtgaaggctttgaacgtaaagctgtcgaattccaggacatcctgaaaatgggtcgtacccagctgcaggacgcagtaccgatgaccctcggtcaggaattccgcgctttcagcatcctgctgaaagaagaagtgaaaaacatccaacgtaccgctgaactgctgctggaagttaaccttggcgcaacagcaatcggtactggtctgaacacgccgaaagagtactctccgctggcagtgaaaaaactggctgaagtcactggcttcccatgcgtaccggctgaagacctgatcgaagcgacctctgactgcggcgcttatgttatggttcacggcgcgctgaaacgcctggctgtgaagatgtccaaaatctgtaacgacctgcgcttgctctcttctggtccacgtgccggcctgaacgagatcaacctgccggaactgcaggcgggctcttccatcatgccagctaaagtaaacccggttgttccggaagtggttaaccaggtatgcttcaaagtcatcggtaacgacaccactgttaccatggcagcagaagcaggtcagctgcagttgaacgttatggagccggtcattggccaggctatgttcgaatccgttcacattctgaccaacgcttgctacaacctgctggaaaaatgcattaacggcatcactgctaacaaagaagtgtgcgaaggttacgtttacaactctatcggtatcgttacttacctgaacccgttcatcggtcaccacaacggtgacatcgtgggtaaaatctgtgccgaaaccggtaagagtgtacgtgaagtcgttctggaacgcggtctgttgactgaagcggaacttgacgatattttctccgtacagaatctgatgcacccggcttacaaagcaaaacgctatactgatgaaagcgaacagtaa

SEQ ID NO: 484454 - DNA, 1302 bp, Shigella sonnei
atgctagttgtagaactcatcatagttttgctggcgatcttcttgggcgccagattggggggaataggtattggttttgcaggcggattgggggtgctggttcttgccgctattggcgttaaacccggtaacatcccgttcgatgtcatttccattatcatggcggttatcgccgctatttctgccatgcaggttgctggcggtctggactatctggttcatcagacagaaaagctgctgcgccgtaacccgaaatacatcacaatcctcgcaccgatcgtgacctatttcctgacaatctttgctggtactggcaacatctctctggcgacactgccagttatcgctgaagttgcgaaggaacaaggcgttaaaccttgccgtccgctgtctactgcagtggtatccgcgcagattgcgatcaccgcatcgccaatctcagcggcagtggtttacatgtcttccgtgatggaaggtcatggcatcagctacctccatctgctctccgtggtcatcccgtccaccctgctggcggttctggtgatgtccttcctggtcactatgctgttcaactccaaactctctgacgatccgatttatcgcaagcgtctggaagagggcctggttgaactgcgcggtgaaaagcagattgaaatcaaatccggtgcaaaaacgtccgtctggctgttcctgctgggcgtagttggcgtggttatctatgcaatcatcaacagcccaagcatgggtctggttgaaaaaccgctgatgaacaccaccaacgcaatcctgatcatcatgctcagcgttgcaactctgaccaccgttatctgtaaagtcgataccgacaacatcctcaactccagcaccttcaaagcaggtatgagcgcctgtatttgtatcctgggtgttgcgtggctgggcgatactttcgtttccaacaacatcgactggatcaaagataccgctggtgaagtgattcagggtcatccgtggctgctggccgtcatcttcttctttgcttctgctctgctgtactctcaggctgcaaccgcaaaagcactgatgccgatggctctggcactgaacgtttctccgctgaccgctgttgcttctttcgctgcggtgtctggtctgttcattctgccgacctatccgacgctggttgctgcggtacagatggatgacacgggtacaacccgtatcggtaaattcgtcttcaaccatccgttcttcatcccgggtactctgggtgttgccctggccgtttgcttcggcttcgtgctgggtagcttcatgctataa

SEQ ID NO: 484455 - DNA, 339 bp, Shigella sonnei; identical to SEQ ID NO: 473606

SEQ ID NO: 484456 - DNA, 1698 bp, Shigella sonnei
atggctcaacgcatctttacgctgatcctgctactttgcagcacttccgtttttgccggattattcgacgcgccgggacgttcacattttgtccccgcggatcaagcctttgcttttgattttcagcaaaaccaacatgacctgaatctgacctggcagatcaaagacggttactacctctaccgtaaacagatccgcattacgccggaacacgcgaaaattgccgacgtgcagctgccgcaaggcgtctggcatgaagatgagttttacggcaaaagcgagatttaccgcgatcggctgacgcttcccgtaaccatcaaccaggcgagtgcgggagcgacgttaactgtcacctaccagggctgtgctgatgccggtttctgttatccgccagaaaccaaaaccgttccgttaagcgaagtggtcgccaacaacgcagcgtcacagcctgtgtctgttccgcagcaagagcagcacaccgcgcaattgcccttttccgcgctctgggcgttgttgatcggtattggtatcgcctttacgccatgcgtgctgccaatgtacccactgatttctggcatcgtgctgggtggtaaacagcggctctccactgccagagcattgttgctgacctttatttatgtgcaggggatggcactgacttacacggcgctgggtctggtagttgccgccgcagggttacagttccaggcggcgctacagcacccatacgtgctcattggcctcgccatcgtctttaccttgctggcgatgtcaatgtttggcttgtttactctacaactcccctcttcgctgcaaacacatctcacattgatgagcaatcgccaacagggcggctcacctggcggtgtgtttgttatgggggcgattgccggactgatctgttcaccatgcaccaccgcaccgcttagcgcgattctgctgtatatcgcccaaagcgggaacatgtggctgggcggcggcatgctttatctctatgcgttgggcatgggcctgccgctgatgctaattaccgtctttggtaaccgcttgctgccgaaaagcggcccgtggatggaacaagtcaaaaccgcgtttggttttgtgatcctcgcactgccgatcttcctgctggagcgagtgattggtgatatatggggattacgcttgtggtcggcgctgggtgtcgcattctttggctgggcctttatcaccagcctacaggccaaacgcggctggatgcgcgtggtgcaaataatcctgctggcagcggcattggttagcgtgcgcccacttcaggattgggcatttggtgcgacgcataccgcgcaaactcagacgcatctcaactttacacaaatcaaaacggtagatgagttaaatcaggcgctcgttgaagccaaaggcaaaccggtgatgttagatctttatgccgactggtgcgtcgcctgtaaaaagtttgagaaatacaccttcagcgacccgcaggtgcaaaaagcgttagcagacacggtcttacttcaggccaacgtcactgctaacgacgcacaagatgtggcgctgttaaagcatcttaatgtccttggactaccgacaattctcttttttgacggacaaggccaggagcatccacaagcacgcgtcacgggctttatggatgctgaaaccttcagcgcacatttgcgcgatcgccaaccgtga

SEQ ID NO: 484457 - DNA, 576 bp, Shigella sonnei
gtgcaacgtgaagatgtactgggagaagccctgaaattattagaattacaagggattgccaacaccacgctggagatggttgctgaacgtgtggattatccactggacgagctacgccgcttctggccagacaaagaggcaatcctctacgatgcgctgcgttatcttagccaacagatagatgtctggcgtcgtcagctgatgcttgacgaaacgcaaaccgccgaacaaaagctgctggcacgttatcaggcgttatcggagtgcgttaaaaacaaccgctatccgggctgtctatttatcgctgcctgtacgttttatcccgaccctggccaccctattcatcaactggccgatcagcaaaaaagcgcggcctacgatttcacccacgaactgttaaccacgctggaagttgacgatccggcgatggtagcaaagcagatggaactggtgctggaaggctgtttaagccgaatgctggtgaatcgtagccaggcggatgtcgacaccgcacatcggctggcggaagatatcctgcgcttcgcccgctgccgccagggtggtgcactgacctga

SEQ ID NO: 484458 - DNA, 300 bp, Shigella sonnei
atgcaacaacctgtagttcgcgttggcgaatggcttgttactccgtccataaaccaaattagccgcaatgggcgtcaacttacccttgagccgagattaattgatcttctggttttctttgctcaacacagtggcgaagtacttagcagggatgaacttatcgataatgtctggaagagaagtattgtcaccaatcacgttgtgacgcagagtatctcagaactacgtaagtcattaaaagataatgatgaagatagtcctgtctatatcgctactgtaccaaagcgcggctataaatga

SEQ ID NO: 484459 - DNA, 1056 bp, Shigella sonnei
atggtttttttcctgttgtcgttaggtatctgtgtagcactggtagcgttttcaactcttgatacacgtcttcctatgagcaaatcgcgtattttgctcaatccacgcgatattgacattaatatggtaaataaaagttgtaacagctggagttccccgtatcagctctcttacgcgataggcgtgggtgatttggtggcgacatcacttaacaccttctccacctttatggtgcatgacaaaatcaactacaacattgatgaaccgagcagttccggtaaaacattatctattgcctttgttaatcagcgccaataccgtgctcaacaatgctttatgtcggtaaaattagtagacaatgcagatggttcaaccatgctggataaacgttatgtcatcactaacggtaatcagctggcgattcaaaatgatttactggagagtttatcaaaagcgttaaaccaaccgtggccacaacgaatgcaggagacgctccagcaaattttgcctcatcgtggtgcgttattaactaatttttatcaggctcatgattatttactgcatggcgatgacaaatcattgaatcgtgccagtgaattattaggtgagattgttcaatcatccccagaatttacctacgcgagagcagaaaaagcattagttgatatcgtgcgccattctcaacaccctttagatgaaaaacaattagcagcactgaacacagaaatagacaacattgttacactgccggaattgaacaacctgtccattatatatcaaataaaagcggtcagtgctctggtaaaaggtaaaatagatgagtcttaccaggcgataaatactggcattgatcttgaaatgtcctggctaaattatgtgttgcttggcaaggtttatgaaatgaaggggatgaaccgggaagcagctgatgcatatctcaccgcctttaatttacgcccaggggcaaacaccctttactggattgaaaatggtattttccagacttctgttccttatgttgtaccttatctcgacaaatttctcgcttcagaataa

SEQ ID NO: 484460 - DNA, 996 bp, Shigella sonnei
atgagttctgccaagaagatcgggctatttgcctgtaccggtgttgttgccggtaatatgatggggagcggtattgcattattacctgcgaacctagcaagtatcggtggtattgctatctggggttggattatctctattattggtgcaatgtcgctggcgtatgtatatgcccgactggcaacaaaaaacccgcaacaaggtggcccaattgcttatgccggagaaatttctcctgcatttggttttcagacaggtgttctttattaccatgctaactggattggtaacctagcgattggtattaccgctgtatcttatctttccaccttcttcccagtattaaatgatcctgttccggcgggtatcgcctgtattgctatcgtctgggtatttacctttgtaaatatgctcggcggtacctgggtaagccgtttaaccactattggtctggtgctggttcttattcctgtggtgatgactgctattgttggctggcattggtttgatgcggcaacttatgcagctaactggaatactgcggataccactgatggtcatgcgatcattaaaagtattctgctctacctgtgggccttcgtgggtgttgagtccgcagcagtaagtactggtatggttaaaaacccgaaacgtaccgttccgctggcaaccatgctgggtactggtttagcaggtattgtttacatcgctgcgactcaggtgctttccggtatgtatccgtcttctgtaatggcggcttccggtgctccgtttgcaatcagtgcttcaactatcctcggtaactgggctgcgccgctggtttctgcattcaccgcctttgcgtgcctgacttctctgggctcctggatgatgttggtaggccaggcaggtgtacgtgccgctaacgacggtaacttcccgaaagtttatggtgaagtcgacagcaacggtattccgaaaaaaggtctgctgctggctgtaatgccagtcagttaa

SEQ ID NO: 484461 - DNA, 1299 bp, Shigella sonnei
atggctgaaagtactgtaacggcagacagcaaactgacaagtagtgatactcgtcgccgcatttgggcaattgtgggggcctcttcaggtaatctggtcgagtggttcgatttctatgtctactcgttctgttcactctacttcgcccacatcttcttcccttccgggaacacgacgactcaactactacaaacagcaggtgtttttgctgcgggattcctgatgcgcccaataggcggttggctatttggccgcatagccgataaacatggtcgcaaaaaatcgatgctgctatcggtgtgtatgatgtgtttcggctcactggtaatcgcctgtttgcctggttatgaaacaatcggtacgtgggctccggcattattgcttctcgcgcgtttatttcagggattatccgttggcggagaatatggcaccagcgccacctatatgagtgaagttgccgttgaagggcgcaaaggtttttacgcatcatttcagtatgtgacgttgatcggcggacaactgctagccctactggttgtcgtggttttacaacacaccatggaagacgctgcactcagagagtggggatggcgtattcctttcgcgttaggagctgtgttagctgttgtggcgttgtggttacgtcgtcagttagatgaaacttcgcaacaagaaacgcgcgctttaaaagaagctggatctctgaaaggattatggcgcaatcgccgtgcattcatcatggttctcggttttaccgctgcgggctccctttgtttctataccttcactacttatatgcagaagtatctggtaaatactgcgggaatgcatgtcaacgtggcgagtggcattatgactgccgcattgtttgtattcatgcttattcaaccactcattggcgcgctgtcggataagattggtcgccgtacctcaatgttatgtttcggttcgctggcagccatttttaccgttcctattctctcagcattgcaaaacgtttcctcgccttatgccgcttttggtctggtgatgtgtgccctgctgatagtgagtttttatacatcaatcagtggaatactgaaggctgagatgttcccggcacaggttcgcgcattaggcgttggcctgtcatatgcggtcgctaatgctatatttggtggttcggcggagtacgtagcgttgtcgctgaaatcaataggaatggaaacagccttcttctggtatgtgaccttgatggccgtggtggcgtttctggtttctttgatgctacatcgcaaagggaaggggatgcgtctttag

SEQ ID NO: 484462 - DNA, 273 bp, Shigella sonnei; identical to SEQ ID NO: 460524

SEQ ID NO: 484463 - DNA, 1356 bp, Shigella sonnei
atgttgtcaaaatttaagcgtaataaacatcaacaacaccttgcccaactacccaagatttctcaatcagttgatgatgtcgatttcttttacgctcccgccgacttccgggagacgctgctggaaaaaatagccagcgcgaagcagcgcatttgcattgtcgccctgtatctcgaacaggatgacggtggcaaaggcattctgaacgcgttgtatgaagctaaaaggcagcgtccggaactggatgtgcgggtgctggtcgactggcatcgtgcacaacgtggacgcattggcgctgcggcatctaacactaacgctgactggtactgccgcatggcgcaggaaaattcgggcgtagatgttccggtttatggcgttccaatcaatacccgtgaagcccttggtgttctgcactttaaaggctttatcatcgacgatagcgtactttatagcggtgccagcctgaacgatgtttacctgcatcagcacgataaatatcgctacgaccgttatcatcttatccgtaaccgtaagatgtcagacattatgtttgaatgggttacacagaatattatgaatggccgcggcgttaatcgtctggatgatgttaatcggccaaaaagcccggaaatcaagaacgatattcgtctgttccgccaggagctgcgtgatgccgcttatcatttccagggcgatgccgacaacgatcagctttccgtaacgccgctagtggggctggggaaatcgagtctgttgaacaagaccattttccatcttatgccttgtgccgagcagaaactaaccatctgtacgccatacttcaacctgccagcaatccttgtgcgcaatattatccagttgctgcgcgaagggaaaaaggtcgaaattattgttggtgataaaaccgcgaacgacttctacattccggaagatgaacctttcaagataattggcgcattgccttatctctatgagatcaatctgcgtcgtttcctgagccgtttgcagtattacgtcaatactgaccagctagtggttcggttatggaaagatgacgacaacacctatcacctgaaagggatgtgggttgatgataagtggatgttgatcaccggtaataacctgaacccgcgcgcctggcgtctggatctggaaaacgccattttgatccacgatccacaactgaagcttgcgccgcagcgagagaaagaactggagctgatccgcgagcataccaccatcgttaagcactatcgcgatctgcaaagtattgccgattatccggtgaaggttcgtaaactcatccgccgtttgcgccgtatccgcatcgaccgattaattagccgcatcctgtaa

SEQ ID NO: 484464 - DNA, 2661 bp, Shigella sonnei
atgagtcagcgaggactggaagcactactgcgaccaaaatcgatagcggtaattggcgcgtcgatgaaacccaatcgcgcaggttacctgatgatgcgtaacctgctggcgggaagctttaacggaccggtactcccggtgacgccagcctggaaagcggtgttgggtgtgttggcctggccggatattgccagcttgccctttacacccgaccttgcggttttatgtaccaatgccagccgtaatcttgctcttctggaagagctcggcgagaaaggctgtaaaacctgcattattctttccgccccggcatcgcaacacgaagatctccgcgcctgcgccctgcgccataacatgcgcctgcttggaccaaacagtctgggtttactggctccctggcaaggtctgaatgccagcttttcgcctgtgccgattaaacgcggcaagctggcgtttatttcacaatcggcagccgtctccaacaccatcctcgactgggcgcaacagcgtgagatgggcttttcctactttattgcgctcggcgacagcctggatatcgacgttgatgaattgctcgactatctggcgcgcgacagtaaaaccagcgccatcctgctctatctcgaacagttaagcgacgcgcgacgctttgtttcggcagcccgtagtgcctcgcgtaataaaccgattctggtgattaaaagcggacgtagcccggcggcacagcgactgctcaacacgacggcaggaatggacccggcatgggatgcggctattcagcgtgccggtttgttgcgggtacaggatacccacgaactgttttcggcggtggaaacccttagccatatgcgcccgctgcgtggcgaccggttgatgattatcagcaacggtgctgcgcctgccgcgctggcgctggatgccttatggtcacgcaatggcaagctggcaacgctaagcgaagaaacctgccagaaattgcgcgatgcattgccagaacatgtggcagtctctaaccctctcgatctgcgcgatgacgccagcagcgagcattatgtcaaaacgctggacattctgctccacagccaggattttgatgcgctgatggttattcattcgcccagcgccgctgctcccgcaacagaaagcgcgcaagtattaattgaagcggtaaagcatcatccccgcagcaaatatgtctctttgctgacgaactggtgcggcgagcactcctcgcaagaggcacgacgtttattcagcgaagccgggctgccgacctaccgtaccccggaaggaaccatcactgcttttatgcatatggtggagtaccggcgtaatcagaagcaactacgcgaaacgccgacgttgcccagcaatctgacttccaataccgcagaagcgcatcttctgttgcaacaggcgattgccgaaggggctacgtcgctcgatacccatgaagttcagcccatcctgcaagcgtatggcatgaacacgctccctacctggattgccagcgatagcaccgaagcggtgcatattgccgaacagattggttatccggtggcgctgaaattgcgttcgccggatattccacataaatcggaagttcagggcgtcatgctttacctgcgtacagccaatgaagtccagcaagcggcgaacgctattttcgatcgcgtaaaaatggcctggccacaggcgcgggtccacggcctgttggtgcaaagtatggctaaccgtgctggcgctcaggagttgcgggttgtggttgagcacgatccggttttcgggccgttgatcatgctgggtgaaggcggtgtggagtggcgtcctgaagatcaagccgtcgtcgcactgccgccgctgaacatgaacctggcccgctatctggttattcaggggatcaaaagtaaaaagattcgtgcgcgcagtgcgctacgcccattggatgttgcaggcttgagccagcttctggtgcaggtttccaacttgattgtcgattgcccggaaattcagcgtctggatattcatcctttgctggcttctggcagtgaatttaccgcgctggatgtcacgctggatatctcgccgtttgaaggcgataacgagagtcggctggcagtgcgcccttatccgcatcagctggaagaatgggtagaattgaaaaacggtgaacgctgcttgttccgcccgattttgccagaagatgagccacaacttcagcaattcatttcgcgagtcaccaaagaagatctttattaccgctactttagcgagatcaacgaatttacccatgaagatttagccaacatgacacagatcgactacgatcgggaaatggcgtttgtagcggtacgacgtattgatcaaacggaagagatcctcggcgtcacgcgtgcgatttccgatcctgataacatcgatgccgaatttgctgtgctggttcgctcggatctcaaagggttaggcttaggtcgacgcttaatggaaaagttgattacctatacgcgagatcacggactacaacgtctgaatggtattacgatgccaaacaatcgtggcatggtggcgctagcccgcaagctcgggtttaacgttgatatccagctcgaagaggggatcgttgggcttacgctaaatcttgcccaacgcgaggaatcatga

SEQ ID NO: 484465 - DNA, 699 bp, Shigella sonnei
atgaccgaaaacgctgttctccagttacgcgccgagcgtattgcgcgcgcaacacgtccttttcttgcccgcggtaatcgcgttcatcgctgccaacgctgtcttttgccagagaaattatgtctctgttcgacaattaccccagcacaagcaaaaagtcgcttctgtttgctgatgttcgacaccgagccaatgaagcccagtaataccgggcgtctgattgctgatattttgcctgataccgttgcgtttcaatggtcgcgtaccgaaccctcgcaggatttgctggatctggtacaaaacccggattatcagccaatggtggtctttcccgcctcgtatgctgatgagcaacgggaagtgatcttcacaccacctgccggtaagccaccgctgtttatcatgctcgatggtacctggccggaagctcgcaagatgtttcgtaaaagtccgtatctggataatcttcccgtcatttccgtcgatctttcccggctttctgcctatcgcctgcgtgaagcccaggctgcaggccaatattgtactgccgaggtagccatcgcactgttagatatggccggcgataccggggcggcagcagggttaggcgagcattttacccgctttaaaacacgctatctggcaggaaaaacgcaacatctgggtagcatcacagcagaacagttagaaagcgtttaa

SEQ ID NO: 484466 - DNA, 420 bp, Shigella sonnei; identical to SEQ ID NO: 472456

SEQ ID NO: 484467 - DNA, 1038 bp, Shigella sonnei
atgaacgatgaaatgaaaggtaaaagcggcaaggtcaaagtgatgtatgtccgcagtgatgatgattctgataaacgtacccacaacccgcgtaccgggaaagggggcgggcgtccaggaaaatctcgtgctgacggtggccgtcgccccgcccgcgatgacaaacagagtcagccccgtgaccgcaagtgggaagattcgccgtggcgcacggtttcccgcgcgccgggtgatgagacgccggaaaaggccgatcacggtggcatcagtggtaaaagttttattgatccggaagtgttgcgtcgtcagcgtgcggaagaaacccgcgtctacggcgaaaatgcctgtcaggcactgttccagagccgtccggaagcaattgttcgcgcctggtttatccagagcgtaacgccacgttttaaagaagccttgcgctggatggcggcaaaccgcaaagcgtaccatgtggtggatgaagctgaattgacaaaagcgtcaggcacggaacatcacggcggcgtttgcttcctgatcaaaaagcgtaacggtacaaccgtgcagcagtgggtaagccaggcaggcgcgcaggattgcgttctggcactggaaaatgaatctaacccgcataacctgggtggcatgatgcgcagctgcgcgcacttcggcgtgaaaggtgtcgtggtgcaggatgcggcactgctggagtcgggggcggctatccgtaccgcagaaggcggcgcagagcacgttcagccgattactggcgacaacattgttaacgtgctggatgatttccgtcaggcaggttacaccgtagtgaccacttccagcgagcagggtaaaccgctgttcaaaactagtctgccagcgaaaatggtactggtgctgggtcaggaatatgaagggttaccggatgccgcacgcgatccgaacgatctgcgcgtgaagattgacggtacgggcaacgttgccgggctgaatatctctgtcgcaaccggcgttttgcttggtgaatggtggcgtcagaataaagcctga

SEQ ID NO: 484468 - DNA, 690 bp, Shigella sonnei
atggctaacgaattaacctggcatgacgtgctggctgaagagaagcaacaaccttattttcttaatacccttcagaccgtcgccagcgagcggcagtccggcgtcactatctatccaccacaaaaagatgtctttaacgcgttccgctttaccgagttgggtgacgttaaagtggtgattctcggccaggatccttatcacggaccgggacaggcgcatggtctggcattttccgttcgtcccggcattgccattcctccgtcattattgaatatgtataaagagctggaaaatactattccgggcttcacccgccctaatcatggctatctcgaaagctgggcgcgtcagggcgttctgctgctcaatactgtgttgacggttcgcgcaggtcaggcgcattcccacgccagcctcggttgggagacgtttactgataaagtcatcagcctgattaaccagcaccgcgaaggcgtggtgtttttgttgtggggatcacatgcgcaaaagaaaggggcgattatagataagcaacgccatcatgtactgaaagcaccgcatccgtcgccgctttcggcgcatcgtggattctttggctgcaaccattttgtgctggcaaatcagtggctggaacaacgtggcgagacgccgattgactggatgccagtattaccggcagagagtgagtaa

SEQ ID NO: 484469 - DNA, 384 bp, Shigella sonnei; identical to SEQ ID NO: 460517

SEQ ID NO: 484470 - DNA, 588 bp, Shigella sonnei
gtgacaccgacccttttaagtgctttttggacttacaccctgattaccgctatgacgccaggaccgaacaatattctcgcccttagctctgctacgtcgcatggatttcgtcaaagtacccgcgtgctggcagggatgagtctgggatttttgattgtgatgttactgtgtgcgggcatttcattttcactggcagtgattgacccggcagcggtacaccttttgagttgggcgggggcggcatatattgtctggctggcgtggaaaatcgccaccagcccaacaaaggaagacggacttcaggcaaaaccaatcagcttttgggccagctttgctttgcagtttgtgaacgtcaaaatcattttgtacggtgttacggcactgtcgacgtttgttctgccgcaaacacaggcgctaagctgggtagttggcgtcagcgttttgctggcgatgattgggacgtttggcaatgtgtgctgggcgctggcggggcatctgtttcagcgattgtttcgccagtatggtcgccagttaaatatcgtgcttgccctgttactggtctattgcgcggtacgcattttctattaa

SEQ ID NO: 484471 - DNA, 882 bp, Shigella sonnei
atggatctgcgccgttttattacgcttaaaaccgtggtggaagagggttcctttttgcgagcttcgcaaaaattgtgctgtacacaatcgacggtgacttttcatattcagcagcttgagcaggagttttcagtccagttatttgagaaaattggccgacggatgtgccttacccgcgaaggaaaaaagttgctgccgcacatttatgaacttacccgagtgatggatacgcttcgtgaggctgccaaaaaggagtcagatccggacggggaactacgcgttgtttcgggcgaaacgttgctctcttaccgaatgccgcaggtgttgcagcgttttcggcaacgcgcaccaaaagtgcgtttatcgttgcagtcgctgaactgttacgtgatccgtgatgcgctactgaatgatgaggccgatgtcggcgtcttttatcgcgtagggaatgatgatgccctgaaccgacgagagttgggtgaacaatcgctggtgctggtggcttcaccacaaattgtagatgtcgattttactgagccgggaagacataacgcctgtagctttattatcaatgaaccacaatgtgtcttccggcagatatttgagagcacgctgcgtcagcggcggatcacggtggaaaacaccattgagcttataagtatcgaaagcatcaagcgttgtgtcgcggcgaatatcggagtcagctacctgccgcgttttgcggtggcaaaagagttggagtgcggagaattaattgaattgccttttggcgaacagtcgcagaccattacggccatgtgcgcacaccatgctggaaaagcggttagcccggcgatgcacacttttattcagtgtgttgaagagagttttgtggctggataa

SEQ ID NO: 484472 - DNA, 1335 bp, Shigella sonnei
atgactgtaacgactttttccgaacttgaactcgacgaaagcctgctggaagccctccaggataaaggtttcactcgcccgaccgccattcaggctgccgccattccgcctgcgctcgatggccgtgatgtactcggttctgcgccgacaggcaccggtaaaacggcggcgtatctgctgccagcgttgcagcacctgctcgatttcccacgtaagaaatccggtccgccgcgtattttgatcctcaccccaactcgcgagctggcgatgcaggtggccgatcatgcccgcgaactggcgaaacatacgcatctggatatcgccaccatcaccggcggcgtagcctatatgaaccacgcggaagtgttcagcgaaaatcaggacatcgtggtcgccacgaccggacgtctgctgcaatacataaaagaagagaacttcgattgccgcgcggttgaaacgctgatcctcgacgaagcagaccgtatgctggatatgggcttcgctcaggatatcgaacatattgctggcgaaacgcgctggcgtaaacagaccctgctcttttcggcaacgctggaaggcgatgcgattcaggactttgccgagcgtctgctggaagatccggtggaggtttctgccaatccgtccacccgtgagcgcaaaaaaattcatcagtggtattaccgcgccgatgacctggaacataaaaccgcattgctggtgcatctgttaaaacagccggaagcgacccgctcaattgtgtttgtgcgtaagcgtgaacgtgtgcatgagctggcaaactggctgcgcgaagcgggcatcaacaactgctatctcgaaggtgagatggtacaaggcaagcgtaacgaagcgatcaagcgtttgaccgaaggtcgcgtaaacgtactggttgcaaccgatgttgccgcgcgcggtatcgacattcctgacgtcagccacgtctttaacttcgatatgccgcgcagtggcgatacttatttgcaccgtatcggacgtaccgcgcgcgccggtcgtaaaggcaccgcaatttcgctggtggaagcccatgaccatttgctgctgggcaaggttggccgttacattgaagagccgattaaagctcgcgttattgatgagttacgcccgaaaacgcgtgcgccaagcgagaagcagaccggcaagccatcgaagaaagtactggcaaaacgcgccgagaagaaaaaagctaaagagaaagagaaaccgcgggtgaaaaaacgccatcgcgacaccaaaaatattggtaagcgccgtaaaccaagcggaacgggcgtgccaccgcaaacgacagaagagtaa

SEQ ID NO: 484473 - DNA, 738 bp, Shigella sonnei
atgtcacagtctacatccgtgcttcgtcgtaatggatttacttttaaacagttttttgttgctcacgatcgctgtgcgatgaaagtgggaacggatggcattttgctgggcgcatgggcaccggtggctggggtgaaacgttgccttgatatcggcgcgggtagcgggttgctggcactgatgctggcgcagcgaaccagtgacagcgtgataattgatgccgttgagctggaaagtgaagctgccgcgcaggcgcaggaaaatatcaaccagtccccgtgggcagagcggattaacgtccatacggcggatattcagcagtggctcacacagcagacagtacgcttcgatttaatcatcagtaacccaccttactatcagcagggagtagagtgcgcgacacctcaacgggaacaggctcgctataccactacgcttgatcacccatcgctgctgacctgtgcggcggagtgcattaccgaagagggatttttctgcgtggtgctgccagagcaggttggtaatggttttactgaactggcattaagcatgggctggcatttacgtttgcggacggatgtggcggaaaacgaagcgcgactgccgcatcgggtgctgctggcattctccccgcaggcgggagaatgctttagcgatcgcttagtcattcgtgggccagaccagaactattccgaagcgtatacggcgctgacccaggctttttatctgtttatgtaa

SEQ ID NO: 484474 - DNA, 942 bp, Shigella sonnei
ttgccagtacacctcagtcgggttgccaatctcgaatttaatcagttcccccctaccgcactgtatcacccacaggcacgcaatttcctgttaacggaagcactgcgcggcgaaggcgcttatctcaagcgcccggatggcacgcgttttatgcccgattttgatgagcgcggcgaactggccccgcgcgatattgtcgcccgcgccattgaccatgaaatgaaacgcctcggcgcagattgtatgttcctcgacatcagccataagcccgccgattttattcgccagcatttcccgatgatttatgaaaaattgctcgggctggggattgatctcacacaagaaccggtaccgattgtgcctgctgcacactatacctgcggtggtgtaatggttgatgatcatgggcgtacggacgtcgagggcttgtatgccattggcgaggtgagttataccggcttacacggcgctaaccgcatggcctcgaattcattgctggagtgtctggtctatggctggtcggcggcagaagatatcaccagacgtatgcctgatgcccacggcgtcagtacgttaccaccgtgggatgaaagccgcgttgagaaccctgacgaacgggtagtaattcagcataactggcacgagctacggctgtttatgtgggattacgtcggcattgtgcgcacaacaaaacgtcttgagcgcgccctgcggcgtatcaatatgttgcaacaggaaatagacgaatattacgcccacttccgcgtgtcgaataatttgctggagctgcgtaatctggtacaggttgccgagttgattgttcgctgtgctatgatgcgcaaggagagtcgtggcctgcattttacgctggattacccggaactgctcacgcattccggtccatcgatccttccccccggcaatcattacataaacagataa

SEQ ID NO: 484475 - DNA, 1536 bp, Shigella sonnei
atggctacatcagtacagacaggtaaagctaagcagctcacattactcggcttttttgccataacggcatcgatggtaatggctgtttatgaataccctaccttcgcaacatcgggcttttcattagtcttcttcctgctattaggcgggattttatggtttattcccgtgggactttgtgctgcggaaatggccaccgtcgacggctgggaagaaggtggtgtcttcgcctgggtatcaaatactctggggccgagatggggatttgcagcgatctcatttggctatctgcaaatcgccattggttttattccgatgctctatttcgtgttaggggcactctcctacatcctgaaatggccagcgctgaatgaagaccccattaccaaaactattgcagcactcatcattctttgggcgctggcattaacgcagtttggtggcacgaaatacacggcacgaattgctaaagttggcttcttcgccggtatcctgttacctgcatttattttgatcgcattagcggctatttatctgcactccggtgcccccgttgctatcgaaatggattcaaagaccttcttccctgacttctctaaagtgggcaccctggttgtatttgttgccttcattttgagttatatgggcgtagaagcatccgcaacccacgtcaatgaaatgagcaacccagggcgcgactatccgttggctatgttactgctgatggtagcggcaatctgcttaagctctgttggtggtttgtctattgcgatggtcattccgggtaatgaaatcaacctctccgcaggggtaatgcaaacctttaccgttctgatgtcccatgtggcaccggaaattgagtggacggttcgcgtgatctccgcactgctgttgctgggtgttctggcggaaatcgcctcctggattgttggtccttctcgcgggatgtatgtcacagcgcagaaaaacctgctgccagcggcattcgctaaaatgaacaaaaatggcgtaccggtaacgctggtcatttcacagctggtgattacttctatcgcgttgatcatcctcaccaataccggtggcggtaacaacatgtccttcctgatcgcactggcgctgacggtggtgatttatctgtgtgcttatttcatgctgtttattggctacattgtgttggttcttaaacatcctgacttaaaacgcacatttaatatccctggtggtaaaggggtgaaactggtcgtggctattgtcggtctgctgacttcaattatggcgtttattgtttccttcctgccgccggataacatccagggtgactctaccgatatgtatgttgaattactggtcgttagtttcctggtggtacttgccctgccctttattctctatgctgttcatgatcgtaaaggcaaagcgaataccggcgtcactctggagccaatcaacagtcagaacgcaccaaaaggtcacttcttcctgcacccgcgtgcacgttcaccacactatattgtgatgaatgacaagaaacactaa

SEQ ID NO: 484476 - DNA, 1320 bp, Shigella sonnei
atggatatctgctcccgaaacgagaaattagcgattagaagaccagcgatactggttgcactggcacttttactgtgtagttgtaaaagcacgcctccagagtccatggtgacaccaccagcaggttcaaagccaccagccacgacgcaacaatcgtcacaaccgatgcgtggcatctggctggccacggtgtctcgcctcgactggccaccggtttcctcggttaacattagtaaccccaccagccgggcccgtgtacaacaacaggcgatgatcgacaaactggatcatctgcaacgtctcggtataaacacggtctttttccaggttaagccggacggtaccgccctgtggccatcgaaaattttgccatggtccgatcttatgaccggtaagattggtgaaaatccgggttacgatccgctgcaatttatgctcgacgaagcccacaagcgtgggatgaaagtacacgcctggtttaacccctatcgcgtatcggttaatacgaagcccggtactatcagggaactgaatagcactctgtctcaacaaccggcgagcgtctatgtgcaacaccgtgactggatcagaacgtctggcgatcgctttgtcctcgacccgggcatccctgaggttcaggactggatcacatcaatagtcgcagaagtggtttcccgctatccggtagatggcgtgcagtttgacgactatttctatactgagtcaccgggttcacggctaaatgataacgaaacgtaccgcaaatacggaggcgcatttgcgtcaaaagcagactggcggcgcaacaatactcagcagttaattgcaaaagtatcgcacaccattaaaagcattaagccgggagtcgaatttggcgttagcccggcaggcgtgtggcgtaaccgatcacacgatccgctcggttccgatacccgaggcgcggcagcctatgacgaatcctacgctgacacccgtcgatgggtggaacaaggattgctggattacattgctccccaaatttactggccgttctcacggagtgccgcgcgttatgacgtgttggcaaaatggtgggcggatgtcgttaaaccgactaggacccgcctgtatatcggtatcgccttctataaagtgggtgaaccttcaaagatagagccagactggatgattaacggcggcgtaccggaactgaaaaagcagctcgatcttaacgatgcggtaccagaaattagcggcaccatcttgttccgtgaggactatctgaataaaccgcagactcaacaagcggtcagctatctgcaaagtcgttggggcagttaa

SEQ ID NO: 484477 - DNA, 1383 bp, Shigella sonnei
atggagatgtattttaaaagaatgaaagatgagtggaccggacttgtcgaacaggcagatccactcattcgtgctaaagccgcggaaattgccgttgcgcatgctcattatctgagtatcgagttttatcgaattgtccgcatcgacccgcatgccgaagaattcttgagtaatgaacaagttgagcggcagttgaaaagtgcgatggaacgctggattattaacgtgctttctgcccaggttgacgatgtcgaaaggctaatacaaatccagcataccgtcgcggaagtgcatgcccgcataggaattccggtagaaattgtcgagatggggtttcgggtgctgaaaaaaatcctctatccggtaatcttctcttcggattattccgccgcagaaaaacttcaggtctatcatttctcgattaacagtattgatatcgcgatggaagtgatgacccgcgcgtttacctttagtgacagtagtgcctcaaaggaagatgaaaattatcgtatcttctcgttactggaaaacgccgaagaagaaaaagaacggcaaatagcctcaatactttcatgggaaatagatattatctataaaatcctgctggattctgatttaggcagtagtttgccattaagccaggctgattttggcctgtggtttaaccataaaggtcgacattattttagtggcattgccgaagtaggccatatctcccgtctcattcaggatttcgacggtattttcaatcaaaccatgcgtaacaccaggaatttgaataacagaagtctgcgggtgaaatttttattacagataagaaataccgtatcgcagattattaccttgctgcgtgaattgtttgaagaagtatcgcgccacgaagtcggtatggatgtactaacgaaattacttaaccgccgtttcctgccgactatcttcaaacgcgaaattgcccatgccaaccggaccggtacaccgctgtcagtgctgattattgacgttgataaattcaaagagatcaacgatacgtggggccataacactggcgatgaaattctgcgtaaagtctctcaggccttttatgacaacgtccacagtagtgattatgtttttcgctacgggggcgatgaatttatcattgttttgactgaagcttctgaaaacgaaacgttacgtaccgcagaacgtattcgcagtcgggtggagaaaaccaaactgaaagccgcaaacggcgaggatattgccctctcactttccatcggtgccgccatgtttaatggtcatcctgactatgagcgcctcattcaaatagccgatgaagctctgtatatcgccaaaagacgaggtagaaaccgtgttgaactctggaaagccagtctttag

SEQ ID NO: 484478 - DNA, 2400 bp, Shigella sonnei
atgaagctaaccgatgcggaaaatgccgccgatggcatttttttccccgcccttgaacaaaatatgatgggcgcggtgttaattaacgaaaatgatgaagtgatgtttttcaaccccgccgcagagaagctctgggggtacaaacgtgaagaagtcattggcaataacattgatatgctgattccgcgggatttgcgtcctgcgcatcctgaatacattcgtcataaccgtgaaggtggtaaagcgcgcgtcgaggggatgagtcgggagctgcagctggagaaaaaagacggcagtaaaatctggacccgttttgcgctatcgaaagtgagcgccgaggggaaagtttattacctggcgctggtacgggatgccagcgtagaaatggcgcaaaaagaacagacccgacaattgattattgccgttgaccatctcgaccgaccggtgattgtcctcgatccggaacgccatattgtgcagtgcaatcgcgcatttaccgaaatgtttggttactgcattagcgaagccagcggtatgcagcccgatacactcctgaacattcctgaattccctgccgataaccgcattcgtttacaacagttgctatggaaaaccgcccgcgatcaggacgaatttctgctgttgacacgcaccggtgaaaaaatctggattaaagcctctatcagcccggtttatgacgtgctcgcgcatctgcagaacctggtaatgaccttctcggatatcaccgaagaacggcagatccgccagcttgaaggcaatattctcgccgccatgtgcagcagcccgccatttcatgaaatgggggaaatcatttgtcgtaacatcgaatctgttctcaacgaatcgcatgtttcgctgttcgcactgcgcaacgggatgccgatacactgggcgtcatcttcgcacggtgcagaagttcaaaatgcgcaaagctggtcagcgaccattcgtcagcgtgatggtgcgcctgcggggatcctgcaaattaaaacctcgtcaggagcagaaaccagcgcctttatcgaacgcgtggcagatatcagccagcatatggccgcgctggcgctggaacaggaaaaaagccgtcagcatattgaacaactcatccaatttgatccgatgaccggtctgccaaatcgcaataacctgcacaattacctcgatgaccttgtcgacaaagccgtctctccggtggtgtatctcatcggtgttgaccatattcaggatgtgattgatagccttggctatgcgtgggccgatcaggcattgctggaagtggtcaatcgctttcgtgaaaaactcaaaccggatcagtatctctgtcgtatcgaaggtacgcagtttgtcctcgtgagcctggaaaacgacgtcagtaacattacccaaatcgccgatgagctacggaatgtggtcagcaagccgataatgattgacgataaaccattcccgctaaccttgagtattggcatcagctacgacgtgggtaaaaaccgcgattacctgctctccactgctcacaatgcaatggattatattcgcaagaatggcggtaacggctggcagttcttcagcccggcgatgaacgaaatggtaaaagagcgtttggttttaggcgcagcgctgaaagaagcgattagcaataaccaactgaaactggtttaccagccgcaaatcttcgcagaaacgggtgaactgtacggcatcgaagcccttgctcgctggcacgatccccagcatggtcatgtacccccttcacggtttattcctctcgcagaagagattggtgaaatcgaaaatattgggcgctgggtcatcgcggaagcttgccgtcagttagcagaatggcgtagccagaatattcatatcccggcgttatccgtgaacttgtcggcgctgcactttcgcagtaatcagctgcctaatcaggtgtctgatgcaatgcaagcctggggtattgacggccaccagctgacggtagaaatcacggaaagcatgatgatggaacacgataccgaaatctttaagcgcattcagatcctgcgcgatatgggcgtgggcttatcggtagatgattttggcacgggcttttccggattatcccgcttagtcagtcttccggtaacggaaatcaaaattgacaaaagttttgtcgatcgttgtctgacggaaaaacgcatccttgccttacttgaagccattaccagcattgggcaaagcctcaatttaaccgtcgtggcggaaggcgtcgaaaccaaagagcaatttgagatgctacgcaagatccactgtcgcgttattcagggatatttcttttcccgccccctacccgccgaggaaattccaggctggatgagcagcgtgttaccgctgaaaatctga

SEQ ID NO: 484479 - DNA, 582 bp, Shigella sonnei
atgtcggataccaccgaactggttgatttagccgtgatcttccctgatctggagatcgaattgaaatacgcctgcgctgataacatcacaggtaaagctatttaccagcaagcgcgttgtctgttacacaaggatgcgattaccgcgctggcgaaaagtatcagtatcgcccagctgtcaggcttacaactggtgatttacgatgcgtatcgcccacaacaagcacaggcgatgttgtggcaagcctgcccagacccgcaatatgttgttgatgtgacggtcggttctaatcacagccgtggcacggcgatcgacctgacgcttcgtgatgagcacgggaacatcctggatatgggcgcagggttcgatgaaatgcacgagcgctcccatgcctatcacccttccgtcccgcccgccgctcagcgcaatcgcctgttgctgaatgcgataatgactggtggcggttttgtcggtatctccagcgaatggtggcacttcgaattaccccaggcagcgagttaccctctgctcgctgatcaattctcttgttttatatcccctggcacacagcacgtcagttaa

SEQ ID NO: 484480 - DNA, 1551 bp, Shigella sonnei
atgaagagatcgatatcgtttcgtcccacattgctcgcgctcgtccttgccacaactttcccggttgcgcacgccgccgtaccgaaagatatgctggtgattggtaaggccgccgatccacaaaccctcgacccggcggtaacaatagataataacgactggacagtgacctacccgtcttatcagcggctggttcagtacaaaacggacggtgataaaggctcaaccgacgttgaaggcgatctggcaagtagctggaaagcgtctgacgatcaaaaagagtggacgttcaccctgaaggacaatgctaaatttgccgatggcacacctgtcactgccgaagcagtaaaactctcttttgagcggttactaaaaatcggccaggggccagcagaagcatttcccaaagatttaaagattgatactcccgacgaacatacggtgaagtttacccttagccaaccattcgcaccgttcctctacacgctagcgaatgacggtgcatccattatcaatccggcggtcttaaaggaacatgcagcggatgatgctcgcggcttcctcgcgcaaaataccgccggttccggaccatttatgctgaaaagcgggcaaaaaggtcagcaattagttctggtgccaaatccgcattaccccggcaataaaccgaactttaagcgagtatcggtaaaaattatcggtgaaagtgcctcccgtcgcctgcagctctcccgtggcgacattgacattgccgatgcgctgccggtggatcaactcaacgccctgaagcaggaaaataaagtcaatgtggcagagtatccgtcactgcgcgttacctatctgtatctgaataacagcaaagcgcctcttaatcaggcggatctgcgtcgggccatttcctggtctaccgattatcagggcatggttaacggcattctgagtggtaacggaaaacagatgcgcggcccgattccggaaggcatgtggggctacgatgcgacggcaatgcaatacaaccatgacgaaacgaaagccaaagccgaatgggataaagtgacgagcaaacccaccagcctgacgtttctctactccgataacgatccgaactgggagcctattgctctggcgacacaatccagtctcaacaagctgggcatcaatgtgaagctggaaaagctggcgaacgccaccatgcgcgacagagtgggtaaaggtgattacgacattgcgattggcaactggagtccggattttgccgacccgtatatgtttatgaattactggtttgagtcagacaaaaaaggtctgccgggtaaccgctcgttctatgaaaacagtgaggtcgataagttactgcgcaatgcgcttgcgaccaccgaccagacgcagcgtacccgggactaccagcaggcacagaaaatcgtcattgatgacgctgcttatgtgtacctgttccagaaaaactaccaactggcgatgaacaaagaggtgaaaggctttgtgttcaatcccatgctggaacaggtcttcaatatcaataccatgagtaaataa

SEQ ID NO: 484481 - DNA, 1023 bp, Shigella sonnei
gtgaccttctggagtattttacgccaacgctgctgggggctggtgctcgtggtggcgggcgtctgcgtgattacgtttattatctcgcatctgatccctggcgatccggcgcggttactggcgggtgaccgcgccagcgatgctatcgtggaaaatattcgccagcaactgggactggaccagccactgtatgtacagttttaccgctacttcagcgacctgtttcatggtgacctgggaacatccattcgtaccgggcgtccggtgctggaagagttgcgtatatttttcccggcgacgctggaactggctttttgtgccctgctgctggcactcctgattggcatcccgctgggcatactctctgcagtctggcgaaatcgctggctggatcatctggtgcgaataatggccattaccggaatctccacacctgcgttctggcttggactgggcgtcattgtgctgttttatggtcatctgcaaattcttcccggcggcggaaggcttgatgactggctggatccaccaacgcacgttaccggcttttatctgctcgatgcgctgcttgaaggcaacggtgaagtcttcttcaatgcgttgcaacatctcatcttaccggcattaacgctggcgttcgttcacctgggaattgtcgctcgccagatccgctcagcgatgctggaacaattgagtgaagactacattcgtaccgcccgggccagcggcttgcccggctggtatatcgttttatgttatgcgctacccaatgcgttgatcccatcgattaccgtattgggtctggcgctgggcgatttgttgtatggcgcagtgctcaccgaaaccgtttttgcctggcccggaatgggtgcatgggtagtaacatcaatacaggcgctcgacttcccggcagtgatgggctttgccgtcgtggtttcatttgcttatgtgctggtcaacctggtggtggatttgctctatttgtggattgatccgcgtatcggacgtggaggtggtgaatga

SEQ ID NO: 484482 - DNA, 897 bp, Shigella sonnei
atgatgctaagcgaggaaacgtccgccgtacgcccacaaaaacaaacgcgatttaacggtgcaaaactggtatggatgctgaaaggcagtccgctcaccgtgaccggcgcagtcatcattgtattaatgctattgatgatgattttttcaccgtggcttgcgacgcatgatcccaacgccattgatttaaccgcccgccttttgccgccttctgcggcgcactggtttggcaccgatgaagtgggacgcgatctgttcagccgcgtactggtcggcagtcagcaatcaattctcgccggattagtcgtggttgccattgcgggtatgattggttcgctactcggatgtctatccggtgtgcttggcggacgcgcagacgccatcatcatgcgcatcatggacattatgctgtcgattccttcgttggtactgacaatggcactggctgccgctctcgggccgagtttatttaacgccatgctggcgattgctattgtgcgaattcccttttatgtgcgcctggcgcgggggcaagcattagttgtacgccagtatacctatgttcaggcggcgaaaacctttggtgcgtcgcgttggcatctgatcagctggcatattttacgtaactccctgccgccgctgatcgtgcaggcatcgctggatatcggtagcgcgattttaatggccgccacgttgggatttattggcctaggtgctcaacaaccgagtgctgaatggggcgcgatggtagctaatggtcgcaactatgtactcgatcagtggtggtatggcgcatttccgggggcagcgattttgcttaccgccgtcgggtttaatctctttggtgatggtattcgcgatctgcttgacccgaaagcaggaggaaagcagtcatga

SEQ ID NO: 484483 - DNA, 987 bp, Shigella sonnei
atgacccaacccgttctggacattcaacagctgcatttgagtttccccggttttaacggttatgttcacgtgctcaacaatgtgtccttgcagattaaccgcggtgaaattgtcggtctggtgggagaatccggctcaggtaaatcagtcaccgcaatgctgattatgcgtctgctaccgacgggcagttattgcgtacatcgggggcagatttcactgctgggagacgatgttcttaacgctcgggagaaacagcttcgtcagtggcgcggcgcacgagtggcgatgatctttcaggaaccgatgaccgccctcaatccgacacgtcgaataggtcttcagatgatggacgtgatccgccatcatcaaccaataagtcgtcgggaagccagagctaaagcgattaccctgctggaagagatgcaaatcccggatgccgtggaagttatgtcgcgctatccgtttgagctttcaggtggtatgcgccagcgggtaatgattgcgctggcattctcctgcgagccgcaattgattattgccgacgaaccgactacggcgctggacgtcacggtacagttgcaggtactgcgtttgcttaaacataaagctcgcgccagtggaactgcggtactgttcatcagccatgatatggccgtggtgtcgcaactgtgcgatagcgtttacgtgatgtatgccggaagcgtaattgaaagcggcgtgacggcagacgttatccatcatccccggcatccgtataccattggtttgctgcaatgcgcaccagaacatggagtaccacgccagccattacccgccattccagggacggtaccaaacctcacccatttgcctgacggctgcgcttttcgcgatcgttgctatgcggcaggtgcacagtgtgaaaacgtcccggcgctgacagcgtgtggtgacaacaaccagcgctgcgcctgttggtatccgcagcaggaggtcataagtatctga

SEQ ID NO: 484484 - DNA, 690 bp, Shigella sonnei
atgcagatggtgtttcaggacccgctctcttcgcttaatccgcgcttatcggtgtggcgcatcatcacagaaccgctctggatagctaagcgtagtagtgaacaacagcggcgagcgttggcaaaggagttggctgtgcaggtgggtattcgtccggagtatctcgaccgcctgcctcatgcgttctccggcgggcagcggcaacgcatcgccattgccattgccagagcactctcttcgcagcctgacgtgattgtgcttgatgagccaacctcggcgctggatatctccgtgcaggcgcagatcctcaatttactggtaacgctacaggaaaatcacgggctgacttatgtgctgatttcacacaatgtctcggtgatacgtcatatgagcgatcgggtggcggtgatgtatctcgggcagattgtagaactgggcgacgcgcagcaggtgctgacggcacctgcacatccatacacccgattattgctggattccctccccgccattgataaaccgctggaggaagaatgggcattatgtaaaacggatctgccgggaaaccgcacgttgccacaaggctgttttttctacgaacgttgccctctggcaacccacggatgtgaagtccggcaatcattagcaataagggaggacggacgtgagctccggtgctggcgggcgctgtag

SEQ ID NO: 484485 - DNA, 432 bp, Shigella sonnei
atgacaatccataagaaaggtcaggcacactgggaaggcgatatcaaacgcgggaagggaacagtatccacccagagtggcgtgctgaaccaacagccgtatggatttaacacgcgttttgaaggcgaaaaaggaaccaaccctgaagaactgattggcgcagcgcatgccgcatgtttctcaatggcgctttcattaatgctgggggaagcgggattcacgccaacatcgattgataccaccgccgatgtgtcgctggataaagtggatgccgattttgcgattacgaaaatcgcactgaagagtgaagttgcggtgccgggtattgatgcctctacctttgacggcatcatccagaaagcaaaagcaggatgcccggtttctcaggtactgaaagcggaaattacgctggattaccagttgaaatcgtaa

SEQ ID NO: 484486 - DNA, 294 bp, Shigella sonnei
ttgcatcaaggggaggtccacgccctgctcggcggcaatggtgccggtaaatcgacgttaatgaagattattgccggtattacccctgctgatagcggtacgctggagattgggggcaacaactacgtcagattaacgccagttcatgctcatcagctgggtatttatctcgttccccaggaaccgctgcttttcccaagcctgtcgataaaagaaaacatcctgtttgggctggcaaaaaaacagctctccatgcagaaaatgaagaacttgctggcggcgctgggctgctag

SEQ ID NO: 484487 - DNA, 1095 bp, Shigella sonnei
atggtggaaatcctccgcggcctgatgcgcgactcgcggattctgatcctcgatgaacctaccgcctcgcttacccctgcggaaaccgaacgcttgtttcgtcgcttgcaagagctgcttgctactggcgtgggtattgtttttatctcgcataagctgccggaaattcgccagattgccgatcgaattagcgtgatgcgcgacggaaccatcgccttaagcggcaaaaccagcgaactgtctaccgatgacattattcaggccatcacgccagtggtacgggaaaaatcgctctctgccagccaaaaattatggctggagttacctggcaaccgcccacaacatgccgccggaacgtcggtgctgacactagaaaatctgaccggcgaaggtttcaggaatgtcagcctgacgctcaatgccggagaaattctgggtctggccgggctggtgggggccggacgcacagaactggccgagacgctctatggtctgcgtactttgcgtggcggacgcattatgctgaatggtaaagagatcaataaattatccactggagaacgtttactgcgcggtctggtttatctgccggaagatcgccagtcatccggactgaatctcgatgcttcgctggcctggaacgtctgcgcccttactcataaccttcgtggattctgggcgaaaaccgcgaaagataatgccaccctggaacgttatcgtcgggcgctgaatattaaatttaaccaaccggaacaagctgcacggacattatccggtggcaaccagcaaaaaatcctgattgccaaatgcctggaagcttcgccgcaagcattgattgtcgatgagccgacgcgcggcgtggatgtctcggcccgtaatgatatctaccagctgttgcgcagcatcgccgcacagaatgtggcagtgctgcttatctcctctgatctggaagagatcgaactgatggcagatcgtgtgtatgtgatgcatcagggcgaaattacccactctgcactgaccgggcgcgatattaatgtcgagactattatgcgcgttgccttcggcgatagtcagcgtcaggaggcgtcatgctga

SEQ ID NO: 484488 - DNA, 309 bp, Shigella sonnei
atgctgaagtttattcagaacaaccgtgaaatcacggcactgctggcggtggtgctgctgtttgtattacccggttttctcgaccgccagtatttaagtgtgcaaacgctgaccatggtttatagcagcgcgcaaatcctgatcctgctggcaatgggcgcgacgctggtaatgcttatgcgcaaagtagtaagcgcgatgatatcttggataatactgagccgtgccagacaaaaatacggcgcagccagtgttgttgtggacgaacaatcatggttatcttcaggcgtgaaaaagtcgccctattaa

SEQ ID NO: 484489 - DNA, 1449 bp, Shigella sonnei
gtgaaaacactaaatcgtcgcgattttcccggtgcacagtatccagaacgtatcattcagtttggtgaaggtaacttcctgcgcgcctttgttgactggcaaatcgatctcctgaatgagcacaccgatctgaattctggcgtggtcgttgttcgtccgattgaaacttcattcccgccgtcactgagcacgcaggatggtctgtataccaccattatccgtggcctgaatgagaagggggaagcggtcagcgacgcgcgtctgattcgctcggttaatcgtgaaatcagcgtctacagtgaatacgatgaattcctgaaactggcgcacaacccggaaatgcgctttgttttctctaacaccaccgaagcggggatcagctaccatgcgggcgataaattcgatgacgcgccagcgataagctatccggcaaaactgacccgtctgctgttcgaacgctttagccatttcaacggtgcgctggataaaggttggatcatcatcccgtgtgagttgatcgactacaatggcgacgcgttgcgtgaactggtgctgcgctatgcgcaagagtgggcactgccagaagcatttattcaatggctggatcaggctaacagcttctgttctacgctggtggaccgtatcgttaccggttatccgcgcgatgaagtggctaaactggaagaagaactgggttatcacgatggtttcctcgacaccgctgaacacttttacctgtttgtgattcaggggccgaaatccttagcgactgagctgcgcctggacaaatatccgctcaacgtgctgattgttgacgatattaaaccgtataaagaacgcaaagtggcaatcctcaacggtgcgcacaccgcgctggtgccggtggcgttccaggcagggctggataccgtaggtgaagcgatgaacgatgctgaaatttgcgcattcgttgaaaaagccatctacgaagaaattattccggtactggatttgcctcgtgatgaactggaatctttcgccagtgcagtcaccgggcgtttccgtaacccgtataagcatcagctgctgtctatcgcgctcaacggtatgaccaagttccgcacccgcatcctgccgcagctgctggcagggcagaaggcaaacggcacacttccggcgcgccttactttcgcattagcggcattgattgcgttctatcgtggtgagcgtaacggagaaacatatccggtacaggacgatgcacactggctggaacgttatcagcaactctggagccagcatcgtgaccatgttatcggtacccaggaactggtagcgattgtgttggcagaaaaagaccactgggagcaggacctgacgcaagtgcctggtctggtcgagcaggttgctaatgacctggatgcgattcttgaaaaagggatgcgcgaagctgtacgtccgttgtgctaa

SEQ ID NO: 484490 - DNA, 951 bp, Shigella sonnei
atgcatgtacaccccatttcaactttccgtttgttccaggaaggtcatctgctacgtaatagcatcgctatttttgcgctaaccacgctgttctattttattggtgcagagttacggctggttcacgaactttctcttttctggccgctgaatggcgtaatggcggggggggttgcccgctatgtctggcttaatcgactgcattactatgcgatcagttatgtggcgatgctggtttatgatgccataaccaccgaatggggactggtttcactggttatcaatttctccaatatgatgtttattgttaccgtcgccttactggtcgtgcgggataagcgtctggggaaaaataagtatgagccagtaagtgccttacggctatttaattactgtctgattgccgcattattatgcgctattgtcggggcgattggttcggtcagtattgatagtctggatttctggcctttgcttgcggactggttcagtgagcaattctcaacgggcgtgttgatcgtgcctctgacggtcatgctgcttgatatcgactatttcaaaagcattaacgataactatggacatgaatgtggcgataaagtgttaagcgtgtttgcccggcatattcagaagattgtcggtgataaggggctggtggcgcgcatgggcggcgaagaatttgctgttgcagtgccgtcggtgaatcctgtcgatggtctgctaatggcggaaaaaatccgtaaaggcgttgaactgcaaccattcacctggcaacaaaaaacgctttatctcacggtaagtattggcgtcggtagtggtcgcgcatcgtaccgaacgctgaccgatgattttaataaattgatggtcgaagccgatacgtgtctgtatcgctcgaagaaagatgggcgcaaccgtaccagcactatgcgttacggtgaggaagttgtctga

SEQ ID NO: 484491 - DNA, 360 bp, Shigella sonnei
atgcagtctctcgatccactcttcgcgcgtttatcccgttcaaaatttcgctctcgctttcgtctgggcatgaaagagcgtcagtattgcctggagaaaggcgcgccagtcatcgaacaacatgcggcggattttgtcgctaaacgtcttgctccggcattaccggctaatgacggtaagcaaacccccatgcgcgggcatccggtgtttatcgctcagcacgccaccgcgacctgctgtcgcggttgtctggctaagtggcataacattccgcagggtgtttcgttaagcgaagaacaacaacgttatatcgtggcggtaatctatcactggctggttgtacagatgaatcagccatga

SEQ ID NO: 484492 - DNA, 927 bp, Shigella sonnei
gtggcagtcgccatggataatgcaattttagaaaacatcttgcggcaagtgcggccgctcattggtcagggtaaagtcgcggattatattccggcgctggctacagtagacggttcccgattgggcattgctatctgtaccgttgacggacagctttttcaggccggagacgcgcaagaacgtttttccattcagtctatttccaaagtgctgagtctcgttgtcgccatgcgtcattactccgaagaggaaatctggcaacgcgtcggcaaagatccgtctggatcaccgttcaattctttagtgcaactggaaatggaacagggtattccgcgtaatccgtttattaatgctggtgcgctggtggtctgcgatatgttgcaagggcgattaagcgcaccacggcaacgtatgctggaagtcgtgcgcggcttaagcggtgtgtctgatatttcatacgatacggtggtagcgcgttccgaatttgaacattccgcgcgaaatgcggctatcgcctggctgatgaagtcgtttggcaatttccatcatgccgtgacaaccgttctgcaaaactactttcattactgcgctctgaaaatgagctgtgtagagctggctcggacgtttgtctttctggctaatcaggggaaagctattcatattgatgaacctgtagtgacgccaatgcaggcgcggcaaattaacgcgctgatggcgaccagtggtatgtaccagaacgcgggggagtttgcctggcgggtgggactaccggcgaaatctggcgttggtggcggtattgtggcgattgttccgcatgaaatggccatcgcagtctggagtccggaactggatgatgcaggtaactcgcttgcgggtatcgccgtccttgaacaattgacgaaacagttagggcgttcggtttattaa

SEQ ID NO: 484493 - DNA, 1389 bp, Shigella sonnei
atgaccattactccggcaactcatgcaatttcaataaatcctgccacgggtgaacaactttctgtgctgccgtgggctggcgctaacgatatcgaaaacgcacttgagctggcggcagcaggctttcgcgactggcgcgagacaaatatagattatcgtgctgaaaaaatgcgtgatatcggtaaggctctgcgcgcccgtagcgaagaaatggcgcaaatgatcacccgcgaaatgggcaaaccaatcaaccaggcgcgcgctgaagtggcgaaatcggcgaatttgtgtgactggtatgcagaacatggtccggcaatgctgaaggcggaacctacactggtggaaaatcagcaggcggttattgagtatcgaccgttggggacgattctggcgattatgccgtggaattttccgttatggcaggtgatgcgtggcgctgttcccatcattcttgcaggtaacggctacttacttaaacatgcgccgaatgtgatgggatgtgctcagctcattgcccaggtgtttaaagatgcgggaatcccgcaaggcgtatatggctggctgaatgccgacaacgacggtgtcagtcagatgattaaagactcgcgcattgctgctgtcacggtgaccggaagtgttcgtgctggagcggctattggcgcacaggctggagcggcactgaaaaaatgcgtactggaactgggcggttcggatccgtttattgtgcttaacgatgccgatctggaactggcggttaaagcggcggtagccggacgttatcagaataccggacaggtatgtgcagcggcaaaacgctttattatcgaagagggaattgcttctgcatttaccgaacgttttgtggcagctgcggcagccttgaaaatgggcgatccccgtgacgaagagaacactctcggaccaatggctcgttttgatttacgtgatgagctgcatcatcaggtagagaaaaccctggcgcagggtgcgcgtttgttactgggcggggaaaagatggctggggcaggtaactactatccgccaacggttctggcgaatgttaccccagaaatgaccgcgtttcgggaagaaatgtttggccccgttgcggcaatcaccgttgcgaaagatgcagaacatgcgctggaactggctaatgatagtgagttcggcctttcagcgaccatttttaccaccgacgaaacacaggccagacagatggcggcacgtctggaatgcggtggggtgtttatcaatggttattgtgccagcgacgcgcgagtggcctttggtggcgtgaaaaagagtggctttggtcgtgagctttcccatttcggcttacacgaattctgtaatatccagacggtgtggaaagaccggatctga

SEQ ID NO: 484494 - DNA, 882 bp, Shigella sonnei
atggatctgacccaactggagatgttcaacgcggttgccgaagctggcagcattacccaggctgcagcaaaagtgcatcgcgtaccgtcgaatctcactacccgtctacgccagctggaaacagaactgggggtagatctgtttattcgcgagaatcagcgtttacgtctctctcctgccgggcataactttttacgctatagccaacaaattctcgcgttagtggatgaagcgcggagcgttatcgctggcgatgagccgcaaggtttattttctcttggttcgctggaaagcaccgcagcagtgcgcattccggccacgctggcggaattcaaccatcgttatcccaaaattcagttttcactttccaccggcccttccggcactatgctggaaggagtgctggagggaaaactgaatgcggcatttattgatgggcccattaaccatactgccattgacgggataccggtataccgcgaggagctgatgatcgtcacgccacaaggtcatgcgccagtaatccgcgccagtcaggttaacggcagtaacatttatgccttccgcaccaattgttcgtatcgtcgccacttcgagagctggtttcatgctgacggtgccgctccgggaactattcacgagatggagtcgtatcacgggatgttggcctgtgtggtcgcaggagcaggcattgcgcttattccacgctctatgctggaaagtatgccggggcatcaccaggttgaagcgtggccgttagctgagcaatggcgttggttaacaacctggctggtctggcgtcgcggtgcgaaaacgcgtccgcttgaggcatttattcaactactggatgtgtctgactcggcaaaacagagttaccaatga

SEQ ID NO: 484495 - DNA, 1116 bp, Shigella sonnei
atggttacgccagtaagcatcagcaattacatatctcttcctgatgattttcccgttcgtaatattgcaccacaggtaaaagaagttttaaaggactttattgatgcgctaagtacaataatatgtgatgaagagtggcgcacgtctttaaacatcaactcagccacaaaaaagatatttaataaccttgataacttatcatatattcagaggacttctttccggggtaacgacacgctatacaatgaaaaggttcagtttaaactcacttatcccgtcaagaatggaagacacaaagaaaatattgaatttcaggtagtaataaatttaagccctatttatttagataattttcgccatgatggagaaattaatattttttgcgctcccaacccaaagcctgtcactatggggcgcgtatttcagaccggcgtcgagcgtgtgctctttctgtttctgaatgattttattgaacaatttccaatgttcaaccctggcgttccgatcaaaatagcgcatacaccacatattgaacccctgcctccggatcaccataccgctgcagattacttacgccagtttgatttgcttgtcctgaattttatctctcgcggtaattttgtcatactcccccgattatggaataactctgaggttcacagatggttcgtcaataaagatcctaacttgatcaccgccattctcgacataacggacagcgaattaaaagaggatttattgcaaagcctgatggattcattaggttctaacaaacatgtactacccgaagtctgcatctgctttttattccttttagcagaacaagaatctcctcattttcaggacttgtttttatttttcgccaatatgttattgcactatcaccaatttatgaatcccaatgaaagtgatttgaatgacgtgttgatgccagcatcattaagtgatgataaaattatcaagcatatggcgcgcaggaccctcgaactgtttgtaaaaaatgaaacaccgccaaaagttactcacgaagacctggtgaaaaacaggcctcgctcccctgtcagaccacctatacccgcaacctccaaaacgccagacctccctgaacgtcattaa

SEQ ID NO: 484496 - DNA, 1191 bp, Shigella sonnei; identical to SEQ ID NO: 461797

SEQ ID NO: 484497 - DNA, 666 bp, Shigella sonnei
atgttagatttgtttaaagcaattggcctggggctggtggtgttgctgccgttagctaacccattaacaactgtcgcgctatttcttggcctggcaggcaacatgaacagtgccgaacgtaatcgtcagtcgttgatggcctcggtgtacgtatttgccatcatgatggtggcgtattacgccgggcaactggtgatggatacatttggcatttcgattcccggtctgcgaattgcaggcggcttaatcgtcgcgtttatcggttttcggatgctctttccgcaacagaaagcgattgattcaccggaggcgaaaagcaagtcggaagagctggaagatgaacccagtgccaatattgcctttgtgccgctagcaatgccaagtaccgctggtccgggaaccatagcgatgattattagctcggcgtccacagtgcgtcagagttcaaccttcgctgattgggtactgatggttgcgccgccgctgatctttttcctggtggcggttattttgtggggaagcctacgcagctccggcgcaattatgcggctggtgggcaagggtggcattgaagcgatctcccgtctgatgggattcctgctggtatgtatgggtgtgcagtttattattaacggcatcctggaaatcattaaaacgtaccattaa

SEQ ID NO: 484498 - DNA, 435 bp, Shigella sonnei
gtgaaaagtaccagcgatctgttcaatgaaattattccattgggtcgcttaatccatatggttaatcagaagaaagatcgtctgcttaacgagtatctgtctccgctggatattaccgcggcacagtttaaggtgctctgctctatccgctgcgcggcgtgtattactccggttgaactgaaaaaagtgttgtcggtcgacctgggagcactgacccgtatgctggatcgcctggtctgtaaaggctgggttgaaaggttgccgaacccgaatgataagcgcggcgtactggtaaaacttaccaccagcggcgcggcaatatgcgaacaatgccatcaattagttggccaggacctgcatcaagaattaacaaaaaacctgacggcggacgaagttgcaacacttgagcatttgcttaagaaagtcctgccgtaa

SEQ ID NO: 484499 - DNA, 384 bp, Shigella sonnei
atgtccagacgcaatactgacgctattaccattcatagcattttggactggatcgaggacaacctggaatcgccactgtcactggagaaagtgtcagagcgttcgggttactccaaatggcacctgcaacggatgtttaaaaaagaaaccggtcattcattaggccaatacatccgcagccgtaagatgacggaaatcgcgcaaaagctgaaggaaagtaacgagccgatactctatctggcagaacgatatggcttcgagtcgcaacaaactctgacccgaaccttcaaaaattactttgatgttccgccgcataaataccggatgaccaatatgcagggcgaatcgcgctttttacatccattaaatcattacaatagctag

SEQ ID NO: 484500 - DNA, 219 bp, Shigella sonnei; identical to SEQ ID NO: 473520

SEQ ID NO: 484501 - DNA, 927 bp, Shigella sonnei
atgacgtttaacgaaatcaataatcaggtgaatttcagcgaaagcctgtgtccatttactaattccggtatcttgtattcgccagaggaagatatcaatgagcgcgaacaaataatgtaccaggcggtacattacgagttagttgccagtgccctggcggtacagactggaaaatcgatcaatcctgaatttaacattggctgtatgatcgccatgtgccccatctatcctctgacgtgtgcacccaacgatatgatgatggccacgaaagcgatgcatcgtcgttactggtttactgatgttcatgctcgtggatattatccgcaacatatgctgaattactttgccaggaaaggattcaacctcgatatcacaccagaagataacgcgattcttgccagtggatgtgtcgactttatcggttttagctactacatgtcttttacgacacaattttctcccgataacccgcaactggattatgttgaaccacgagatttggtcagcaacccttatatcgatacatccgaatggggatggcaaattgatccggcagggctacgttattcactcaactggttctgggatcatttccagttgccgctgtttattgtcgaaaatggatttggtgcggttgaccagagacaagctgacggcacggtgaacgatcactatcgcattgattactttgcttcccatattcgggaaatgaaaaaagccgtagttgaagatggtgttgacttaattggctacaccccgtggggctgcattgacctggtttctgccggaacaggggaaatgaaaaagcgctacggaatgatttatgtcgataaagacaacgaagggaagggaacgctggaacggatacgtaaagcgtcgttttactggtatcgggatctcatcgccaacaatggcgaaaatatttga

SEQ ID NO: 484502 - DNA, 435 bp, Shigella sonnei
atgtcaggatttaaaaaaggttttttatggggtggcgcggtagccgcgcatcagttggaaggtggctggaatgaaggaggaaaaggcatcagtatcgctgatgtgatgactgctggcgctcacggggtgccgcgtgaagtgacagaaggcgttatcgacgggcttaattatcccaatcatgaagcaattgatttttatcatcgctataaaacagatattcagttatttgccgagatgggattcaaatgctttcgaacttccattgcctggacacgaatctttccgcaaggtgacgaacaggagccgaatgaagagggtttacaattttatgatgatctgttcgatgaatgcctgaagcaaggaatggaacctgtggtgacgctttcgcattttgagatgccttatcatctggtgacaaaatatggtggctggtga

SEQ ID NO: 484503 - DNA, 708 bp, Shigella sonnei
atgaatactctccctgaacattcatgtgacgtgttgattattggtagcggcgcagccggactttcactggcgctacgcctggctgaccagcatcaggtcatcgttctaagtaaaggcccggtaacggaaggttcaacattttatgcccagggcggtattgccgccgtgtttgatgaaactgacagcattgactcgcatgtggaagacacattgattgccggggctggtatttgcgatcgccatgcagttgaatttgtcgccagcaatgctcgttcctgtgtgcaatggttaattgaccagggggttttgtttgatacccacgttcaaccgaatggcgaagaaagctaccatctgacccgtgaaggtggacatagtcaccgtcgtattcttcatgccgccgacgccaccggtagagaagtacaatccacgctggtgagcaaggcgcagaaccatccgaatattcgtgtgctggagcgcagcaacgcagttgatctgattgtctctgacaaaattggcctgccgggcacgcgacgggttgtaggcgcgtgggtatggaaccgaaataaagaaacggtggaaacctgccacgcaaaagcagtggtactggcaaccggcggtgcgtcgaaggtgtatcagtacaccaccaatccggatatttcttctggcgatggcattgctatggcgtggcgcgcgggctgtatgaggtag

SEQ ID NO: 484504 - DNA, 576 bp, Shigella sonnei; identical to SEQ ID NO: 472466

SEQ ID NO: 484505 - DNA, 651 bp, Shigella sonnei
atgcagaaagaacaactttccgctttaatggatggcgaaacgctggatagtgagctgcttaacgaactggctcataacccagaaatgcagaaaacctgggaaagctatcacttaatccgtgattcaatgcggggtgatactcccgaggtgctccatttcgatatctcttcacgcgtgatggccgccattgaagaagagccagtacgtcaaccggcgacattgatcccggaagcccagcctgcgccgcatcaatggcacaaaatgccattctggcagaaagtacgtccgtgggcggcacagcttacccaaatgggcgtagcagcatgcgtatcgcttgcagttatcgttggcgtccagcactataatggacaatctgaaacgtcccagcagcccgaaacgccggtatttaatacactgccgatgatgggtaaagccagcccggtaagcctgggagtaccttctgaagcgaccgcaaacaatggtcaacagcagcaggtacaggagcagcgtcgtcgcattaatgcaatgttgcaggattacgaactgcaacgccgactccactctgaacagcttcagtttgagcaggcgcaaacccagcaagccgctgtacaggtgccaggacttcaaactttaggaacgcaatcgcagtaa

SEQ ID NO: 484506 - DNA, 957 bp, Shigella sonnei
atgaagcaactttggtttgccatgtcattagtgacaggtagcctgttattctctgctaacgcctcggccactcccgcgtccggggcgttattacagcagatgaacctggccagtcagtcactgaattacgagctgtcattcatcagcatcaataaacagggtgttgagtctctgcgttatcgacatgcacgcctcgataaccgtcctcttgcacaattgttgcaaatggatggcccgcgccgggaagtggtacagcgcggcaatgaaatcagctattttgaaccgggacttgaaccgttcacgcttaatggcgattacattgttgattctctgccatcgcttatctataccgatttcaaacgcctttctccttactacgactttatctccgtcgggcgcacgcgtattgctgatcgtctttgcgaagtcattcgcgtggttgcccgagatggtacacgctacagctacatcgtgtggatggacactgaatcgaaattaccgatgagggttgatctccttgatcgcgatggtgaaacgctggaacaatttcgcgtgatttcttttaacgtcaatcaggatatcagcagcagtatgcagacgctggcgaaggcaaatttgccgccgttgctttctgttcctgtaggtgaaaaagctaaattcagctggacgccaacctggttgccacagggttttagcgaagtttccagtagtcgacgtccgctaccgacgatggacaacatgcctatcgaatcacgtctctattccgacggattattcagcttctcggtaaacgttaaccgcgctacgccatcgagcaccgatcagatgttgcgcaccggacgcagaaccgtcagtacaagcgtacgtgataacgccgaaatcaccattgtcggtgaactgccgccgcaaacggcgaaacgcattgccgagaatattaagttcggggcagcgcaatga

SEQ ID NO: 484507 - DNA, 480 bp, Shigella sonnei
atgatcaaagagtgggctaccgtcgtctcctggcaaaacgggcaggcgctggtcagttgtgatgttaaagcctcatgcagcagctgcgcttcacgcgccggttgcggtagccgcgtgttgaataaacttggcccgcaaaccacgcataccattgtcgtaccctgtgatgaaccgttagtgccggggcaaaaagtggaattggggatcgccgaaggcagcctgcttagctccgcattactggtttatatgtcgccgctggtgggattattccttatcgcttcgctatttcagctactctttgcttctgacgttgcagcattatgtggtgcgatccttggcggtattggcgggtttctgattgcgcgcggttactcgcgtaagtttgctgcccgggcagaatggcaaccgatcatattaagcgtggcattgccgcctgaccttgtgcgatttgaaacatcttcggaagacgcgagccagtga

SEQ ID NO: 484508 - DNA, 1800 bp, Shigella sonnei
atgaagaatatacgtaacttttcgatcatagctcacattgaccacggtaaatcgacgctgtctgaccgtattatccagatctgcggtggcctgtctgaccgtgaaatggaggcgcaggttctcgattccatggatcttgagcgtgagcgtggcattaccatcaaagcgcaaagcgtgacgctggactacaaagcgtctgacggcgaaacctatcagcttaactttatcgacaccccgggccacgtagacttctcctatgaagtttcccgttcgctggctgcctgtgaaggtgcattgctggtggtcgacgccgggcagggcgtggaagcgcaaaccctggcaaactgctacaccgccatggaaatggatctcgaagtggtgccagtactgaacaagattgacctgccggcagccgatcctgaacgcgtggcggaagaaattgaagatatcgtcggcatcgacgccactgacgcggtgcgctgttcagcgaaaaccggcgttggcgtgcaggacgttctcgaacgtctggtgcgcgacattccgccgccggaaggcgatccggaaggctcgttgcaggcactaattatcgactcatggttcgacaactacctgggcgttgtttcacttatccgtattaaaaacggcaccctgcgtaagggcgacaaagtgaaagtcatgagtaccgggcagacctataacgccgaccgtctgggcatcttcacgccgaaacaggttgaccgcactgaactgaaatgtggcgaagtaggctggctggtatgtgcgattaaagatatccatggcgctccagtcggcgataccttaacgctggcgcgtaatccggcagaaaaggcgctgcctggctttaagaaagtcaaaccgcaggtatacgccggtctgttcccggtaagttccgacgactatgaagccttccgtgacgcgctgggtaaactcagcctgaatgatgcctcactgttctatgagccggaaagctccagcgcgctgggctttggtttccgctgcggcttccttggcctgctgcacatggagatcatccaggaacgtctggaacgtgaatacgatctggatctgatcaccactgcgccgaccgtagtgtatgaagttgaaaccacgtcaagggaagttatctacgtcgacagcccatccaagctgcctgcggtaaataacatttacgaactgcgcgagccgattgcagagtgtcacatgctgctgccgcaggcatatctcggcaacgttattacgctgtgcgtagaaaaacgcggcgtgcagaccaatatggtttaccacggtaatcaggtggcgctgacgtacgagatcccgatggcggaagtggtgctcgacttcttcgatcgcctgaaatctacctcgcgtggttatgcgtctctggattacaacttcaaacgcttccaggcgtccgacatggtacgtgtagacgtattaatcaacggtgaacgtgttgatgcgttggcgctgatcacccaccgtgataattcgcaaaaccgcggtcgcgagttggtggagaagatgaaagatctgatcccacgccagcagtttgatatcgccattcaggcagcgattggtacgcacattattgcgcgatccaccgtgaaacagctgcgtaaaaacgtactggctaaatgttatggcggcgatatcagccgtaagaaaaagctgctgcagaagcagaaagaaggtaagaaacgcatgaagcagatcggtaacgtcgagctgccgcaggaagcgttcctcgccattctgcacgtcggcaaagacaacaaataa

SEQ ID NO: 484509 - DNA, 975 bp, Shigella sonnei
atggcgaatatgtttgccctgattctggtgattgccacactggtgacgggcattttatggtgcgtggataaattctttttcgcacctaaacggcgggaacgtcaggcagcggcgcaggcggctgccggtgactcactggataaagcaacgttgaaaaaggttgcaccgaagcttggctggctggaaaccggagcttctgtttttccggtgctggctatcgtattgattgtacgttcgtttatttatgaaccgttccagatcccgtcaggttcgatgatgccgactctgttaatcggtgattttattctggtagagaagtttgcttatggcattaaagatcctatctaccagaaaacgctgatcgaaaccggtcatccgaaacgcggcgatatcgtggtctttaaatatccggaagatccaaagcttgattacatcaagcgcgcggtgggtttaccgggcgataaagtcacttacgatccggtctcaaaagagctgacgattcaaccgggatgcagttccggccaggcgtgtgaaaacgcgctgccggtcacctactcaaacgtggaaccgagcgatttcgttcagaccttctcacgccgtaatggtggggaagcgaccagcggattctttgaagtgccgaaaaacgaaaccaaagaaaatggaattcgtctttccgagcgtaaagagacactgggtgatgtgacgcaccgaattctgacagtgccgattgcgcaggaccaggtggggatgtattaccagcagccagggcaacaactggcaacctggattgttccgccgggacaatacttcatgatgggcgacaaccgcgacaacagcgcggacagccgttactggggctttgtgcctgaagcgaatctggtcggtcgggcaacggctatctggatgagtttcgataagcaagaaggcgaatggccgacaggtgtgcgcttaagtcgcattggcggcatccattaa

SEQ ID NO: 484510 - DNA, 681 bp, Shigella sonnei; identical to SEQ ID NO: 458698

SEQ ID NO: 484511 - DNA, 906 bp, Shigella sonnei; identical to SEQ ID NO: 458699

SEQ ID NO: 484512 - DNA, 729 bp, Shigella sonnei
atggaaggctggcagcgcgcatttgtcctgcatagtcgcccgtggagcgaaaccagcctgatgctggacgtcttcacggaggaatcgggtcgcgtgcgtctggttgccaaaggcgcacgctctaaacgctctactctgaaaggtgcattacagcctttcacccctctcttgctacgtttcggcgggcgtggcgaagtcaaaacgctgcgcagtgctgaagctgtctcgctggcgctgccattaagcggtatcacgctttacagcggtctgtacatcaacgaacttctctcccgcgtactggaatacgagacgcgcttctctgaactctttttcgattacttgcactgcattcagtctcttgcaggtgccactggtacgccagaacccgcgctgcgccgctttgaactggcactgctcgggcatctgggctatggcgtcaattttacccattgcgcgggtagcggcgagccggtagatgacaccatgacgtatcgttatcgcgaagaaaaagggtttatcgcaagcgtcgttatcgacaataaaacgttcaccggaaggcagttaaaagcgttaaacgcgcgggaatttcctgacgcagacacactacgcgccgcgaaacgctttacccgcatggcgcttaagccgtatcttggcggtaaaccattaaagagcagggaactgttccggcagtttatgcctaagcgaacggtgaaaacacattatgaatga

SEQ ID NO: 484513 - DNA, 732 bp, Shigella sonnei
atggctgaattactgttaggcgtcaacattgaccatattgcaacgctgcgtaacgcacgcggtactgcttacccggatccggtgcaggcggcgtttattgccgagcaggcgggagcggacggcattaccgtgcatttacgtgaagatcgccgccacattactgaccgcgatgtgcgcatcctgcggcagacgctggatacccgaatgaatctggagatggcagtgaccgaagagatgctggcgatcgccgttgagacgaagccacatttttgctgcctggtaccggaaaagcgtcaggaagtaacaaccgaaggcggcctggacgttgcagggcagcgtgaaaaaatgcgcgatgcctgcaaacgtctgacagatgccgggattcagatttctctctttatcgacgccgatgaagagcagatcaaagctgcggcagaggttggcgcaccgtttatcgagatccacaccggttgctatgctgatgccaaaactgacgccgaacaggcgcaagagctggtgcgtatcgccaaagccgcgacctttgccgctagtctcggtctgaaagttaacgccggacacggtctgacctatcacaacgtgaaagccattgccgccatccctgagatgcatgaactgaatatcggtcatgccattattggccgtgcagtgatgaccggactgaaagatgcggtggcagaaatgaagcgtctgatgctggaagcgcgtggctaa

SEQ ID NO: 484514 - DNA, 381 bp, Shigella sonnei; identical to SEQ ID NO: 472476

SEQ ID NO: 484515 - DNA, 186 bp, Shigella sonnei
atgggagatcatatctacgagattaacagcgataagtgtaccgaatgcgtagggcactacgagacaccaacctgccagaaggtgtgcccgatccccaatactattgtgaaagatccggcgcatgtcgagacagaagaacagttgtgggataaatttgtgctgatgcaccacgcggataaaatttaa

SEQ ID NO: 484516 - DNA, 1203 bp, Shigella sonnei
atgccgcgcactgtaacacataatccggatagccccaataatgacgatgttttagccgcatctgaaaaatgggacgcctgtaaacccccctataccagcgcacacatgaaaatctgtgttgctgccgccaaaatcatcctcgctgcttccggcgtggctcgccgttccaaatacgaaaaagagaactatctccgtatcgatttcagcaaagccggtaaggttacattttacgccgagtttccaaaaaagatgggcctcaaaggtaaaaagctcggcgagtggccggagctcgctatccagctggcgcgcgaaaaagcactaggtatggctgacggtggactgcgggcagagtccgtacatgcagcgctggaaatgtaccgggatgacctcaaagccaaagtagcccggcagaagctgagcccggacagtttcacaacctacggggtgcgtatcgaccggattaaagcaacgttcggcgagcgtgaggtgttcagcgacgtaacatacaatcggctggtggaagtgctggacgagtggatcgccactcgctcgaacaataacgccctggagttgtttgccgagctccgtcggttctggaagttctgcgcacctactctttgcaacggccgcaatgttgccgccagtctgccagatgattatgtttcctcccgcgtacagaaacctacccccacacggctttttaccgatattgaatcaatcgcccgactctggctcaatgttgctgcctgcacctctgtacaccagaagaatgctgttcgcttcatgatcatcactggtgttcgtccgattaatgtccataacctgcgctgggactacgtttacgaggaggctggtgaaattgtttatccggaaggggttatcggcatgcgaggggctatgaaaacacaaaaggctttccgcctgccgataacgcctgagatccggcggattatcgacgagcagaaagcctggcgtgattcagttcctgagtgcaacagggattatgtatttttgcagccacgtgatccaatgcagccattttcaaaacgatcactggataagctggtgaaaacatacagcccggacggggctgtaaaaggaataaaacatgatgggactgttaaagggaaagacggtgcatttaatacgatgtgccgtaaattccttaagagcaatgttattgccttgatcgataggaattaa

SEQ ID NO: 484517 - DNA, 360 bp, Shigella sonnei
atgagccgctggcccggatgcggtggtgcggctgagagccgcagagggaaagttgcgtccattttgagggaaacggagcaaaaaaccgccattcataccctgaatcaatcagagccatccagtttaatcgtcggttccgttcatatgagcaaaagtggtgttgaagaaacatccgttttgtggtgtttttttaatctttttggggttttaattcctatcgatcaaggcaataacattgctcttaaggaatttacggcacatcgtattaaatgcaccgtctttccctttaacagtcccatcatgttttattccttttacagccccgtccgggctgtatgttttcaccagcttatccagtga

SEQ ID NO: 484518 - DNA, 1188 bp, Shigella sonnei
atgcttccccgttttgccgatatctttcagcagggaaaccactggcttaactggctggagaagcagccggaaagggcagtacgtccggtggtgattgagtcggtgaccaaaatcatggcgtgcgggaccacactgatggggtatacacagtggtgctgttcatcaccggactgttgccatacaaaaaaggtctgcttccggtgtaaaagccgctcctgcccgcactgcggggtgaaggctggcgcacagtggatacagtatctgctgagcctggtccccgactgcccgtggcagcatattgtgttcacacttccctgccagtactggtccctggtgttccacaaccggtggttactgacagagatgagccgcattgcagcggatgtgatactggaaatctgccatcaggcagatgtggagccggggatattcacggtgatccacacatgggggcgtgaccagcagtggcatccgcatatccatttatcgacaactgccggtggtgtgacgtcgggccacacctggaaaaatcttcatttttacgcccgtaaggtgatgagcatgtggcgctaccggataacacggttgctgtcacggaaataccctgacctggtgatgccggatgcgctggcagcagaaggaagcagtaaacgggaatggaatcgcttcctggacacgcattaccgccgtggctggaatgtcaacgtatcccgggtgatggataatgccccccatgtggcggtgtactttggctcttacctgaaaaagccaccggtgccgatgagtcgtctggagcattatgccggtcaggatgaaatcggtctgcgttacaacagtcaccgaacaaaacgggaagaatacctgttgatgagtggagatgagttcatggaaaggttctcctggcatgtggcggataaggggttccgtatggtgaggtactacggttttttgagtccggcgaaacggcggttactggaagaagtggtgtacatcataacggagacagtgagaaaaacggcgatgcaaatcacctggagagggatgtatcagaggttactgaaggttgacccgctgaagtgcgtgctgtgcgggagtcagatgcgttttacggggctgaagcggggctaccgtctggcagagcaggtcctgatgcatgagccgctggcccggatgcggtggtgcggctga

SEQ ID NO: 484519 - DNA, 297 bp, Shigella sonnei
gtgaagcttcacgaagatgatttttttgacgaagaagacgcagaagttctgcgctttgatagttttgacgatgccgttgaatgctgcgcagacctgaatattccgttctttgtggatgcgggaaacaaaaagctggtcttctggtttgtacgtgttgatgacgaagggtatccggaaatcgcccgctgcacggagcgggaatttgcgaccattctttccggtatcagcgccggcggtatgtactgcccggagtgtggcacggttcactggccggacggagtcgccccgcccttctga

SEQ ID NO: 484520 - DNA, 804 bp, Shigella sonnei
atggctatccctgcatttggtttaggtactttccgtctcaaagacgacgttgttatttcatctgtgaaaacggcgcttgaacttggttatcgcgcaattgatactgcacaaatctatgataacgaagccgcagtaggtcaggcgattgcagaaagtggcgtgccacgtcatgaactctacatcaccactaaaatctggattgaaaatctcagcaaagacaaattgatcccgagtctaaaagagagcctgcaaaaattgcgtaccgattatgttgatctgacgctaatccactggccgtcaccaaacgatgaagtctctgttgaagagtttatgcaggcgctgctggaggccaaaaaacaaggtctgacacgtgagatcggtatttccaacttcacgatcccgttgatggaaaaagcgattgctgctgttggcgctgaaaacatcgctaccaaccagattgaactctctccttatctgcaaaaccgtaaagtggttgcctgggctaaacagcacggtattcatatcacttcctatatgacgctggcttatggtaaggcactgaaagatgaggttattgctcgtattgcagctaaacacaatgcgactccggcacaagtgattctggcgtgggctatgggggaaggttactcagtaattccttcttctactaaacgtaaaaacctggaaagtaatcttaaggcacaaaatttacagcttgatgccgaagataaaaaagcgatcgccgcactggattgcaacgaccgcctggttagcccggaaggtctggctcctgaatgggattaa

SEQ ID NO: 484521 - DNA, 915 bp, Shigella sonnei
atgaaagccacgtcggaagaactcgccatttttgtttcggtcgtcgaaagcggcagctttagccgggcagcggaacaattagggcaagcaaactcagcggtaagccgggcggtgaaaaagctggaaatgaaacttggcgttagcctgcttaatcggaccacgcggcaacttagcctgacggaagaaggcgagcgttattttcgtcgcgtacagtcaattttgcaggagatggcagcggcagaatcagaaattatggagacgcgtaatacaccgcgtggactgttacggatcgatgccgcaactccagtggtgctgcactttctgatgccgttaattaagcctttccgtgaacgctatccggaagtcactttatcgctagtctcctccgaaacgattattaatttgatcgaaagaaaagtggatgtcgcgatacgcgctggtacgttaacggactccagcttacgtgccaggccgttatttaacagttatcgaaaaattatcgcctcccccgattatatttcccgctacgggaagccagaaacgatcgacgatttaaagcaacatgtttgcctgggattcactgaacccgcttccctcaatacctggccgatagcctgtagtgatggacaattacatgaggtgaagtacggtttgtcatccaatagtggggaaacactgaaacagctttgcctgagtggcaacgggattgcgtgtttgtccgactacatgatcgacaaagaaatcgctcgcggagaattggtggagttaatggcagataaagtgttgccagtggaaatgccattcagtgccgtctattacagcgaccgtgcggtaagtacgcgcatccgggcttttatcgatttccttagcgagcatgtaaaaacagctcccggaggagctgtcagagaggcttaa

SEQ ID NO: 484522 - DNA, 780 bp, Shigella sonnei
atgcgctatgttgccggacaacctgcggagaggatcttaccgccggggtcttttgcgagcatcggccaggcattaccacccggagaaccgttaagtaccgaagagcgtattcggatcctggtgtggaacatatacaaacagcaacgcgctgaatggttgtcggtattaaagaattacggcaaagacgcacatctggtgttattgcaggaagcgcaaacaacgccagagttggtacagtttgcgaccgctaactatcttgccgccgatcaggtacccgctttcgtgctgccacaacatccttctggcgtaatgaccctttcggcggcacatccagtgtattgctgcccgttacgtgaacgagaacccattttgcgtctggcgaagtcggcactggtgacggtctatccattacctgacacccgcctgttgatggtggttaatatacacgccgtcaacttcagtctgggcgtggatgtctatagtaagcagttacttcctattggtgatcagatagctcaccacagcggcccggtcattatggcgggagatttcaatgcctggagccgtagaaggatgaacgcgttatatcgctttgcgcgggaaatgtcgctgcgccaggtgcgttttaccgatgatcagcgccgtcgggcgtttggtcgcccgctcgattttgttttctaccgtggtctgaacgtcagtgaagcttctgtactggttacgcgcgcttccgatcacaatccgctactcgttgaattcagtcccggcaagcctgataaataa

SEQ ID NO: 484523 - DNA, 624 bp, Shigella sonnei
atgtcaggtctgccgcagggcagaccaacgtttggcgctgcgcaaaacgtgagcgcggtggtggcgtatgacttatctgcccacatgctggatgtcgtggcacaagctgccgaagcccggcaactgaaaaatatcaccacccgccagggatatgccgcaagtctgccatttgccgataacgcatttgatattgttatcagccgttattctgcccatcactggcatgatgttggtgcagcactgcgagaagtgaataggatattgaaacctggcggtaggctgattgtgatggatgtaatgtctccgggtcacccagtgcgcgacatctggttacaggcggtagaagcattacgcgatacctctcacgtacgaaactacgccagcggtgcgtggttgacgttaatcaatgaagccaatctgatagttgataatttaattacagataagttaccgctggaattttcttcatgggtcgtgagaatgcgtacgccagaagcgttagtagacgctattcgcatttaccaacagagcgcatcgacagaggtgagaacgtatttttccttgcagactgatggctctttcaccagtgatatcatcatggtagaagcacataaagcggcataa

SEQ ID NO: 484524 - DNA, 1221 bp, Shigella sonnei
atggacgatgggacgtctatcgcgccagatggtgacttgtgggctttcattggcgacgagctaaagatgggaattccggaaaatgaccggattcgcgaacagaaacagaaatatttacgcaataagagctatctccacgatgtaactttacgggcagagccgtatatgtactggatagcagggcaagttaaaaaacgtaacatgcctatggaactggtactactacccatagtggagagcgcttttgatcctcacgcaacgtctggcgccaatgccgcaggcatctggcagatcattccgagcacggggcgcaattatggtttgaaacagacccgcaattatgacgcgcgtcgcgatgttgttgcttcaacaactgccgcgctgaatatgatgcagcgtctgaacaaaatgtttgacggcgactggcttctgaccgtagcggcttataacagcggcgaaggtcgggtcatgaaggcaattaaaacgaacaaagcgcgtgggaaatccacggacttctggtcgttaccgttgccgcaggaaacgaagcagtacgtgcctaaaatgctggcattgagtgatattctcaaaaacagcaagcgttatggcgtacgtctgccaacgaccgatgaaagccgtgctctggcgcgtgtgcacctgagtagcccggttgaaatggcgaaggttgcagatatggcggggatttccgtcagcaagctgaagacattcaacgctggcgtgaaaggctccacgctgggcgcaagtgggccgcagtacgtgatggtgccaaagaagcatgcagatcaactgcgtgaatctctcgcttcaggcgaaattgctgctgtacagtcgacgctggttgccgacaatacgccgcttaacagccgtgtttacaccgtacgctctggcgacacgctttcaagcatcgcttcacgtctcggcgtaagcaccaaagatttgcagcagtggaacaaactgcgcggatctaagctgaagccaggccaaagtttgacgattggtgcaggcagtagcgcacagcggttggcaaacaacagcgatagcattacgtatcgtgtgcgcaaaggcgattcgctttcaagcattgctaaacgccacggcgtgaacatcaaagatgtgatgcgctggaacagcgacactgcgaatctgcaaccaggcgataagctgacgttgtttgtgaaaaacaacaacatgccagattcctga

SEQ ID NO: 484525 - DNA, 756 bp, Shigella sonnei
atgaatcttaacagtattcccgcctttgatgacaattacatctgggttttgaatgatgaagcaggtcgctgcctgattgtcgatcccggagacgcagagccagtattaaacgccattgccgccaataactggcaaccggaggccatatttctcacccaccatcatcacgatcacgttggcggcgtaaaagaactggtggaaaagtttccgcaaattgtggtgtatggtccacaagagacacaagataagggaacaacacaggtagtcaaagatggcgaaactgccttcgttttggggcatgaatttagtgtaattgccacaccgggtcacactttaggacatatctgttacttcagtaaaccttatctattttgcggcgacacgctgttttctggtgggtgtggtaggttgtttgaagggacagcatcacaaatgtatcaatcacttaataagttaagtgcgttacctgacgatacattggtatgttgtgctcatgaatatacgttatcaaatatgaagtttgctttgagtattcttccgcacgatttgtccataaatgattattatcgtaaagttaaggagttacgggcaaaaaatcaaataacactacccgtaattctgaaaaatgagcggcaaattaatgtttttttaagaacggaagatattgatttaattaatgtaattaatgaagaaacattattgcaacaacctgaagagcgttttgcatggttaaggtcaaagaaagataggttctga

SEQ ID NO: 484526 - DNA, 723 bp, Shigella sonnei
atgaaaccggcaagagtccctcaaactgtcgtggctcctgatcgctggggcgatttgccctggggagagctttatcgcaaggcgctggagcgccagctcaacccgtggttcactaaaatgtatggttttcatctgcttaagattggcaatttaagcgcagaaatcaattgcgaagcgtgcgcggtttctcatcaagtgaatgtttctgcgcaaggaatgcccgtccaggtgcaggcggatccacttcatcttccttttgccgataaatccgttgatgtttgtctactggcacatacattgccgtggtgcaccgatccgcatcgtttattgcgtgaaaccgatcgggtattgattgatgatggctggctggtgattagtggcttcaatcccattagtttaatgggattacgcaaacttgtgccggtattgcgaaaaacctcgccctataacagccggatgtttactctgatgcggcaactggactggctctctttgttgaattttgaagtgctgcacgccagccgtttccacgttctcccgtggaacaaacacggaggaaaactattgaatgcgcatattcctgcgcttggttgcttacaacttattgttgcccggaaacggactattcctttaacgctaaacccgatgaaacagagtaaaaacaagccacgaattcgccaggcggttggagccacccggcaatgtcgtaaaccacaagcttaa

SEQ ID NO: 484527 - DNA, 468 bp, Shigella sonnei; identical to SEQ ID NO: 460680

SEQ ID NO: 484528 - DNA, 741 bp, Shigella sonnei; identical to SEQ ID NO: 460679

SEQ ID NO: 484529 - DNA, 786 bp, Shigella sonnei
atgaatttaagaagggtttgttgtatatgtgtattattctcgctgcttgcaggatgtgtctctgaatcttctattgatgaaaagaagaaaaaagctcaagtcacacaaagtaatattaataaaaacactccccagcaactgacagacaaagatttattcggtaatgaaaccactctggccgtatccgaagaggatattcaagctgcgcttgatggagatgagttccgcgttccccttaattctcctgtaatacttgttcaatccggcaaccgcgcaccggaaaccattatgcaggaggagatgcgaaaatattatactgtttccacattctctggtatcccggacaggcaaaagcctctgacttgtaacaaaaacaaagataaaaatgagaacgaggatgttgccagtgctgagaatatgaactggatgcaggcactgcgttttgtggctgcaaaagggcatcagaaagcgattattgttttccaggatacgttgcagacaggaaaatatgactctggattgaaatcaatagtttggtcagattataaaaatcaaaaattgactgacacgatgtcactgcgctatctggtacgattcacgctggtggatgtagctacaggtgagtgggctgcctggtcgccggtgaattatgaatataaagtgcttccaccattgcccgacaagaatgaagccagtacgactgatatgacagagcagcaaatcatgcaacttaagcaaaagacctataaagcgatggtaaaagatttggttaaccgctatcaataa

SEQ ID NO: 484530 - DNA, 480 bp, Shigella sonnei
atgcgtttacatgttaaattaaaagagtttctttcgatgttttttatggccatattatttttccctgcattcaatgcttctttgttttttaccggagttaaacctctatattcaataataaaatgctccacggaaatattttatgattggagaatgttgattctgtgctttggtttcatgtcgttttcctttttaaatattcatgtaattttacttacgataataaaattattcttaatcaaaaaaacaaaggtagtcaatttcgccacagacataacaatacagctaactcttatatttttactaatagctatcgtaatagcacctttaatagctccttttgtcacaggatatgtcaatgctaattatcacccctgcggtaataatacgggaattttcccaggagcaatctatattaaaaatggcatgaaatgtaataatgaatatatttctcgcaaggaagattcagcagttaaataa

SEQ ID NO: 484531 - DNA, 942 bp, Shigella sonnei
atggctggtttaaggaataacaacaacacacagaatgcacagtgggctgattatgtgggtgacattcttcggggggctcagccgataaaccagctagtacctcagcacccttatcttaacgacgtcccactcattgatgagttaaggcatcagaacactcatcatgttattctcttgacacttgatgttgcaaaaaaaaaaaaaaaaaaaaaaaaaaaaaaaaaaatactcagcccaataacatcatttgattacattcattttatcactacacatccttcaggtataaaagatacactcgcctggttagttaacgcgagtaaattaatgactgagtttgatgacaatgggaaaattatatttaacattaatgccttaaagtatacaaaagcaagttactttgaaatacttggagagaaatatataaaaatcacaacatccagcccctggcttttagaaaagctcggtaaatatattttctcttcacgagcgcctcaagttctggaactcgctattggctggcgaggagctttatctgaatcaataaaaggagttaagttctgtatctggttttcagtagcctggagaaccatagaatttattatgagttcagagcgagatctggttaattttcttggcgatttttcaatggatgtggccaaagcagttatagccggtggtgttgcaaccgctattggaagcctggcttcttttgcctgtgttagctttggctttccagtaattcttgtcggaggagcaattttactgacagggatagtgtgtacagttgttttaaatgaaatcgatgctcaatgccatttatcagaaaaattaaaatatgcaattagagatggactaaaacggcaacaggaacttgataaatggaaaagggaaaacatgactccatttatgtatgttcttaacactccacccgtgatatga

SEQ ID NO: 484532 - DNA, 483 bp, Shigella sonnei
atggcaaatataagttatttatctttgagtggagagacacaagggctaatttcagcaggttgctcaacgcttgattctgtcggaaacaaagcgcagccagaacataaagatcagatcatggtttatgcgttaatgcattccatctcaagaagtcaaaatgtcaatcatcatgaattaattatcaccaaaccggttgataaatcctcaccattgctggcaaaagcacttagtgacaatgaaaaaatggcaatatgtgaatttatactctaccgaaccagtaaagcgggtatttaccagccttattataaaataaatctgtcaaaagcccgaatatcaagtattgattttgtcacaccgcatgctgtcctggaaaaagaactggaaccacaggagagaattgcctttatttatgaagatatttcctgggagcatacgttagccggtacgaatgcaatgagtaaatggcaggatcgtgtacagtaa

SEQ ID NO: 484533 - DNA, 1353 bp, Shigella sonnei
atgaatagtaacgtactgacacaaactatcgttaccggcagtgacccgcgcgggctgccggaattcagcgccatccgcgaggaaataaacaaagccagccacccgtcacagcctgagctgaactggaaactggtggagtcgctggcgctggcgatttttaaagccaacggtgtggatttacacaccgccacctactatacgcttgcccggacacggacacagggactggcgggattctgcgaaggtgcggaactgctggcggcaatggtaagccacgactgggataagttctggccgcagggcggcccggcgcgtactgaaatgctggactggtttaactcccgaaccggcaatattctgcgtcagcaaatctcctttgcggaatccgacctaccactgatctaccgcacagagcgggcattgcagcttatctgcgataagctccagcaggtggaactgaagcgcgttccgcgcgtggagaatctgctctattttatgcagcacacgcgtaaacggcttgaaccccagccgaagagtaacgctgagaacgccgcacagaccacggtcagaacgctgatttatgccccggaaacactggcatcttccacaccagaagcggtagtgcctcccctgcccggcctgcctgagatgaaagtggaagtgcgcagtctgacagagaatcccccacaggccagtgtgataaagcaaggcagtacggtaagagggtttatcgcagggatcgcctgttcagtggctgtcgcctcagcattgtggtggtggcaggtctatccggtgcagcagcaactgttacaggttaacgacaccgctcagggcgcagcaacggtgtggatggcctcacctgaactcgaaaactatgagcgcaggctgcaacaacttcttgatacctccccggtacagccgctggaaaccgggatgcagatgatgcgtgttgccgacagtcgctggccggaaagcctgcaacagcaacaggcctcgacacaatggaatgaggcactcaaaacccgcgcacagagtagcccgcagttgcgtggctggttgcagacccgccaggacttacatgcttttgcagatctagtgatgcagcgcgagaaagagggactaaccctttcctatatcaaaaatgtcatctggcaggcggagcggggactggggcaggaaacccccattgagtctctgttgacgcagtaccatgatgcccgtgcgcagaagcagaatacagatgcgctggaaaaacaaattaatgagcgactcgaaggcgtgttaagccgctggctgctgctgaagaataacgtcatgccagaggcggcaaccggtaccacggccgaaaaataa

SEQ ID NO: 484534 - DNA, 687 bp, Shigella sonnei
atggaagtggactggcgcgacagcgtggtgaaaccgtttaacgagcaactggcaaataactatccgtttaatccgcgttctgcacaggatgcctcactggatgccttcgaacgcttctttaaaccggatggcatactggataccttctaccagcagaacctgaagctgtttatcgataatgacctgagtctggaggatggcgataacaacgtcattattcgcgaagatattattgcgcaactggaaactgcgcagaaaatccgtgacatcttcttcagcaaacagaacggtctgggaacatcctttgccgtggaaacggtatcgctttcaggcaataaacgccgcagtgtactgaaccttgacagtcagttagtcgattacagccagggccgtaactataccgcccatctggtctggcctaacaacatgcgcgaaggcaacgaaagtaagctgacgctcatcggcaccagcggcaacgcgccgcgcagtatcagcttcagcgggccgtgggcgcagttccgcctgttctgggccggacaactgaccggagtacaggatggcaactttaccgtgcgctttagcgtggacggtggcgcgatgacctaccgtgtgcataccgacacggaagataacccgttcagcggtgggttgttcagccagtttggtctgtcagacacactgtactga

SEQ ID NO: 484535 - DNA, 1176 bp, Shigella sonnei
gtggaacagacctatctgcaactgctggagcaacgttacctgccctcgctgtttaacgggctggtcaaagcgatgaacgccgcgccgccggagagtgaagaaaaactcgcggtgctgcgcgtgatgcgaatgctggaggacaaaagcggacgtaacaatcaggtggtgaagcagtatatggcaaaacgctggagcgaaaagttccacggtcagcgcgatatccaggcacaactgatgtcccatcttgactacgcgctggctcatactgactggcacgcagagcgtcaggcgggcgacggtgacgccatcagccgctggacgccatatgacaagcccgtggtatcagcacagaaagaactgagcaaactgcctgtctaccagcgggtttaccagagcctgaaaacgcgggcgctgggcgttcttcctgccgacctcaatctgcgtgaccaggtagggccaacctttgaccaggtgtttacatctgccgatgacaacaaactggttgttccacagtttatcacccgctacggcctgcaaagctattttgtaaaacagcgcgatgaactggttgaactgacagcgatggattcctgggtacttaacctcacccgcaatgtgaaatacagtgacgccgaccgtgcggaaatccagcaccagttgaccgagcagtatatcagcgactacaccgccacctggcgggctgggatggacaatctgaatatccgcaattttgagtccatcggacaactgaccggggcgctggagcaggttatcagcggcgaccagcctttgcagcgggcgctgaccgtgctgcgtgacagcacacagccaggcgtcttttctgaaaaactctctgccaaagaacgggaggaagccctggcagagccggattaccagttactcacccgcctcgggcatgaattcgccccggaaaacagtaccctggcagtacagaaagacaaagaaagcacgatgcaggccgtgtatcagcaactcaccgagttgcaccgctacctgctggcaatccagaacgcgcctgtaccagggaaatcggcgctgaaagccgtgcagttacggcttgatcagaacagcagcgatccgatattcgccacccgccagatggcaaaaacgctgcctgctccgctcaaccgctgggttggcagactgactgactag

SEQ ID NO: 484536 - DNA, 348 bp, Shigella sonnei
atgatgactatcgttcgtatcgatgctgaagcccgctggtctgatgtagtaatccacaacaacacgctctactacactggtgtaccggaaaacctcgacgccgatgcctttgagcaaaccgccaacacgctggcacagattgacgccgtgctggaaaaacagggcagcaataaatcgagcattctggatgccaccattttcctggccgataaaaacgacttcgcggcgatgaataaagcgtgggatgcctgggttgtcgcgggtcatgcgccagtgcgctgcacggtacaagcgggtttgatgaacccgaagtataaagttgaaattaagattgtggctgcggtgtaa

SEQ ID NO: 484537 - DNA, 1911 bp, Shigella sonnei
gtgacggacgattttgcaccagacggtcagctggcgaaagcgataccaggctttaagccgcgagaaccacagcgacagatggcggtagccgtcacccaggcgatagaaaaaggccagccgctggtggtggaagcaggaaccggtacgggcaaaacctacgcttacctggctcctgcgctgcgggcgaaaaagaaagtcattatctcgaccggctcaaaagcgttgcaggatcagctctacagccgcgatttgccaacagtctcaaaggcattgaaatatacgggcaacgtggcgctgctgaaagggcgctcaaactacctctgcctcgaacgtctcgaacagcaggcgctggcggggggcgatctgccggtacaaatcttaagcgatgtgatcctgctgcgctcctggtctaatcaaacagtcgatggtgatatcagcacctgcgtcagcgtggcggaagattcacaggcgtggccgctggtcaccagcaccaacgacaactgtcttggcagcgactgcccgatgtataaagattgctttgtggtcaaagcacgtaaaaaagcgatggacgccgatgtggtggtggtaaaccatcatctctttctggcggatatggtggttaaagagagtggatttggcgagttgatccctgaagcggacgtcatgatcttcgacgaagcccaccagctaccggacattgccagccagtattttggtcagtcactctccagtcgacaactgctcgacctggcaaaagacatcaccatcgcctaccgcaccgaattaaaagacacccagcagttacaaaagtgcgctgatcgtcttgcccagagtgcacaggattttcgtctgcaactcggtgagccaggttatcgcggtaacctgcgtgagctgttagctaatccgcaaattcagcgggcatttttactgctcgatgacaccctggaactttgttatgacgtggcgaaactgtcactggggcgttccgccttgctggatgcggcatttgagcgcgccacgttgtatcgcacacggctgaagcggctaaaagagatcaatcagccgggctacagctactggtacgaatgcacttcgcgccattttactctggctctcacgccgctcagcgtggcggataaattcaaagagttaatggcgcaaaagcccggtagctggatcttcacctcagcaacgctgtcggtgaacgacgatctgcatcatttcacctcgcggcttgggatagaacaggcggagtcgttgctattgccaagcccgtttgattacagccgccaggcgttactctgtgtgccgcgcaacctgccgcaaaccaatcaaccgggttgtgcacggcaactggcggcaatgctgcgaccgatcatcgaagctaacaacggtcgttgttttatgctttgtacctcgcatgccatgatgcgcgatctggccgagcagttccgcgctaccatgacgcttcccgttttgttgcagggggaaaccagcaaagggcaactgttgcagcaatttgtcagcgccggtaacgcgcttcttgtggcaaccagtagtttctgggaaggggtggacgtgcgtggcgatacattgtcattggtaattatcgacaaattgccgtttacctcgccggatgatctactgttaaaagcgcgcatggaagattgtcgtttgcgcggtggcgacccgttcgatgaagtgcagctgccggatgcggtcattactctcaagcagggagtagggcgactgattcgcgacgccgacgatcgcggcgtgctggtaatttgtgacaatcggctggtgatgcgtccttacggcgcgacgtttctcgccagtctgccgcccgcgccacgcacccgtgacattgcccgtgcggttcgtttccttgcgataccatcctccaggtaa

SEQ ID NO: 484538 - DNA, 696 bp, Shigella sonnei
atgcgaattctggctatcgataccgcgacagaggtctgctctgtcgctctgtggaacgacggtaatgtcaacgctcattttgagctttgccctcgtgaacatactcaacgaatcttaccgatggtgcaggatatcctgaccaccagcggaacttccctgactgacataaacgctctggcttacgggcgcggccccggtagctttactggcgtgcgcattggtattggtattgcgcaagggctggcgcttggcgcggagttaccgatgattggtgtctctacgctaatgacgatggcgcagggggcgtggcgcaaaaacggcgcaacccgcgtgctggcagccattgacgcgcgaatgggcgaagtttactgggccgaatatcagcgtgatgaaaacggtatctggcgcggtgaagaaaccgaagccgtactcaaacccgaactcgttcatgaacgaatgcaacagctttccggcgaatgggtaacggtagggacgggctggcaagcctggccggatctccgtaaagagagcgggctggttttgcgcgacggagaagttttactgccagcggcggaagatatgctgccgattgcgtgtcagatgtttgccgagggtaaaacggtggcggtggaacatgccgaaccggtttatttacgtaacaacgtcgcatggaagaaacttccgggcaaagaatga

SEQ ID NO: 484539 - DNA, 582 bp, Shigella sonnei
atggcggttcaaaagaatgttatcaaaggcatactggcaggtacgtttgcgctaatgctgagcggttgtgtcactgtgccggacgccattaaaggcagcagtccaacaccacagcaagatctggtacgcgtgatgaatgcgccagatttatatgttggtcaggaggcgcgctttggcggcaaagtggttgtggtacaaaaccagcaagggaaaacccgcctggaaattgctaccgtaccgctggacagcggagcaagaccaaccttgggagaaccttcacgcgggcgcatttatgccgatgtgaacggttttcttgatccggtcgattttcgtggacaactggtgacggttgtcgggccaatcactggcacagtggatggcaaagtaaataatgcaccatataaatttatggttatgcaggtaacaggttacaaacgctggcatatcactcaacaggtgattatgccgccgcagccaattgatccatggttttatggtggacgcggctggccctatggttacggcggatggggttggtataatcctggccctgcaagagttgaaacaattgtaaccgagtaa

SEQ ID NO: 484540 - DNA, 1752 bp, Shigella sonnei
atgttaacaacatgtttatcacttggggttgcgatgacgacgaacacgcattttagaggtgaagaattgaagaaggtttggcttaaccgttatcccgcggatgttccgacggagatcaaccctgaccgttatcaatctctgatagatatgtttgagcagtcggtcgtccgctacgccgatcagcctgcgtttgtgaatatgggggaggtaatgaccttccgcaagctggaagaacgcagtcgcgcgtttgccgcttatttgcaacaagggttggggctgaagaaaggcgatcgcgttgcgttgatgatgcctaatttattgcaatatccggtggcgctgtttggcattttgcgtgccgggatgatcgtcgtaaacgttaacccgttgtataccccgcgtgagcttgagcatcagcttaacgatagcggcgcatcggcgattgttatcgtgtctaactttgctcacacactggaaaaagtggttgataaaaccgccgttcagcacgtaattctgacccgtatgggcgatcagctatctacggcaaaaggcacggtagtcaatttcgttgttaaatacatcaagcgtttggtgccgaaataccatctgccagatgccatttcatttcgtagcgcactgcataacggctaccggatgcagtacgtcaaacccgaactggtgccggaagatttagccttcctgcaatacaccggcggcaccacaggtgtggcgaaaggcgcgatgctgactcaccgcaatatgctggcgaacctggaacaggtcaacgccacctatgggccgttgctgcatccaggtaaagaactggtagtaacggcactgccgctgtatcacatttttgccctgaccattaactgcctgctgtttatcgaactgggtgggcagaacctgcttatcactaacccgcgcgatattccagggttggtaaaagagttagcgaaatatccgtttaccgctatcactggcgttaacaccttgttcaatgcgttgctgaacaataaagagttccagcagctggatttctccagtctgcatctttccgcaggcggtgggatgccagtgcagcaagtggtggcagagcgttgggtgaaactgacaggacagtatctgctggaaggctatggtcttaccgagtgtgcgccgctggtcagcgttaacccatatgatattgattatcatagtggtagcatcggtttgccggtgccgtcgacggaagccaaactggtggatgacgacgataatgaagtaccaccgggtcaaccgggtgagctttgtgtcaaaggaccgcaggtgatgctgggttactggcagcgtcccgatgctaccgatgagatcatcaaaaatggctggttacacaccggcgacatcgcggtgatggatgaagaagggttcctgcgcattgtcgatcgtaaaaaagacatgattctggtttccggttttaacgtctatcccaacgagattgaagatgtcgtcatgcagcatcctggcgtacaggaagtcgcggctgttggcgtaccttccggctccagtggtgaagcggtgaaaatcttcgtagtgaaaaaagatccatcgcttaccgaagagtcactggtgaccttttgctgccgtcagctcacgggctacaaagtaccgaagctggtggagtttcgtgatgagttaccgaaatctaacgtcggaaaaattttgcgacgagaattacgtgacgaagcgcgcggcaaagtggacaataaagcctga

SEQ ID NO: 484541 - DNA, 1116 bp, Shigella sonnei
atgattaccacggacgatgcgctggcttctttgtgtgaagccgtccgtgtctttccggcgatagcccaggatactgaatttgttcgtacgcgcacttattacccgcagctggggttgattcaacttttcgatggtgagcatctggcgctaattgatcctctcgggatcaccgactggtcaccgctgaaagcgatcctgcgcgatccgtccatcacaaaatttctccatgcaggcagtgaagatctggaagtgttcctcaatgtctttggcgaattaccacaacccctgattgacacgcaaatccttgctgccttctgcggacgcccgatgtcatggggtttcgcttccatggtggaagagtattccggcgttacgctggacaagagtgaatcgcgcaccgactggctggccagaccgctgaccgaacgtcagtgtgaatacgcagcggcggatgtctggtatctgttaccgatcaccgccaagcttatggtagaaacggaggcctccggctggctacctgcggcgctggatgaatgccgcctgatgcaaatgcgtcgtcaggaagtcgttgcgccggaagatgcctggcgtgatatcaccaatgcctggcaattacgcacacgccaactggcctgtctgcaactgttagccgactggcgactgcgcaaggctcgtgagcgtgatctggcggtgaactttgtcgtgcgtgaagagcatttgtggtcggtcgcgcgttatatgccgggaagtttaggcgaactggacagcctgggtttatccggtagcgaaatccgctttcacggtaaaacgctgctggcgctggtggaaaaagcgcagacattgccggaagaggccttaccgcagccgatgcttaacctgatggacatgccgggttatcgtaaagcgtttaaagcgattaagtcgctgattactgacgtgagcgaaacgcataagatcagcgccgaattgctggcatcgcgtcggcaaatcaaccaactgctgaactggcactggaaactgaaaccgcagaacaatttgccggagctgatttccggctggcgtggtgagctgatggcggaagcattacacaatttattgcaggaatatccgcagtaa

SEQ ID NO: 484542 - DNA, 966 bp, Shigella sonnei
atgtcagactatcaaatgtttgaagtacaggtgagtcaggtggaaccgcttaccgaacaggtgaaacgcttcacgctggtggcaaccgatggcaaaccgctgcctgcgttcaccggaggaagtcacatcattgtgcagatgagcgatggtgataaccagtacagcaatgcgtattcactactgagttcgccgcatgacacctcttgttatcagattgccgttcggctggaggaaaactcgcgcggcggttcccgctttttgcatcagcaggtaaaagtgggcgatcggttaacgatttcaacgcctaataacctgtttgcgctaattccctcagccagaaagcatctgtttatcgcgggcggtattggtatcacccctttcctgtcgcacatggcagagttgcaacacagcgacgtcgactggcagctacattactgctcgcgaaatccagaaagttgcgcatttcgtgatgagctagtccagcatccgcaggctgagaaagtccatttgcatcattcgtcaaccggaacacgactggaattagcgcgattattggcggatatcgaacctggcacacacgtttatacctgtggccccgaggcgctaaatgaagcggtaagaagtgaagctgcgcgtctggacatcgccgccgatacgctgcactttgagcaatttgctatcgaagacaaaaccggcgatgcctttaccctggtgcttgcccgttccggaaaagagtttgtggtgccggaagagatgactattttgcaggttattgaaaataataaagccgcgaaagtggaatgtttatgtcgtgaaggggtatgcggaacctgcgaaacagcaatactggaaggtgaagctgaccatcgggatcagtattttagcgatgaagagcgtgccagccagcaaagtatgttgatctgttgttcgcgtgcgaagggtaaacgcctggtgttggatttgtag

SEQ ID NO: 484543 - DNA, 1125 bp, Shigella sonnei
atgagcaatctgagccctgactttgtactacccgaaaatttttgcgctaacccgcaagaggcgtggaccattcctgcccgtttttataccgatcagaacgcgtttgaacacgaaaaagagaacgtcttcgccaaaagctggatttgcgtcgctcacagcagcgaactggcgaatgccaatgattatgtgacgcgtgagatcattggcgaaagcatcgtgctggtacgcggtcgtgataaggttttgcgcgcgttctataacgtgtgtccgcaccgtggtcatcagttgttgagcggtgaaggaaaagcaaaaaatgtgattacctgcccatatcacgcatgggcattcaaactcgatggcaatctggcccatgcacgtaactgcgaaaacgtcgccaatttcgatagcgacaaagcgcaactggttccggtgcgtctggaagaatatgccggattcgtcttcatcaacatggaccccaacgccaccagcgtagaagatcagttacccggtctgggcgcgaaagtgctggaagcctgcccggaagtccacgatctgaaactggcggcccgctttaccacccgcacgcctgccaactggaagaacattgtcgataactatctcgagtgctatcactgtggtccggcgcatccaggtttctccgactccgtacaggttgatcgctactggcacaccatgcacggtaactggacgctgcaatacggtttcgccaaaccgtccgaacagtcgtttaaatttgaagagggtacggatgcggcattccacggtttctggctgtggccgtgcacgatgctgaacgtcaccccgatcaaagggatgatgacggtcatttatgaattcccggtggattctgaaactaccctgcaaaactacgatatttacttcaccaatgaagagttaaccgacgagcaaaaatcgctgattgagtggtatcgcgatgtgttccgtccggaagatttacgtctggttgaaagcgtacagaaagggctgaaatcgcgtggctatcgtggtcaggggcgcatcatggccgacagtagcggtagtggcatttccgaacatggtatcgcccatttccataatctgctggcgcaggtgtttaaggactaa

SEQ ID NO: 484544 - DNA, 1611 bp, Shigella sonnei
atgatgagcaatgttaagaaaaaagatgtgccgctgataagcatcagcctggtggccattcttttcatcgcagctgcattaagccttttcccacaacaatcggccgacgcggccaacacaatatacacttttgttacgcgtacgttaggttccgccgtacaggtattggttttgctggcaatgggactggtgatttatttagccaccagtaaatacggcaatattcgtcttggcgaaggaaaaccggaatacagcacgctctcctggctgtttatgtttatttgtgccggtttaggttcttctacgctttattggggggttgctgaatgggcctattattatcaaacgcctggattaaatatcgcaccacgttcacaacaggcactcgaatttagcgtcccttactccttcttccactggggcatcagcacctgggcaacttatacgctggcctcattaatcatggcttatcactttcatgtgcgtaaaaacaaaggtctgagtctttccggcattattgccgcgattaccggcgttcgcccgcaaggcccatggggaaaactggttgatttgatgtttctgatcgccactgtcggcgcactgactatttcccttgttgtcaccgcagcaacctttactcgtggactttccgcgctgaccggtttacccgataacttcaccgtgcaggcatttgtgatcctgctttccggcggcattttttgcctaagctcgtggattggtatcaacaacggtttgcaacgtctgagcaaaatggttggctggggcgcgttcctgctgccattactggtgctgattgtcggtccaaccgaatttattaccaacagcatcatcaatgccatcggcctgaccacgcaaaacttcctgcaaatgagcttattcaccgatccgcttggcgatggttcatttacccgcaactggaccgttttctactggctgtggtggatctcatacccccctggcgtagcaatgtttgtcacccgcgtttcccgcggtcgtaagattaaagaagttatctggggactgatcctcggcagcaccgtcggttgctggttcttcttcggcgtaatggaaagctatgccattcatcagtttatcaatggcgtaatcaacgtcccacaggtgctggaaacactgggcggcgaaacagctgtacagcaagttctgatgtcgttgccagccggtaaattgttcctcgccgcatacctgggcgtgatgattattttccttgcctcgcatatggatgcagtggcctacaccatggcggcgaccagtacgcgtaatctccaggaaggtgacgatcctgaccgtgggctgcgtcttttctggtgcgtggtgatcactctgatcccgctttccatcttgtttaccggtgcttcgctggaaacgatgaaaaccaccgtcgtgctcacagcccttcccttcctcgtcattttactggtgaaagtcggcggatttattcgctggctgaaacaggattatgccgacattccggctcatcaagttgaacattatctcccgcagacaccggttgaagccctggaaaaaacaccagtgctccctgcgggaaccgtattcaaaggcgacaactga

SEQ ID NO: 484545 - DNA, 1086 bp, Shigella sonnei
atgatgaaaacgatgcgtattgctgcgatcccgggagatgggattggcaaagaagtccttcctgaagggattcgcgtattacaggctgccgctgagcgctggggcttcgacttgagttttgagcaaatggagtgggcgagctgcgagtattacagccatcacggtaaaatgatgccggacgactggcatgagcaacttagccgtttcgacgccatctattttggtgccgtcggctggccggataccgttccggaccatatttcgttgtggggttcgctgctgaaatttcgtcgtgaattcgaccagtacgtcaacctgcgcccggttcgtctctttcctggcgttccctgcccgctggcgggaaaacagcctggcgacatcgatttttacgtggtcagggaaaacaccgaaggcgaatattcctcgctcggcggtagagtgaatgaaggtacagagcatgaagtcgtcattcaggaatcggtatttacgcgtcgtggtgtcgatcgcattttgcgttatgccttcgaacttgcgcaaagccgcccacgtaagacgctaacttctgccactaaatcaaacggtttagccatcagcatgccgtactgggatgagcgagtggaagcaatggccgagaattacccggagatccgctgggacaagcagcatattgatattctctgcgcgcgttttgtgatgcagccggaacgcttcgatgtggtggtggcgtccaatttgtttggcgatatcctttccgatcttggcccggcctgcaccggcaccattggcattgccccatccgccaacctgaatccggaacgcactttcccgtcgctcttcgagcctgtccacggttccgcgccggatatctacgggaaaaatattgctaaccctatcgccacaatttgggccggtgcgatgatgctcgattttctcggcaatggcgatgagcgtttccagcaagcgcataacggtattctggcagcgattgaagaagtgattgctcacgggccgaaaacaccggatatgaaaggcagtgccaccacgccacaggttgccgacgcgatttgcaaaattattttgcgttaa

SEQ ID NO: 484546 - DNA, 924 bp, Shigella sonnei
atgaataatttaccgctgctgaacgatttgcgcgtctttatgctggtggctcgccgggctggttttgccgccgtggcggaagaactgggcgtttcaccggcgttcgtcagcaagcgcatcgccttgctggagcaaacgctaaacgtggtgttgttacaccgcaccacccgccgcgtcaccattaccgaagaaggagagcggatttatgaatgggcgcagcggattttgcaggatgtcggtcagatgatggacgaactttctgacgtgcgtcaggtgccgcaggggatgctgcgtattatcagcagctttggttttggacgacaggtggtggctccggcgttatcagcgctggctaaggcgtatccgcaactggaattacgttttgatgtggaagaccggttggtcgatttggtcaatgaaggtgttgatctcgatattcgcattggcgatgacatcgcccctaatttaatcgcccgcaaactggcgactaattaccgcattctctgcgcgtcgccggaatttattgcgcaacatggcgcgccgaaacatttaaccgatctttccgcattgccgtgcctggtcattaaagagcgcgatcatccttttggtgtctggcaattacgcaataaagaaggccaccatgcgattaaagtcaccggcccactgtcgtctaatcatggagaaattgtccatcagtggtgtctcgatgggcaggggattgctctgcgctcctggtgggatgttagcgaaaacattgccagtggtcatttagtgcaagtgctaccggaatattaccagccagcgaacgtctgggccgtttatgtttcaaggctggcgacgtcagcgaaagtgcggataacgatagaatttttacgccagtattttgccgagcactacccgaatttttcactggagcatgcctga

SEQ ID NO: 484547 - DNA, 639 bp, Shigella sonnei
gtgttcgctgaatacggggttctgaattactggacctatctggttggggccatttttattgtgttggtgccagggccaaataccctgtttgtactcaaaaatagcgtcagtagcggtatgaaaggcggttatcttgcggcctgcggtgtatttattggcgatgcagtattgatgtttctggcatgggctggagtggcgacattaattaagaccaccccgatattattcaacattgtacgttatcttggtgcgttttatttgctctatctggggagtaaaattctctacgcgaccctgaagggtaaaaataacgaggccaaatccgatgagccccaatacggggccatttttaaacgcgcgttaattttgagcctgactaatccgaaagccattttgttctatgtgtcgtttttcgtacagtttatcgatgttaatgccccacatacgggaatttcattctttattctggcgacgacgctggaactggtgagtttctgctatttgagcttcctgattatttctggtgcttttgtcacgcagtacatacgtaccaaaaagaaactggctaaagttggcaactcactgattggtttgatgttcgtgggtttcgccgcccgactggcgacgctgcaatcctga

SEQ ID NO: 484548 - DNA, 165 bp, Shigella sonnei; identical to SEQ ID NO: 33292

SEQ ID NO: 484549 - DNA, 315 bp, Shigella sonnei
atggggctggtagagcaaatggcctgcttattaagtagtggatacgctaatgacagacaaatcaaagggctgtttaattacatactgcaaaccggcgacgcggtacgttttaacgattttatcgacggcgttgccgaacgttcaccgaaacacaaggagagtttaatgacaattgcggaaagattgcggcaggagggggaacaatccaaagccctgcatatagccaaaataatgcttgaatccggagtccctcttgcggacatcatgcgctttaccggggtgtcagaagaagagttggctgcggcgagccagtaa

SEQ ID NO: 484550 - DNA, 771 bp, Shigella sonnei
atgaataacatttggtggcagaccaaaggtcaggggaatgttcatcttgtgctgctgcacggatggggactgaatgccgaagtgtggcgttgcattgacgaggaacttagctcgcattttacgctgcaccttgttgatctgcccggcttcgggcgcagccagggatttggtgcgctgtcacttgctgatatggccgaagccgtgctgcaacaggcacctgataaagccatttggttaggctggagtctgggcgggctggtggcaagccagattgcgttaacccatcccgagcgtgttcaggcgctggtcaccgtggcgtcgtcaccttgttttagtgctcgtgacgattggccggggataaaaccggacgtgctggcgggatttcagcagcaactcagtgatgattttcagcgtacagtggagcggttcctggcgttacaaaccatggggactgaaacggcgcgccaggatgcgcgggcgttgaagaaaaccgttctggcgttaccgatgccggaggttgacgtgcttaatggcgggctggaaatcctgaaaacggttgatctccgtcagccgctgcaaaacgtgcccatgccgtttttgcgattgtatggctatctcgatggtctggtgccgcgcaaagtggtgccgatgctggataaactctggcctcgcagcaaatcatatatcttcgccaaagcggcccatgcgccgtttatttcgcatccggtcgagttttgtcacctgctggtggcgttgaagcagagggtgtag

SEQ ID NO: 484551 - DNA, 684 bp, Shigella sonnei
atgctaacagtaccgggattatgctggctatgccgaatgccactggcgttaggtcattgggggatttgttcggtctgttcacgcgccacccgcacagataaaacgttatgcccacaatgtggattacccgccacacactcccatcttccctgcggtcgctgcctgcaaaaaccgccgccctggcaaagactggtcacggttgccgactatgcgccgccgttaagtctgctcatccaccagcttaaattttcccggcgcagtgaaatcgccagcgccctgtcacgtctgttactattggaagtcttacacgctcgtcgcaccaccgggttgcaattgccggatcgcatcatcagcgttccgttatggcagcggcgtcactggcgtcggggatttaatcagagcgatttgctgtgtcagccgttatcacgctggttgcactgccaatgggatagcgaagccgtcacacgtacacgggccactgcgacccagcattttctcagtgcccggctgcgcaagcgcaacctgaaaaatgcctttcgtcttgaattgcccgtgcaaggtcgccatatggtgattgtggatgatgtcgttaccaccggaagtaccgtcgcagagattgcgcagttgcttttacgcaatggtgcggcgactgtccaggtctggtgcctttgtcgaaccttgtag

SEQ ID NO: 484552 - DNA, 576 bp, Shigella sonnei; identical to SEQ ID NO: 473645

SEQ ID NO: 484553 - DNA, 1317 bp, Shigella sonnei
atgccattagtcattgttgctatcggtgtaatcttgttgttgctcctgatgatccgcttcaaaatgaacggcttcatcgctctcgtcctcgtggcgcttgctgttggattaatgcaaggaatgccgctggataaagttattgactccatcaaagtcggtgtcggcgggacgctcggtagccttgccctgatcatgggttttggcgcaatgctgggcaaaatgctggcagactgcggtggcgcacaacgtatcgccaccacgctgattgccaaatttggtaaaaagcgcatccagtgggcggtggtgttaaccggttttaccgttggttttgccctgttctatgaagtgggcttcgtgctgatgctgccgctggtgtttaccatcgcggcttccgcgaatattccactgctgtatgttggtgtaccaatggcggctgcactgtctgtgacccacggcttcctgccaccgcatccgggcccgactgcgattgccaccattttcaatgccgatatgggtaaaaccctgctgtacggtactattctggcaatcccgaccgtgattctcgccggtccggtttacgctcgcgtgttgaaaggtatcgataagccaatcccggaaggtctctacagcgcgaaaaccttcagcgaagaagagatgccgagctttggcgtcagcgtctggacttctctggtgccggttgtgctgatggcgatgcgtgcgattgccgaaatgatcctgccgaaaggtcacgctttcctgccggtagcggagttcctcggtgacccggtaatggcaacgctgattgccgtgctgattgcgatgttcacctttggtctgaaccgtggtcgttcaatggatcagattaacgacacgctggtttcttccatcaaaatcattgcgatgatgctgttgatcatcggtggtggcggtgcgttcaagcaggtgctggtagacagcggcgtggacaaatacattgcttccatgatgcacgaaaccaacatttctccgctgctgatggcctggtcgattgctgccgtactgcgtatcgcgctgggttccgcaaccgttgcggcaatcactgcgggtggtatcgcggcaccgctgattgcaacgacgggtgttagcccagagctgatggttattgcggtgggttccggtagtgtgattttctctcatgtgaacgatccgggcttctggctgttcaaagagtactttaacctgactatcggcgagaccatcaaatcctggtcgatgctggaaaccattatctcggtgtgcggtctggtaggctgtctgctgctgaatatggtgatttga

SEQ ID NO: 484554 - DNA, 2085 bp, Shigella sonnei
atggaaagcaaacgtctggataatgccgcgctggcggcggggattagccccaattacatcaatgcccacggtaaaccgcagtcgattagcgccgaaaccaaacggcgtttgcttgacgcgatgcatcaacgtaccgccacgaaagtggcggtaacgccagtcccgaatgtcatggtttataccagcggcaaaaaaatgccgatggtggtggagggcagcggcgaatatagctggctgctgaccaccgaagaaggaacacagtacaaaggccatgtaacggggggcaaagcgttcaatctaccgacgaagctgccggaaggttatcacacgctgacactcacccaggacgaccagcgcgcgcattgccgggtgattgtcgccccgaaacgctgttacgaaccgcaggcgttgctgaataaacaaaagctgtggggtgcctgcgttcagctttatacgctgcgatcggaaaaaaactggggtattggggattttggcgatctcaaagcgatgctggtggatgtggcaaaacgtggcgggtcgttcatcggcctgaacccgattcatgcgctctatccggcaaatccggagagtgccagcccatacagcccgtcttctcgccgttggctgaatgtgatttatatcgacgttaaagccgtcgaagatttccatcttagcgaagaggctcaggcctggtggcagttgccgaccacgcaacagacgctgcaacaagcgcgggatgccgactgggtcgattactccacggttaccgccctaaaaatgacagcattacgaatggcgtggaaaggtttcgcgcaacgtgatgatgagcagatggccgcgtttcgccagtttgttgcagatcaaggcgacagcctgttctggcaggcagcctttgatgcgctacatgcccagcaagtgaaagaggacgaaatgcgctggggctggcctgcatggccagagatgtatcagaacgtggattcaccagaagtgcgtcagttctgcgaagaacatcgtaatgacgtcgatttttatctctggttgcagtggctggcttacagccagtttgccgcctgctgggagataagccagggctatgaaatgccgattggcttgtatcgtgatctggcggttggcgtagcggaaggtggggcggaaacctggtgtgaccgtgaactatattgcctgaaagcgtcggttggcgcgccgccggatatcctcggcccgttggggcagaactggggattaccgccaatggacccgcatatcatcaccgcgcgtgcctatgaaccgtttatcgagctgttgcgtgccaatatgcaaaactgcggcgcattacgaattgaccatgtgatgtcgatgctgcgtttgtggtggataccgtatggcgagacggcagatcagggcgcgtatgttcactatccggtggatgatctgctctcgattctggcactcgaaagtaaacgtcatcgctgtatggtgattggtgaagatctcggtaccgtaccggtagagattgtcggtaagctgcgcagcagcggtgtgtactcctacaaagtgctctatttcgaaaacgaccacgagaagacgttccgtgcaccgaaagcgtatccggagcagtcgatggcggttgcggcgacacatgacctgcctacgctacgcggttactgggagagcggggatctaacgctgggcaaaaccctggggctgtatccggatgaagtggtactgcgcggtctgtatcaggatcgcgaactggcgaagcaagggctgctggatgcactgcataaatatggttgtctgccaaaacgtgccgggcataaggcatcgttgatgtcgatgacgccgacgctgaaccgtggtttgcagcgctacattgccgacagtaacagtgctctgttaggactacagccggaagactggctggatatggccgaaccggtgaatattcctggcaccagttaccagtataaaaactggcgacgcaagctttccgcaacgcttgagtcgatgtttgccgatgatggcgtgaacaagttgctgaaggatttggacagacggcgcagagctgcagcgaagaagaagtag

SEQ ID NO: 484555 - DNA, 2394 bp, Shigella sonnei
atgtcacaacctatttttaacgataagcaatttcaggaagcgctttcacgtcagtggcagcgttatggcttaaattctgcggctgaaatgactcctcgccagtggtggctagcagtgagtgaagcactggccgaaatgctgcgtgctcagccattcgccaagccggtggcgaatcagcgacatgttaactacatctcaatggagtttttgattggtcgcctgacgggcaacaacctgttgaatctcggctggtatcaggatgtacaggattcgttgaaggcttatgacatcaatctgacggacctgctggaagaagagatcgacccggcgctgggtaacggtggtctgggacgtctggcggcgtgcttcctcgactcaatggcaactgtcggtcagtctgcgacgggttacggtctgaactatcaatatggtttgttccgccagtcttttgtcgatggcaaacaggttgaagcgccggatgactggcatcgcagtaactacccgtggttccgccacaacgaagcactggatgtgcaggtagggattggcggtaaagtgacgaaagacggacgctgggagccggagtttaccattaccggtcaagcgtgggatctccccgttgtcggctatcgtaatggcgtggcgcagccgctgcgtctgtggcaggcgacgcacgcgcatccgtttgatctgactaaatttaacgacggtgatttcctgcgtgccgaacagcagggcatcaatgcggaaaaactgaccaaagttctctatccaaacgacaaccatactgccggtaaaaagctgcgcttgatgcagcagtacttccagtgtgcctgttcggtagcggatattttgcgtcgccatcatctggcggggcgtaaactgcacgaactggcggattacgaagttattcagctgaacgatacccacccaactatcgcgattccagaactgctgcgcgtgctgatcgatgagcaccagatgagctgggatgacgcttgggccattaccagcaaaactttcgcttacaccaaccataccctgatgccagaagcgctggaacgctgggatgtgaaactggtgaaaggcttactgccgcgccatatgcagattattaacgaaattaatactcgctttaaaacgctggtggagaaaacctggccgggcgatgaaaaagtgtgggccaaactggcggtggtgcacgataaacaagtgcatatggcgaacctgtgtgtggttggcggtttcgcggtgaacggtgttgcggcgctgcactcggatctggtggtgaaagatctgttcccggaatatcaccagctatggccgaacaaattccataacgtcaccaacggtattaccccacgtcgctggatcaaacagtgcaaccctgcactggcggctctgttggataaatcactgcaaaaagagtgggctaacgatctcgatcagctgatcaatctggaaaaattcgctgatgatgcgaaattccgtcagcaatatcgcgagatcaagcaggcgaataaagtccgtctggcggagtttgtgaaagttcgtaccggtattgagatcaatccacaggcgattttcgatattcagatcaaacgtctgcatgagtacaaacgccagcacctgaatctgctgcatattctggcgttgtacaaagaaattcgtgaaaacccgcaggctgatcgcgtaccgcgcgtcttcctcttcggcgcgaaagcggcaccgggctactacctggcgaagaatattatctttgcgatcaacaaagtggctgacgtgatcaacaacgatccactggttggcgataagttgaaggtggtgttcctgccggattattgcgtttcggcggcggaaaaactgatcccggcggcggatatctccgaacaaatttcgactgcaggtaaagaagcttccggtaccggcaatatgaaactggcgctcaatggtgcgcttgctgtcggtacgctggatggtgcgaacgttgaaatcgccgagaaagtcggtgaagaaaatatctttatttttggtcataccgtggaacaagtgaaggcaattctggccaaaggctacgacccggtgaaatggcggaagaaagataaggtgctggacgcagtattgaaagagctggaaagcggtaaatacagcgacggcgataagcatgccttcgaccagatgctgcacagtatcggcaaacaaggcggcgatccgtatctggtgatggcggatttcgcagcctatgttgaggcacaaaagcaggtggatgtgctgtaccgcgaccaggaggcctggactcgcgcggcgatcctcaataccgcccgctgcggtatgtttagctcggatcgctctattcgcgattatcaggctcgtatctggcaggcaaaacgctaa

SEQ ID NO: 484556 - DNA, 2706 bp, Shigella sonnei
atgctgattccgtcaaaactaagtcgtccggttcgactcgaccataccgtggttcgtgagcgcctgctggctaaactttccggcgcgaacaacttccggctggcgctgatcacgagtcctgcgggctacggaaagaccaccctcatttcccagtgggcggcaggcaaaaacgatatcggctggtactcgctggatgaaggtgataaccagcaagagcgtttcgccagctatctcattgccgccgtgcagcaggcaaccaacggtcactgtgcgatatgtgagacgatggcgcaaaaacggcaatatgccagcctgacgtcactcttcgcccagcttttcattgagctggcggaatggcatagcccactttatctggtcatcgatgactatcatctgatcactaatccagtgatccacgagtcaatgcgcttctttattcgccatcaaccagaaaatctcaccctggtggtgttgtcacgcaaccttccgcaactgggcattgccaatctgcgtgttcgtgaccaactgctggaaattggcagtcagcaactggcatttacccatcaggaagcgaagcagttttttgattgccgtctgtcatcgccgattgaagccgcagaaagcagttggatttgcgatgacgtttccggttgggcgacggcactacagctaatcgccctctccgcccggcagaatacccactcagcccataagtcggcacgccgcctggcgggaatcaatgccagccatctttcggattatctggtcgatgaggttttggataacgtcgatctcgcaacgcgccattttctgttgaaaagcgccattttgcgctcaatgaacgatgccctcatcacccgtgtgactggcgaagaaaacgggcaaatgcgtctcgaagagattgagcgtcaggggctgtttttacagcggatggatgataccggcgagtggttctgctatcacccgctgtttggcaacttcctgcgccagcgctgccagtgggaactggcggcggagctgccggaaatccaccgtgccgccgcagaaagctggatggcccagggatttcccagcgaagcgattcatcatgcgctggcggcaggcgatgcgctgatgctgcgcgatattctgcttaatcacgcctggagtttgttcaaccatagcgaactgtcgctgctggaagagtcgcttaaggccctgccgtgggacagtttgctggaaaatccgcagttagtgttattgcaggcgtggctaatgcaaagccaacatcgctatggcgaagttaacaccctgctagcccgtgctgaacatgaaatcaaggacatcagagaaggcaccatgcacgcagaatttaacgctctgcgcgcccaggtggcgattaacgatggtaatccggatgaagcggaacggctggcaaaactggcactggaagagctgccaccgggctggttctatagccgcattgtagcaacctcggtgctgggtgaagtgctgcactgcaaaggcgaattgacccgctcactggcgctaatgcagcaaaccgaacagatggcacgccagcacgacgtctggcactacgccttatggagtttaatccagcaaagtgaaattctgtttgcccaagggttcctgcaaaccgcgtgggaaacacaggaaaaaacgttccagctgatcaacgagcagcatctggaacagctgccgatgcatgagtttctggtgcgcatccgagcacaactgttatgggcctgggcacggctggatgaagccgaagcgtcggcgcgtagcgggattgaagtcttgtcgtcttatcagccacagcaacagcttcagtgcctggcaatgttgattcaatgctcgctggcccgtggtgatttagataacgcccgtagccagctgaaccgtctggaaaacctgctggggaatggcaaatatcacagcgactggatctctaacgccaacaaagtccgggtgatttactggcaaatgaccggcgataaagccgccgctgccaactggttgcgtcatacggctaaaccggagtttgcgaacaaccacttcctgcaaggtcaatggcgcaacattgcccgcgcacaaatcttgctgggcgagtttgaacctgcggaaattgttctcgaagaactcaatgaaaatgcccgcagtctgcggttgatgagcgatctcaaccgtaacctgttgctgcttaatcaactgtactggcaggccggacgtaaaagtgacgcccagcgcgtgttgctggacgcattaaaactggcgaatcgcaccggatttatcagtcattttgtcatcgaaggcgaagcgatggcgcaacaactgcgccagctgattcaactcaatacgctgccggaactggaacagcatcgcgcgcagcgtattctgcgagaaatcaatcaacatcatcggcataaattcgcccatttcgatgagaatttcgttgaacgtctgctgaatcatccggaagtgccagaactgatccgcaccagcccgttgacccaacgtgaatggcaggtcctggggctgatctactccggttacagcaatgagcaaattgcgggcgagctggaagtggcggcaaccaccatcaagacgcatatccgcaatctgtaccaaaaactcggcgtcgcccaccgtcaggccgcggtacaacacgcgcagaaactgctgaagatgatgggatatggggtgtga

SEQ ID NO: 484557 - DNA, 1017 bp, Shigella sonnei
atgaaaaggatgattgcgctggatggcgcacagggcgaaggtggcgggcagatcctgcgctcggcgctgagcctgtcgatgataaccggccagccatttaccatcaccagcattcgtgccgggcgggcgaaaccggggctgttgcgccagcatctgaccgcggtaaaagcggctgcggaaatttgtagggcaacggtggaaggcgcggagctggggtcgcagcgtctggtcttccggcttggcaccgtgcgcggcggcgagtaccgctttgctatcggtagtgccggaagctgtacgctggtgctgcaaacggtgctgcccgcgctgtggtttgccgatggaccttcgcgtgttgaagtgagcggaggcaccgataacccgtcggccccgcctgcggattttatccgccgggtgctggagccgctgctggcgaaaataggaattcatcagcaaaccacgctgttacgtcacggtttttatcctgccggaggcggcgtggtggcaacggaagtctcgcccgtggcatcgtttaacaccttgcaacttggcgagcgcgggaacattgtgcagatgcgtggagaagttctattagctggtgtgccgcgccatgttgctgagcgtgaaatcgctacactggcggggagtttttccctgcatgaacagaatattcataacctgccgcgcgaccaggggccgggtaataccgtctcgctggaagtcgaaagtgaaaatatcactgaacgctttttcgtcgtcggtgaaaagcgcgtcagtgccgaggtggtagccgcgcagttagtgaaagaggtgaaacgctacctggcaagcccggcggtagtgggggaatatctcgccgaccagctggtgctaccgatggcgctggcgggcgcgggagaatttacggtcgcccatccttcatgccatctgctgaccaatatcgccgtggtggagcgtttcttgccggtgcggtttggtttgatagaaacagatggcgtaacgcgggtgagtattgaatga

SEQ ID NO: 484558 - DNA, 1227 bp, Shigella sonnei
atgaattacgaattactgaccactgaaaatgccccggtaaaaatgtggaccaaaggcgtgccggtagaagccgatgcgcgtcagcaacttattaatacggcgaagatgccgtttattttcaaacatattgcggtaatgcctgatgtacacctgggtaaaggttccaccattggtagcgtgatcccgaccaaaggggcgattattccggcggcggtgggcgtggatattggctgtggaatgaacgcgctgcgtaccgcgttaacggcggcagacctgcctgaaaacctggcggagctgcgtcaagcgattgaaacggccgtaccacacgggcgtactaccgggcgttgtaaacgtgataaaggcgcatgggaaaacccgccttttaacgtcgatgcgaaatgggctgagctggaggccggttatcagtggttaacgcaaaaatatccgcgtttccttaacactaacaactataaacacctgggaacgctgggaacgggtaaccactttattgaaatctgccttgatgagtcggagcaggtgtggattatgctgcactccggttcacgcggaattggtaacgccatcgggacttactttatcgatctggcgcaaaaagagatgcaggaccaacttgagacgttgccgtcgcgtgatctggcgtactttatggaaggtacggaatactttgatgattacctaagagccgtggcctgggcgcagcttttcgccagccttaaccgcgatgcgatgatggaaaacgtggtaacggcattgcagagcattacgcagaaaacggtcagacagccacaaacgctggcgatggaagagatcaactgtcaccacaactatgtgcaaaaagaacagcactttggtgaagagatctacgtgacgcgtaaaggcgcggtgtttgcgcgtgctggtcaatatggaattattccagggtcgatgggagcaaaaagctttatcgtccgtgggctgggaaatgaagaatctttctgttcgtgcagccacggtgccgggcgggtaatgagccgtactaaagcgaaaaaactgttcagcgtggaagatcaaattcgtgccaccgcgcatgtggaatgccgtaaagatgccgaagtgatcgacgaaatcccgatggcgtataaagatattgatgcggtgatggcggcacaaagcgatctggtggaagttatctataccctgcgtcaggtggtgtgcgtaaaaggataa

SEQ ID NO: 484559 - DNA, 237 bp, Shigella sonnei
atgaataacatattacttccgccaattaatattccctgtacacttttcgaaactattagtttattcgatgatttttctgctgatgatatgcaatatggtgatatggtagaacaagactttctctcactcggcctaagcgatatctcagcaaaagttgatccttacagacttattaaataccatttccctggcccaggttctattaatgttgcttttagtgcctcaagttccgggtga

SEQ ID NO: 484560 - DNA, 300 bp, Shigella sonnei
atgggaaatggtaacttttggcagttgttcttgggtaaagaaccttacagcaaaaaatctgattttgttaaggcatggttattgtggtgggctattaccatccttgttctatttattttaagcctgactacgacattaaatttaagaagtataggtatagggttaagttttgggttttgtcaaatccttggtagatatacgatgtctctaggatggagtaagtactggggagttttgggggtatttcctgtaacaaatattgttctttttcttatcttaatttttttcaaaaaaagataa

SEQ ID NO: 484561 - DNA, 888 bp, Shigella sonnei
atggatgcaaaacaaacgcggcagggcgtattactcgctcttgccgcttattttatttggggtatagcgccagcgtacttcaagttgatttactacgtgcccgccgatgaaatcctgacgcatcgcgtgatctggtcgtttttctttatggtggtgctgatgagcatttgccgccagtggtcctatttaaaaacgctgattcagacgccacagaaaatttttatgctggcagtctctgccgtgctgattggtggcaactggctactgtttatctgggcggtgaacaatcaccatatgctggaagcgagccttggttactttattaacccgctggtgaacattgtgctggggatgattttcctcggcgagcgattccgccggatgcaatggctggcggtgattctggcgatatgtggcgtgttagtccagctgtggacttttggttcgctacctattatcgcgctgggactggcatttagttttgccttctacggtctggtacgcaagaagattgccgttgaagcgcaaaccggcatgttaatcgaaaccatgtggctgctgcccgtggcggcaatttacctgtttgctattgccgacagctcaaccagccatatggggcaaaacccgatgtcgctgaatttactgctgatcgccgccggtattgtcactaccgtaccgctgttgtgttttaccgccgctgccacgcgcttgcgtctctcaacgttaggctttttccagtacattggcccgacgctgatgttcctgctggctgtgacgttttatggtgaaaaaccgggtgccgataagatggtgactttcgcctttatttgggtggcgctggcaatttttgtgatggatgcgatttatacgcagcgtagaaaaagttaa

SEQ ID NO: 484562 - DNA, 468 bp, Shigella sonnei
atgtctgccgtactgaccgctgaacaagccctgaaattagtgggtgagatgtttgtttatcacatgccatttaaccgcgcattggggatggaactggagcgttacgaaaaagagttcgcacagctggcctttaaaaatcagccaatgatggtgggcaactgggcgcaaagcattttgcacggcggggtcattgcgtcggcgctggatgtcgccgccggtctggtgtgcgtgggaagtaccttaacccgccacgaaaccatcagtgaagatgaactacgccagcggctatcgcggatggggaccattgatcttcgcgttgattatctgcgcccaggcaggggcgagcgttttactgctaccagtagcctgttgcgtgcaggcaataaagtcgccgtcgcccgcgttgaattacacaatgaagaacagctttatattgccagtgccaccgccacctatatggtaggttga

SEQ ID NO: 484563 - DNA, 870 bp, Shigella sonnei
atgcggactctgcagggctggttgttgccggtgtttatgttgcctatggcagtatatgcacaagaggcaacggtgaaagaggtgcatgacgcgccagcggtgcgtggcagtattatcgccaatatgctgcaggagcatgacaatccgttcacgctctatccttatgacaccaactacctcatttacacccaaaccagcgatctgaataaagaagcgattgccagttacgactgggcggaaaatgcgcgtaaggatgaagtaaagtttcagttgagcctggcatttccgctgtggcgtgggattttaggcccgaactcggtgttgggtgcgtcttatacgcaaaaatcctggtggcaactgtccaatagcgaagagtcttcaccgtttcgtgaaaccaactacgaaccgcaattgttcctcggttttgccaccgattactgttttgcaggttggacgctgcgcgatgtggagatggggtataaccacgactctaacgggcgttccgacccgacctcccgcagctggaaccgcctttatactcgcctgatggcagaaaacggtaactggctggtagaagtgaagccgtggtatgtggtgggtaatactgacgataacccggatatcaccaaatatatgggttactaccagcttaaaatcggctatcacctcggtgatgcggtgttgagtgcgaaaggacagtacaactggaataccggttacggcggcgcggagttaggcttaagttacccgatcaccaaacatgtgcgcctttatactcaggtttacagcggctatggcgaatcgctcatcgactataacttcaaccagacccgtgtcggtgtaggagttatgctaaacgacttgttttga

SEQ ID NO: 484564 - DNA, 1836 bp, Shigella sonnei
gtgaatgtggcgcaggcggaagtgttgaatctggagtccggagctaaacaggttttacaagaaacctttggctaccaacagtttcgccccggccaggaagaaattatcgacactgtgctttccggtcgcgattgcctggtcgtcatgcccaccggtggcggaaaatccctttgctatcaaattcctgccttattgctaaacggccttaccgtggttgtttcaccgctgatttcgttgatgaaagatcaggtggatcaactgcaagccaacggcgtggcggcggcgtgccttaactcgacgcaaacccgcgagcagcaacttgaagtgatgacaggctgccgcaccgggcaaattcgtctgctttatatcgccccggaacgcctgatgctggataactttcttgagcatctggcgcactggaatccggtgttattagccgttgatgaagcgcactgtatctcccaatggggccacgatttccgcccggaatatgccgcgcttggtcagttacgccagcgtttcccgaccctgccgtttatggcgctgactgccacagccgacgacaccacgcgccaggatatcgtgcgcttgctggggctgaacgatccgctgattcaaatcagcagttttgaccgtccgaatattcgctacatgctgatggagaaattcaaaccgctcgatcagttgatgcgctacgtgcaggaacagcgcggtaagtccggcattatctactgcaacagccgggcgaaagtagaagacaccgctgcgcgcctgcaaagcaagggtattagcgcggcggcctatcatgccgggctggaaaataatgtccgcgccgacgtgcaggagaaattccagcgcgatgacctgcaaattgtggtggcgacggtggcgttcggcatgggcatcaataaaccaaacgttcgcttcgtggtccactttgatattccgcgcaatatcgaatcctattatcaggaaaccggtcgcgccgggcgtgatggcctgcctgcggaagcgatgctgttttacgatccggctgatatggcgtggctgcgccgttgtctggaagagaagccgcaggggcagttgcaggatattgagcgccacaaactcaatgcgatgggcgcgtttgccgaagcgcaaacttgccgtcgtctggtattgctgaactattttggcgaagggcgtcaggagccgtgcgggaactgcgatatctgcctcgatccgccgaaacagtacgacggttcaaccgatgctcagattgccctttccaccattggtcgtgtgaatcagcggtttgggatgggttatgtggtggaagtgattcgtggtgctaataaccagcgtatccgcgactatggtcatgacaaactgaaagtctatggcatgggccgtgataaaagccatgaacattgggtgagcgtgatccgccagctgattcacctcggcctggtgacgcaaaatattgcccagcattctgccctacaactgacagaggccgcgcgcccggtgctgcgcggcgaatcctctttgcaacttgccgtgccgcgtatcgtggcgctcaaaccgaaagcgatgcagaaatcgttcggcggcaactatgatcgtaaactgttcgccaaattacgcaaactgcgtaaatcgattgccgatgaaagtaatgtcccgccgtacgtggtgtttaacgacgcaaccttgattgagatggctgaacagatgccgatcaccgccagcgaaatgctcagcgttaacggcgttgggatgcgcaagctggaacgctttggtaaaccgtttatggcgctgattcgtgcgcatgtcgatggcgacgacgaagagtag

SEQ ID NO: 484565 - DNA, 618 bp, Shigella sonnei
atgttgatgttatttctcaccgtcgccatggtgcacattgtggcgcttatgagccccggtcccgatttcttttttgtctctcagaccgctgtcagtcgttcccgtaaagaagcgatgatgggcgtgctgggcattacctgcggtgtaatggtttgggctgggattgcgttgcttggcctgcatttgattatcgaaaaaatggcctggctgcatacgcttatggttggcggtggcctgtatctctgctggatgggttaccagatgctgcgcggcgcgctgaaaaaagaggcggtttctgcacctgcgccacaggtcgagctggcgaaaagtgggcgcagtttcctgaaaggtttactgaccaatctcgctaatccgaaagcgattatctactttggctcggtgttctcattgtttgtcggtgataacgttggcactaccgcgcgctggggcatttttgcgctgatcattgtcgaaacgctggcgtggtttatcgtcgttgccagcctgtttgccctgccgcaaatgcgccgtggttatcaacgtctggcgaagtggattgatggttttgccggggcgttatttgccggatttggcattcatttgattatttcgcggtga

SEQ ID NO: 484566 - DNA, 621 bp, Shigella sonnei
atgaccttagaatggtggtttgcctacctgctgacatcgatcattttaagcctgtcgccaggctctggtgcaatcaacactatgaccacctcgctcaaccacggttatcgcggcgcggtggcgtctattgctgggcttcagaccggactggcgattcatattgtgctggttggcgtggggttggggacgctattttcccgctcagtgattgcgtttgaagtgttgaagtgggcaggcgcggcttacttgatttggctgggaatccagcagtggcgcgccgctggtgcaattgaccttaaatcgctggcctctactcaatcgcgtcgacatttgttccagcgcgcagtttttgtgaatctcaccaatcccaaaagtattgtgtttctggcggcgctatttccgcaattcatcatgccgcaacagccgcaactgatgcagtatatcgtgctcggcgtcaccactattgtggtcgatattattgtgatgatcggttacgccacccttgctcaacggattgctctatggattaaaggaccaaagcagatgaaggcgctgaataagattttcggctcgttgtttatgctggtgggagcgctgttagcatcggcgaggcatgcgtga

SEQ ID NO: 484567 - DNA, 1023 bp, Shigella sonnei
atgtttcagcagcaaaaagactgggaaacaagagaaaacgcgtttgctgcttttaccatgggaccgctgactgatttctggcgtcagcgtgatgaagcagagtttactggtgtggatgacattccggtgcgctttgtccgttttcgcgcacagcaccatgaccgggtggtagtcatctgcccggggcgtattgagagctacgtaaaatatgcggaactggcctatgacctgttccatttggggtttgatgtcttaatcatcgaccatcgcgggcagggacgttccggtcgcctgttagccgatccgcatctcgggcatgttaatcgctttaatgattatgttgatgatctggcggcattctggcagcaggaggttcagcccggtccgtggcgtaaacgctatatactggcacattcgatgggcggtgcgatctccacattatttctgcaacgccatccaggtgtatgtgacgccattgcgctaactgcgccaatgtttgggatcgtgattcgtatgccgtcatttatggcacggcagatcctcaactgggccgaagcgcatccacgtttccgtgatggctatgcaataggcaccgggcgctggcgcgcgttgccgtttgctatcaacgtactgacccacagcagacagcgatatcgacgtaacttacgcttctatgctgatgacccaacgattcgcgtcggtgggccgacctaccattgggtacgcgaaagtattctggctggcgaacaggtgttagccggtgcgggtgatgacgccacgccaacgcttctcttgcaggctgaagaggaacgcgtggtggataaccgcatgcatgaccgtttttgtgaactccgcaccgccgcgggccatcctgtcgaaggaggacgaccgttggtaattaaaggtgcttaccatgagatcctttttgaaaaggacgcaatgcgctcagtcgcgctccacgccattgttgattttttcaacaggcataactcacccagcggaaaccgctctacagaggtttaa

SEQ ID NO: 484568 - DNA, 801 bp, Shigella sonnei
atgtaccaggttgttgcgtctgatttagatggcacgttactttctcccgaccatacgttatccccttacgccaaagaaaccctgaagctgctcaccgcgcgcggcatcaactttgtgtttgcgaccggtcgtcaccacgttgatgtggggcaaattcgcgataatctggagatcaagtcgtacatgatcacctccaacggcgcgcgcgttcacgatctggatggcaatctgatttttgctcataacctggatcgcgacattgccagcgatctgtttggcgtagtcaacgacaatctggacatcattactaacgtttatcgcgacgacgaatggtttatgaatcgccatcgcccggaagagatgcgcttttttaaagaagcggtgttcaaatatgcgctgtatgagcctggattactggagccggaaggcgtcagcaaagtgttcttcacctgcgattcccatgaacaactgctgccgctggagcaggcgattaacgctcgttggggcgatcgcgtcaacgttagtttctctaccttaacctgtctggaagtgatggcgggcggcgtttcaaaaggccatgcgctggaagcggtggcgaagaaactgggctacagcctgaaggattgtattgcgtttggtgacgggatgaacgatgccgaaatgctgtcgatggcggggaaaggctgcattatgggcagtgcgcaccagcgtctgaaagaccttcatcccgagctggaagtgattggtactaatgccgacgacgcggtgccgcattatctgcgtaaactctatttatcgtaa

SEQ ID NO: 484569 - DNA, 900 bp, Shigella sonnei
gtggcgctacttatcatcaccacgattctgtgggccttctcctttagcttttatggcgagtaccttgcggggcacgtcgatagctattttgcggtgctggtgcgcgttggcctggcggcactcgtttttctgccgtttctgcgtacccgtggcaatagcctgaaaacggtcggcctgtatatgctggtgggcgcgatgcagctcggcgtgatgtatatgctgagtttccgcgcttatctctacctgacggtctccgaattgttgctgttcaccgtactgacgccgctctacatcacgctgatttatgacatcatgagtaagcgccgtctgcgctggggctatgcttttagcgccttgctggcggtgattggtgccgggattattcgctatgatcaggttaccgaccatttctggactggcttgttgctggtgcaactctccaatatcacttttgccatcggcatggtgggttacaaacgcctgatggaaactcgcccgatgccgcagcataacgcctttgcgtggttctatcttggcgcgttcctggtggcggtaattgcatggttcttgctgggaaatgcgcagaaaatgccgcaaaccacgttgcaatggggcattctggtgtttcttggcgtggtggcttccgggattggctactttatgtggaactacggcgcgacgcaggtggacgccggaacgctgggcattatgaataatatgcacgttccggcagggctgctggtaaacctggctatctggcaccaacagccgcactggccaacgttcattacaggcgcgctggtgatcctggcctcactgtgggtgcatcgtaagtgggtcgctccgcgctcttcacaaacggcagatgatcgcaggcgtgattgcgcgctgagcgaataa

SEQ ID NO: 484570 - DNA, 954 bp, Shigella sonnei
atgatcgaagtaaaacacctgaaaacgctacaagcgttgcggaactgcggctctctcgcagccgctgcggcgacgttgcatcagacgcaatccgccctgtctcaccagtttagcgatctggaacaacgccttggcttccggctatttgtgcgtaagagccagccgctacgctttacaccgcagggagaaatcctgttgcaactggcaaaccaggtgctgccgcaaatcagccaggcactgcaagcctgcaatgaaccgcagcagacgcgtctgcgcattgccattgagtgccatagctgtattcagtggctgacgcccgcgttagaaaatttccataagaactggccgcaggtagagatggattttaaatcgggcgtgacgtttgacccgcagcctgcgttgcaacagggcgagctggatctggtgatgacctccgatatcctgccgcgcagtggcctgcattattcgccgatgttcgactatgaagtgcgtctggtgttagcacctgaccatccactggcggcgaaaacgcgaattacaccggaagatctcgccagcgagacgctgttgatttatccggtgcagcgtagtcgactggatgtctggcggcattttcttcagccggcaggcgtcagcccgtcactgaaaagcgtcgataacaccttattgttgattcagatggttgccgcgcggatgggtattgccgcgctaccgcattgggtagtagagagttttgagcgccaaggtctggtggtgaccaaaaccctgggcgaaggcttgtggagccgactgtacgccgccgtgcgcgatggcgagcagcgtcagccgattacagaagcatttattcgctcagcgcgcaatcacgcctgcgatcatctgccgtttgtgaagagcgcggagcgacccacttacgatgcacccacagtgaggccaggatcaccagcgcgcctgtaa

SEQ ID NO: 484571 - DNA, 2262 bp, Shigella sonnei
atgacaatattgaatcacaccctcggtttccctcgcgttggcctgcgtcgcgagctgaaaaaagcgcaagaaagttattgggcggggaactccacgcgtgaagaactgctgacagtagggcgtgaactgcgtgctcgtcactgggatcaacaaaagcaagcgggtatcgacctgctgccggtgggcgattttgcctggtacgatcatgtactgaccaccagtttgctgctgggtaatgttccgccacgtcatcagaacaaagacggttcggtagatatcgacaccctgttccgtattggtcgtggacgtgcgccgactggcgaacctgcggcggcagcggaaatgaccaaatggtttaacaccaactatcactacatggtgccggagttcgttaaaggccaacagttcaaactgacctggacgcagctgctggaggaagtggacgaggcgctggcgctgggccacaacgttaagcctgtgctgctggggccggttacttacctgtggctggggaaagtgaaaggtgaacagtttgaccgccttagcctgctgaacgacattctgccggtttatcagcaagtgctggcagaactggcgaaacgcggcatcgagtgggtacagattgatgaacccgcgctggtactggaactaccacaggcgtggctggacgcatacaaacccgcttacgacgcgctccagggacaggtgaaactgctgctgaccacctattttgaaggcgtaacgccaaatctcgacacgattactgcgctgcctgttcagggtctgcatgttgatctcgtacatggtaaagatgacgttgctgaactgcacaagcgcctgccttctgactggttgctgtctgcgggtctgatcaatggtcgtaacgtctggcgcgccgatcttaccgagaaatatgcgcaaattaaggacattgtcggcaaacgtgatttgtgggtggcatcttcctgctcgttgctgcacagccccatcgacctgagcgtggaaacgcgtcttgatgcagaagtgaaaagctggtttgccttcgccctacaaaaatgccatgaactagcactgctgcgcgatgcgctgaacagtggtgacacggcagctctggcagagtggagcgccccaattcaggcgcgtcgtcactctactcgtgtacataatccggcggtagaaaagcgtctggcggcgatcaccgcccaggacagccagcgtgcgaatgtctatgaagtgcgtgctgaagcccagcgtgcacgttttaaactgccagcgtggccgaccaccacgattggttccttcccgcaaaccacggaaattcgtaccctgcgtctggatttcaaaaagggcaatctcgacgccaataactaccgcacgggcattgcggaacatatcaggcaggccattgttgaacaggaacgtttgggactggatgtgctggtacatggcgaggccgagcgtaatgacatggtggaatactttggcgagcacctcgacgggtttgtctttacgcaaaacggttgggtacagagctacggttcccgctgcgtgaagccaccgattgttattggtgacgttagtcgcccggcaccgattaccgtggagtgggcgaagtatgcgcaatctctgactgataaaccggtgaaagggatgctgactggcccggtgactattctctgctggtcgttcccgcgtgaagatgtcagccgtgaaaccatcgccaaacagattgcgctggcgctgcgtgatgaagtggccgatctggaagccgctggaattggcatcatccagattgacgaaccggctctgcgcgaaggtttaccgctgcgtcgtagcgactgggatgcgtatctccagtggggcgtagaggccttccgtatcaacgccgccgtggcgaaagatgacacacaaatccacactcacatgtgttattgcgagttcaacgacatcatggattcgattgcggcactggacgcagacgtcatcaccatcgaaacctcgcgttctgacatggagttgctggagtcgttcgaagagtttgattatccgaatgaaatcggtccaggcgtctatgacattcactcgccaaacgtaccgagcgtggaatggattgaagccttgctgaagaaagcggcaaaacgcattccggcagagcgcctgtgggttaacccggactgtggcctgaaaacgcgcggctggccagaaacccgcgcggcactggcgaacatggtgcaggcggcgcagaatttgcgtcggggatga

SEQ ID NO: 484572 - DNA, 276 bp, Shigella sonnei
atgacttataccaccaggatgcacttgactatgataactgaaactgaaattaacgtactgaaaattatggctgagaaagatataaactggaactggatgaatctcgatcgcacactatccataaggcaaattccaggattcggtaatgttgttaacattgttaacaaattagctaacgagggtttggttattattgaggatagcggacataagtctatgcctcactaccacgttactgaaaagggatacaatttcgtgaaaagtgagaataaataa

SEQ ID NO: 484573 - DNA, 171 bp, Shigella sonnei
atgactagtctaaaaactagtattaagactatcacttatttaagtgatactggttgtctggagattcagggggccagtctacatacgcatactgctactctagaagattataaacttaagggagaacttaatgacttataccaccaggatgcacttgactatgataactga

SEQ ID NO: 484574 - DNA, 1254 bp, Shigella sonnei
gtgagtcactgggctacattcaaacaaacagcaacaaatttatgggtgacccttcggcacgacattctcgcgctggccgtctttttaaatggattgcttatttttaaaacaatctatggtatgtcggtcaatttgcttgatattttccatatcaaagcattttcagagttggatctctccttgctggcaaacgccccactatttatgctcggcgtctttcttgtcctgaactccattggcttactgttccgggcaaagctcgcatgggcaatcagtatcattttgttgttgatagcgctaatttacaccctgcatttttatccctggctgaaatttagtattggattttgcatttttacgctggtgtttttgctgatactgcgcaaagacttctcccacagtagcgccgcagccgggacaatttttgcatttattagtttcacgacattactgttttactcaacctacggtgcgctttatttaagcgaaggttttaatccgcgaatagaaagtttgatgaccgcgttctatttttcgatagaaaccatgtcaaccgtcggctatggcgatattgtccctgtttctgaatcagcacgattgttcactatttcggtcattatttccggcattaccgtttttgccacatctatgacctcaatttttggtccgcttatccgcgggggattcaacaaacttgtaaaaggaaacaatcatacaatgcatcgtaaagatcattttattgtttgcggacattcgattctcgccatcaatacgatcctgcaactgaatcaacgcggacaaaacgtaacggttatcagcaacttgcctgaagatgatatcaagcaacttgagcaacgcttaggcgataacgctgatgttatccccggtgacagtaatgacagttcagtattaaagaaagcgggaatcgatcgttgccgggccattctggcgctgagtgataacgatgcagataacgcgtttgttgtactctcggcaaaagatatgagcagtgatgtcaaaacagttctcgccgtcagtgatagcaaaaacctgaataagattaagatggtacatccggatatcattctctcaccgcaactgtttggcagcgaaattctggcgcgagttttaaatggtgaagagattaataatgatatgctcgtttcaatgttgttgaactccggtcatggcattttcagcgataacgatgaacaagaaacgaaagctgacagtaaagaatcagtgcaaaaatag

SEQ ID NO: 484575 - DNA, 1461 bp, Shigella sonnei
atgacaaccgtttatacgttggtgagttggttggccattctgggatactggttgctcattgcaggcgtaactttacgcattctaatgaaacgacgcgcagttccctccgcgatggcctggctgttgattatttacattctgccgttagtcggaattattgcctatcttgccgttggcgagctccatttaggcaaacgccgcgctgagcgcgccagagcgatgtggccttccaccgcaaaatggcttaacgaccttaaagcctgtaagcatatcttcgccgaagaaaatagcagtgtcgctgcgccattattcaagctttgcgagcgtcgtcaggggatcgctggggtcaaagggaatcagctacaactgatgaccgagtcagatgatgtgatgcaggcgttaatccgcgacatccagctcgcgcgccataatattgagatggtgttttatatctggcagcccggcggcatggcggaccaggtggctgaatcattaatggcggctgcacggcgtggtattcattgccgattgatgctcgactccgccgggagtgtggcttttttccgcagcccgtggcccgagctaatgcgtaatgccggtattgaagtggtcgaagccttaaaggtcaatctgatgcgtgtgtttttacgccgtatggacctgcgccaacatcgcaagatgatcatgatcgataattacatcgcgtacaccggcagcatgaatatggtcgatcctcgctacttcaaacaagatgcgggcgtagggcaatggattgatctgatggcgcgtatggaaggccccatcgccaccgcgatggggattatttattcctgcgactgggagattgaaaccggaaaacgtattctgccgccaccaccagatgtcaatattatgccgtttgaacaggccagcggtcacaccattcacacaattgcttctggccccggctttccggaagatctcattcaccaggcattattgactgcggcttattcggcgcgtgaatatttgatcatgacaacgccctactttgtgccaagcgatgatttacttcatgcgatttgcacggcggcgcagcgcggggtggatgtcagtattatccttccgcgaaaaaatgactcgatgctggtcggctgggccagtcgcgcattctttacggaactgcttgctgctggggttaaaatttatcagtttgaaggcgggttactgcataccaagagcgtgctggtcgatggcgaactaagtctggttggcaccgttaaccttgatatgcgtagtctgtggctgaatttcgagattaccctggcaatcgacgataaaggttttggtgcagaccttgccgccgttcaggacgattatatttcgcgttcacgtctgctcgatgcccgtttatggctaaaacgtccattatggcaacgtgtcgccgagcgactgttttacttcttcagcccgttgctgtaa

SEQ ID NO: 484576 - DNA, 330 bp, Shigella sonnei
atggatatggatctaaacaatcgcctgactgaagatgaaacgcttgagcaggcctacgatatttttctcgaactggctgccgacaatctcgacccagctgatgttctgctgttcaatcttcagtttgaagagcgcggcggcgcggagttattcgatccggcggaagactggcaggaacatgttgatttcgatttgaacccggacttttttgccgaagtggtgattggtctggcggacagtgaggatggtgaaatcaacgatattttcgcccgcattctgttatgccgcgaaaaagatcacaaactttgccatatcatctggcgggaataa

SEQ ID NO: 484577 - DNA, 1005 bp, Shigella sonnei
atgaatgctgtaaccgaaggaagaaaagtcctcctcgaaatcgccgatctgaaagtgcactttgaaatcaaagatggcaaacagtggttctggcaaccgccgaaaactctcaaagccgtcgatggtgtcacgcttcgcctgtatgaaggggaaacattaggtgtggtaggggaatcgggatgcggtaagtccacctttgctcgcgccatcattggcctggttaaagcgaccggcggtcatgttgcctggttaggtaaagagttgctgggcatgaagcccgatgaatggcgtgccgttcgcagtgatattcagatgattttccaggatccgttggcatcgctaaacccgcgtatgaccatcggcgagatcatcgctgaaccactgcgtacttatcatccgaaaatgtcacgccaggaagttcgcgagcgcgtgaaggcgatgatgctgaaagtcgggttattgcctaacctgattaaccgctatccgcatgagttctccggtgggcagtgccagcgtatcgggattgctcgtgctcttattcttgaaccgaagctgattatctgcgatgagccgatttcggcgctggacgtgtcaattcaggcgcaggtggtcaacctgctccagcagctgcaacgtgagatgggattgtcattaatttttatcgctcatgacctggccgtggtaaaacacatttccgatcgtgtgttggtgatgtatctcggccatgcggtagaactggggacctatgatgaggtctaccacaatccactacatccttacaccagggcattgatgtcggcagtccccatacctgatccggatctggagaagaacaaaaccatccagttactggaaggggaattaccgtcgccgatcaacccgccttccggttgtgttttccgtacctgttgcccgattgccggtccggagtgcgccaaaacacgtcctgtgctggaagggagtttcagacacgccgtttcttgcctgaaagtcgatccgctttaa

SEQ ID NO: 484578 - DNA, 1014 bp, Shigella sonnei
atgagcgtaattgaaactgcaactgtgccgctcgcacaacaacaggctgacgtactgctgaacgtgaaagatttgcgtgtcacctttagtaccccggacggcgatgtcacggcggtcaatgatttgaatttttctctacgtgccggagaaacgctgggcattgtaggtgagtctggttcgggtaaatcgcaaactgcatttgcgttgatgggcctgttggctgccaacggacgtattggcggatcggcaaccttcaatgggcgtgaaatcctcaatttgccagagcgtgaactcaataaactgcgcgctgaacaaatctcaatgatttttcaggacccaatgacttcgttgaatccctatatgcgcgtcggtgagcagttgatggaagtgctgatgctgcataagaacatgagcaaagctgaggcgtttgaagagtcggtgcggatgctcgatgcggtaaaaatgccggaagcacgtaaacgcatgaaaatgtacccgcacgaattttctggtggcatgcgtcagcgagttatgattgcgatggcattgctatgtcgacctaagctgctgattgcggatgaacccactactgcgctggacgtcaccgtacaggcgcagatcatgacgctattaaatgaactgaagcgggaatttaataccgccatcattatgattacccacgatcttggcgtggtggcggggatctgcgacaaagtgctggtaatgtacgccgggcgcacgatggaatatggcaacgcgcgcgatgtcttttatcaacccgttcatccttattctatcggtttgctcaacgcggtgccgcgtctcgatgcggaaggtgaaacaatgttgaccatccctggtaatccgccaaacctgctgcgattaccgaaaggttgcccgttccagccacgttgtccgcatgcgatggaaatttgtagtagcgcaccgccgctggaagagtttacgcctggccgtctgcgtgcttgctttaaaccggtggaggaactgttatga

SEQ ID NO: 484579 - DNA, 909 bp, Shigella sonnei
atgatgttaagtaagaaaaacagcgagacgctggaaaatttcagtgaaaagctggaggtcgaagggcgcagcttgtggcaggacgcacgtcgacgttttatgcataaccgtgcggcggttgccagtctgatagtgctggtgctgatcgcgttatttgtaatcctggcaccgatgctttcgcagtttgcctatgacgatactgactgggcgatgatgtccagcgccccggatatggagtccggtcactactttggtactgactcatccggtcgcgacctgcttgtgcgcgttgcgattggcgggcgtatctcactcatggtcggtgttgctgcggcactggtggcagtggtcgtggggacactttacggttcgctttccggttatctgggcggtaaagtggattcggtaatgatgcgtctgctggaaatcctcaactccttcccattcatgttcttcgtcattttgcttgtgacctttttcggtcaaaacatcctgctgattttcgtggcgattggcatggtttcctggctggatatggctcgtattgtgcgtggacaaaccctgagtctgaagcgcaaagagtttattgaggcggcacaagttggcggtgtatcgacatcgggcattgttattcgccacattgtgccgaatgtactcggtgtggtggtggtctacgcatcacttctggtgcccagcatgatcctctttgaatctttccttagcttcctggggttgggtacgcaagagccgttaagcagctggggtgcattgctgagtgatggcgcgaactcgatggaagtctctccatggttattgttgttcccagcgggattcctcgtggtgacgctgttttgtttcaactttatcggcgatggcttgcgtgatgctctcgacccgaaagatcgttaa

SEQ ID NO: 484580 - DNA, 921 bp, Shigella sonnei
atgttaaaatttattctacgtcgctgtctggaagcgattccgacgctatttattcttattactatttcgttctttatgatgcgcctcgcgccgggaagcccttttaccggcgaacgtactttaccgccggaagtgatggccaatatcgaagcgaaatatcatcttaatgatccgatcatgacacagtatttcagctacctgaaacaactggcgtacggtgatttcggtccatcgtttaaatataaagattattcggtcaatgacctggttgcatccagttttcccgtttctgccaaactgggagccgccgcatttttccttgcggtaatactgggtgttagtgctggcgttattgtcgcattaaaacaaaacaccaaatgggactataccgtgatggggctggcaatgaccggggttgttatccccagttttgtggttgcgccattattagtcatgatatttgcgatcattttgcattggctgccgggcggtggctggaatggtggggcgcttaaattcatgatattgccgatggtggcgttgtcactcgcttatatcgccagtattgcgcgtattacccgaggctctatgattgaagtattacactccaactttattcgtactgcccgggcgaaagggttacctatgcggcggatcattttacgccacgcattaaaacctgctctgttacccgtgctctcttatatgggccccgcatttgtcggcattattaccggttctatggttatcgaaaccatttatggtttgccggggattggacaactgttcgttaatggcgcattgaaccgtgactattccttagtgttaagcctgaccatcctggttggtgctttaaccattttgtttaatgccattgtcgatgtgctatatgcggttatcgacccgaaaatccgttactga

SEQ ID NO: 484581 - DNA, 1632 bp, Shigella sonnei
atgaccaacatcaccaagagaagtttagtagcagctggcgttctggctgcgctaatggcagggaatgtcgcgctggcagctgatgtacccgcaggcgtcacactggcggaaaaacaaacactggtacgtaacaatggttcagaagttcagtcattagatccgcacaaaattgaaggtgttccggagtctaatatcagccgagacctgtttgaaggcttactggtcagcgatcttgacggtcatccagcacctggcgtcgctgaatcctgggataataaagacgcgaaagtctggaccttccatttgcgtaaagatgcgaaatggtctgatagcacgccagtcacagcacaagactttgtgtatagctggcaacgttctgttgatccgaacactgcttctccgtatgccagttatctgcaatatgggcatatcgccggtattgatgaaattcttgaagggaaaaaaccgattaccgatctcggcgtgaaagctattgatgatcacacattagaagtcaccttaagtgaacccgttccgtacttctataaattacttgttcacccatcaacttcaccggtgccaaaagccgctatcgagaaattcggcgaaaaatggacccagcctggtaatatcgtcaccaacggtgcctataccttaaaagattgggtcgtaaacgaacgaatcgttcttgaacgcagcccgacctactggaacaacgcgaaaaccgttattaaccaggtaacctatttgcctattgcttctgaagttaccgatgtcaaccgctaccgtagtggtgaaatcgacatgacgtataacaacatgccgatcgaattgttccagaagctgaaaaaagagatcccggacgaagttcacgttgatccatacctgtgcacttactattacgaaattaacaaccagaaaccgccattcaacgatgtgcgtgtgcgtaccgcactgaaactaggtatggaccgcgatatcattgttaataaagtgaaagcgcagggcgacatgcccgcctatggttacactccaccgtatactgatggcgcaaaattgactcagccagaatggtttggctggagccaggaaaaacgtaacgaagaagcgaaaaaactgctggctgaagcgggttataccgcagacaaaccgttgaccatcaacctgctgtataacacctctgatctgcataaaaagctggcgattgctgcctcttcattgtggaagaaaaacattggtgtaaacgtcaaactggttaaccaggagtggaaaacgttcctcgacacccgtcaccagggcacttttgatgtggcccgtgcaggctggtgtgcagactacaacgaaccaacttccttcctgaacaccatgctgtcgaacagctcgatgaataccgcgcattataagagcccggcctttgacagcattatggcggaaacgctgaaagtgactgacgaggcgcagcgcacagctctgtacactaaagcagaacaacagctggataaggattcggccattgttcctgtttattactacgtgaatgcgcgtctggtgaaaccgtgggttggtggctataccggcaaagatccgctggataatacctacacccggaatatgtacattgtgaagcactaa

SEQ ID NO: 484582 - DNA, 162 bp, Shigella sonnei; identical to SEQ ID NO: 473425

SEQ ID NO: 484583 - DNA, 156 bp, Shigella sonnei; identical to SEQ ID NO: 473426

SEQ ID NO: 484584 - DNA, 648 bp, Shigella sonnei
gtgattcagaccttttttgattttcccgtttacttcaaatttttcatcgggttatttgcgctggtcaacccggtagggattattcccgtctttatcagcatgaccagttatcagacagcggcagcgcgaaacaaaactaaccttacagccaacctgtctgtggccattatcttgtggatctcgctttttctcggcgacacgattctgcaactttttggtatatcaattgattcgttccgtatcgcagggggcatcctggtggtgacgatagcgatgtcgatgatcagcggcaagcttggcgaggataaacagaacaagcaagaaaaatcagaaaccgcggtacgtgaaagcattggtgtggtgccattggcgttgccgttgatggcggggccaggggcgatcagttctaccatcgtctggggtacgcgttatcacagcattagctatctgtttggtttctttgtggctattgcattgttcgctttatgttgctggggattgttccgcatggcaccgtggctggtacgggttttacgccagaccggcatcaacgtgattacgcgtattatggggctattgctgatggcattggggattgaatttatcgttactggtattaaggggattttccccggcctgcttaattaa

SEQ ID NO: 484585 - DNA, 2676 bp, Shigella sonnei
atggctgttactaatgtcgctgaacttaacgcactcgtagagcgtgtaaaaaaagcccagcgtgaatatgccagtttcactcaagagcaagtagacaaaatcttccgcgccgccgctctggctgctgcagatgctcgaatcccactcgcgaaaatggccgttgccgaatccggcatgggtatcgtcgaagataaagtgatcaaaaaccactttgcttctgaatatatctacaacgcctataaagatgaaaaaacctgtggtgttctgtctgaagacgacacttttggtaccatcactatcgctgaaccaatcggtattatttgcggtatcgttccgaccactaacccgacttcaactgctatcttcaaatcgctgatcagtctgaagacccgtaacgccattatcttctccccgcacccgcgtgcaaaagatgccaccaacaaagcggctgatatcgttctgcaggctgctatcgctgccggtgctccgaaagatctgatcggctggatcgatcaaccttctgttgaactgtctaacgcactgatgcaccacccagacatcaacctgatcctcgcgactggtggtccgggcatggttaaagccgcatacagctccggtaaaccagctatcggtgtaggcgcgggcaacactccagttgttatcgatgaaactgctgatatcaaacgtgcagttgcatctgtactgatgtccaaaaccttcgacaacggcgtaatctgtgcttctgaacagtctgttgttgttgttgactctgtttatgacgctgtacgtgaacgttttgcaacccacggcggctatctgttgcagggtaaagagctgaaagctgttcaggatgttatcctgaaaaacggtgcgctgaacgcggctatcgttggtcagccagcctataaaattgctgaactggcaggcttctctgtaccagaaaacaccaagattctgatcggtgaagtgaccgttgttgatgaaagcgaaccgttcgcacatgaaaaactgtccccgactctggcaatgtaccgcgctaaagatttcgaagacgcggtagaaaaagcagagaaactggttgctatgggcggtatcggtcatacctcttgcctgtacactgaccaggataaccaaccggctcgcgtttcttacttcggtcagaaaatgaaaacggctcgtatcctgattaacaccccagcgtctcagggtggtatcggtgacctgtataacttcaaactcgcaccttccctgactctgggttgtggttcctgggggggtaactccatctctgaaaacgttggtccgaaacacctgatcaacaagaaaaccgttgctaagcgagctgaaaacatgttgtggcacaaacttccgaaatctatctacttccgccgtggctccctgccaatcgcgctggatgaagtgattactgatggccacaaacgtgcgctcatcgtgactgaccgcttcctgttcaacaatggttatgctgatcagatcacttccgtactgaaagcagcaggcgttgaaactgaagtcttcttcgaagtagaagcggacccgaccctgagcatcgttcgtaaaggtgcagaactggcaaactccttcaaaccagacgtgattatcgcgctgggtggtggttccccgatggacgccgcgaagattatgtgggttatgtacgaacatccggaaactcacttcgaagagctggcgctgcgctttatggatatccgtaaacgtatctacaagttcccgaaaatgggcgtgaaagcgaaaatgatcgctgtcaccaccacttctggtacaggttctgaagtcactccgtttgcggttgtaactgacgacgctactggtcagaaatatccgctggcagactatgcgctgactccggatatggcgattgtcgacgccaacctggttatggacatgccgaagtccctgtgtgctttcggtggtctggacgcagtaactcacgccatggaagcttatgtttctgtactggcatctgagttctctgatggtcaggctctgcaggcactgaaactgctgaaagaatatctgccagcgtcctaccacgaagggtctaaaaatccggtagcgcgtgaacgtgttcacagtgcagcaactatcgcgggtatcgcatttgcgaacgccttcctgggtgtatgtcactcaatggcgcacaaactgggttcccagttccatattccgcacggtctggcaaacgccctgctgatttgtaacgttattcgctacaatgcgaacgacaacccgaccaagcagactgcattcagccagtatgaccgtccgcaggctcgccgtcgttatgctgaaattgccgaccacttgggtctgagcgcaccgggcgaccgtactgctgctaagatcgagaaactgctggcatggctggaaacgctgaaagctgaactgggtattccgaaatctatccgtgaagctggcgttcaggaagcagacttcctggcgaacgtggataaactgtctgaagatgcattcgatgaccagtgcaccggcgctaacccgcgttacccgctgatctccgagctgaaacagatcctgctggatacctactacggtcgtgattatgtagaaggtgaaactgcagcgaaaaaagaagccgctccggctaaagctgagaaaaaagcgaaaaaatccgcttaa

SEQ ID NO: 484586 - DNA, 135 bp, Shigella sonnei
atgcacattggacaggctcttgatctggtatcccgttacgattctctgcgtaacccactgacttctctgggggattacctcgaccccgaactcatctctcgttgccttgtcagcgccagtgatataagacggtaa

SEQ ID NO: 484587 - DNA, 2142 bp, Shigella sonnei
atgaacatcattgccattatgggaccgcatggcgtcttttataaagatgagcccatcaaagaactggagtcggcgctggtggcgcaaggctttcagattatctggccacaaaacagcgttgatttgctgaaatttatcgaacataaccctcgaatttgtggcgtgatttttgactgggatgagtacagtctcgatttatgcagcgatatcaatcaacttaatgaatatctcccgctttatgccttcatcaacacccactcgacgatggatgtcagcgtgcaggatatgcggatggcgctctggttttttgaatatgcgctggggcaggcggaagatatcgccattcgtatgcgtcagtacaccaacgaatatcttgataacattacgccgccgttcacgaaagccttgtttacctacgtcaaagagcggaagtacaccttttgtacgccggggcatatgggcggcaccgcatatcaaaaaagcccggttggctgcctgttttatgattttttcggcgggaataccctcaaggctgatgtctctatttcggtcaccgagcttggttcgttgctcgaccacaccgggccacacctggaagcggaagagtacatcgcgcggacttttggcgcggaacagagttatatcgttaccaacggaacatcgacgtcgaacaaaattgtgggtatgtacgccgcgccatccggcagtacgctgttgatcgaccgcaattgtcataaatcgctggcgcatctgttgatgatgaacgatgtagtgccagtctggctgaaaccgacgcgtaatgcgttggggattcttggtgggatcccgcgccgtgaatttactcgcgacagcatcgaagagaaagtcgctgccaccacgcaggcacaatggccggttcatgcggtgattaccaactccacctatgatggcttgctctacaacaccgactggatcaaacagacgctggatgtcccgtcgatccacttcgattccgcctgggtgccgtacacccattttcatccgatctaccaggggaaaagtggtatgagcggcgagcgtgttgcgggaaaagtgatcttcgaaacgcaatcgacccacaaaatgctggcggcgttatcgcaggcttcgctgatccacattaaaggcgagtatgacgaagaggcgtttaacgaagcctttatgatgcataccaccacctcgcccagttatcccattgttgcttcggttgagatggcggcggcgatgctgcgtggtaatccgggcaaacggctgattaaccgttcggtggagcgggcgctgcattttcgcaaagaggtccagcggttgcgggaagagtctgacggttggtttttcgatatctggcaaccgccgcaggtggatgaagccgaatgctggcccgttgcgccaggcgaacagtggcacggctttaacgatgcggatgccgatcatatgtttctcgatccggttaaagtcactattttgacaccggggatggacgaacagggcaatatgagcgaggaggggatcccggcggcgctggtggcaaaattcctcgacgaacgtgggatcgtagtagagaaaaccggcccttataacctgctgtttctctttagtattggtatcgataaaaccaaagcaatgggattattgcgtgggttgacggaatttaaacgctcttacgatctcaacctgcggatcaaaaatatgctacccgatctctatgctgaagatcccgatttctaccgcaatatgcgtattcaggatctggcgcaagggatccataagctgattcgtaaacacgatcttcccggtttgatgttgcgggcattcgatactttgccggaaatgatcatgacgccacatcaggcatggcagagacagattaaaggtgaagtagaaaccattgcgctggaacaactggtcggtagagtatcggcaaatatgatcctgccttatccaccgggcgtaccgctgttgatgccaggagaaatgctgaccaaagagagccgcacggtactcgattttctactgatgctttgttccgtagggcaacattaccccggttttgaaacggatattcacggcgcgaaacaggacgaagacggcgtttaccgcgtacgagtcctaaaaatggcgggataa

SEQ ID NO: 484588 - DNA, 390 bp, Shigella sonnei
atgctgggtttaaaacaggttcaccatattgcgattattgcgacggattatgcggtgagcaaagctttctactgcgatattcttggtttcacgctgcaaagcgaagtctatcgcgaagcgcgcgactcgtggaaaggggatttggcgcttaatgggcaatatgtgattgagcttttctcttttccgttcccgccggagcgccccagccgaccggaagcttgcggcctgcgtcatctggcttttagcgttgatgatatcgatgcggcagtggcgcaccttgaaagccataacgtgaagtgtgaagccatccgtgtcgatccatacacgcaaaaacgcttcacgttctttaacgatccggacgggctgccgttggaactgtatgagcagtaa

SEQ ID NO: 484589 - DNA, 1299 bp, Shigella sonnei
atgacactcacgctcaatagacaacttctcacctcacgccagattctggtggcctttagcggcgggcttgactccaccgttctgctgcatcagttggtgcagtggcggacggaaaatccgggcgtcactctacgcgctatccatgtgcatcatggtttaagtgctaatgccgatgcctgggttaggcattgcgagaacatctgccaacagtggcaggtgccgctggtggtcgagcgcgtgcaacttgcgcaagaaggactgggcattgaggcccaggcgcggcaggcgcgttatcaggcatttgctcgtaccctgttacccggtgaagtgctggtcaccgcgcaacatctcgacgatcaatgtgaaacctttctgctggcgctaaaacgcggtagcggccctgccgggctttcggctatgggggaagtttcggaatttgccggaacacggcttatccgcccgttgcttgcccgcacgcggggggaactggagcagtgggcattggcgcatggtttacgctggattgaagacgaaagtaatcaggacgactcatacgatcgtaactttctgcgcctgcgtgtagtgccgttattgcagcagcgttggccgcattttgccgaagcaacggcccgcagcgccgcactttgtgctgaacaagagagtctgttggatgaactgctggcggatgatttagcacactgccaaacgtcgcaggggacgctgcagattgcgccaatgctggcgatgagtgatgcccgtcgcgcggcgattatccgccgctggctggcagggcagaatgcaccgatgccttcccgcgacgcgctggtgcggatctggcaggaagtggcgctggcgcgggaagatgcctccccctgtttacgttttggcgcgtttgaaatacggcgctatcagtcgcaactgtggtggattaaatccgtcactgggcaaagcgaaaccattgtgccgtggcagacgtggctacaaccgctggaattaccggcggggctgggaagtgtacagcttactgcgggaggcgatattcgccctccgcgtgcagacgaagcggtcagcgtgcgtttcaaagcgccaggattgctgcatattgtcgggcgtaacggcggacgtaagctaaagaaaatctggcaagagctgggcgtgccgccgtggctacgtgacaccacgccactgctgttttatggcgaaacgctgattgcggcggcaggggtatttgtgacgcaagaaggtgtggctgaaggtgagaatggcgtaagttttgtctggcagaaaacgcttagttaa

SEQ ID NO: 484590 - DNA, 261 bp, Shigella sonnei
atgtcaatgaatgatgcgtatcaaccaatcaattgtgatgattacgataatcttgagctcgcctgccagcatcatttaatgctgacacttgagctgaaagatggcgaaaaattgcaggcaaaagccagtgatttagtctcccgcaaaaatgtggagtatctggtcgtcgaggccgctggcgaaacccgcgagctgcgtctggataaaattaccagctttagccacccggaaatcggtacggtggtggtaagcgaatcctga

SEQ ID NO: 484591 - DNA, 201 bp, Shigella sonnei; identical to SEQ ID NO: 3723

SEQ ID NO: 484592 - DNA, 546 bp, Shigella sonnei
atggcgcttaaagcgacaatttataaagcgacggttaatgtggccgatctcgaccgcaaccagtttctcgatgcctctctgacgctggcgcgccacccttcagaaacccaggagcgtatgatgctgcgcctgctggcgtggctgaaatatgctgatgaacgtctgcaatttacccgtggtttgtgtgccgattatgagccggaagcgtggctgcgtaacgatcacctgggcattgatttgtggattgagctggggctgccggatgagcggcggattaagaaagcctgcacccaggccgcaaaagtggcgctgtttacctataatagccgggcggcgcaaatctggtggcagcaaaatcagagcaaatgtgtgcagtttgccaatctttccgtctggtatctggacgatgaacaactggcgaaagtaagcgcctttgccgatcgtaccatgacgctgcaggcaacgattcaggatggcgtgatctggttatcggatgataagaataatctggaagtgaacttaaccgcctggcaacaaccttcatga

SEQ ID NO: 484593 - DNA, 207 bp, Shigella sonnei
atgattgtgatttcccgacatgttgctattcccgatggtgagcttgagatcaccgccattcgtgcgcagggcgcgggcgggcagcatgttaataagacctcaacggctattcatctgcgttttgacattcgggcgtccagcctgccagagtattacaaagagcgtctgctcgccgccagccatcatttgatcagcatgatggcgtaa

SEQ ID NO: 484594 - DNA, 711 bp, Shigella sonnei
atggtgaaaaaagcgatagtgacagcgatggctgtaatcagcctctttactctgatgggatgtaataatcgggccgaagtcgatacgctttctccggcgcaggctgccgaactaaaaccgatgccgcaaagttggcgcggcgtgctgccgtgtgccgattgcgaagggatcgaaacctctctgttcctcgaaaaagacggaacatgggtgatgaatgagcgttatctcggtgctcgtgaagaaccttcctccttcgcttcctacggtacatgggcgcgaaccgctgacaagctggtattaaccgacagcaaaggtgaaaagtcatattatcgggcgaaaggcgatgcgctggagatgctcgatcgtgaaggcaatccaattgaatcgcagttcaactatacgctggaaccggcacaatccagtttacctatgacgccgatgaccctgcgaggcatgtatttttatatggctgatgcggcgaccttcactgattgcgcgaccggaaaacgtttcatggtagcgaataacgcagagctggagcgtagctacctggctgcgcgcggtcacagtgaaaaaccggtgttactgtcagtagaaggtcactttacgcttgaggctaatccggatactggtgcgccaaccaaagtattagcgcccgatacggcgggtaaattttacccgaataaggattgcagtagtttggggcagtaa

SEQ ID NO: 484595 - DNA, 825 bp, Shigella sonnei
atggataaaccaaaggcgtactgccgcctgcttctccccagctttcttttactttcggcttgtaccgttgatatcagccagccagacccatcagccacagcagtagatgccgaggcaaaaacatgggctgtcaaattccagcatcaaagctctttcaccgaacaatcaataaaagaaataacggtacctgatctcaaacccggcgatttgctgttctcctcaagccttggggtaacctcatttggaatccgcgtcttcagcacttcctctgtgagtcacgttgcaatctatctgggtgataataacgttgcagaagcgacaggcgctggcgtccagatcgtttcccttaaaaaagcgatgaagcatagtgataagcttttcgtcttacgagtcccggatcttaccccgcaacaagccacagatatcaccgcgtttgccaataaaatcaaagatagcagttataactatcgcggcattgtcgaatttattccctttatggtgactcgccagatgtgctcactgaatccgttctccgaggattttcgccaacagtgcgtcagcggcctggcgaaagcgcagttaagcagtgtgggcgaaggagacaaaaagtcgtggttttgttcggaatttgtcactgatgcatttgccaaagccgggcatccgcttacgctggcgcaatcaggctggattagccctgccgatctgatgcatatgcgtactggcgatgtctctgcgtttaagccagaaacgcagttacagtatgttgggcacctgaagccagggatttatatcaaggcgggtcgctttgttgggctgactcagtga

SEQ ID NO: 484596 - DNA, 1719 bp, Shigella sonnei
atgcgtactagccaatacctgctctccactctcaaggagacacctgccgacgccgaggtgatcagccatcagctgatgctgcgcgccgggatgatccgcaagctggcctccgggttatatacctggctgccgaccggcgtgcgcgttctgaaaaaagtcgaaaacatcgtgcgtgaagagatgaacaacgccggtgcaatcgaggtgtcgatgccggtggttcagccagccgatttgtggcaagagagtggtcgttgggaacagtacggtccggaactgctgcgttttgttgaccgtggcgagcgtccgttcgtactcggcccaactcatgaagaagttatcactgacctgattcgtaacgagcttagctcttacaaacagctgccgctgaacttctatcagatccagaccaagttccgcgacgaagtgcgtccgcgtttcggcgtcatgcgttcccgcgaattcctgatgaaagatgcttactctttccatacttctcaggaatccctgcaggaaacctacgatgcaatgtatgcggcctacagcaaaatcttcagccgcatggggctggatttccgcgccgtgcaagccgacaccggttctatcggcggcagcgcctctcacgaattccaggtgctggcgcagagcggtgaagacgatgtggtcttctccgacacctctgactatgcagcgaacattgaactggcagaagctatcgcgccgaaagaaccgcgcgctgctgctacccaggaaatgacgctggttgatacgccgaacgcgaaaaccatcgcggaactggttgaacagttcaatctgccgattgagaaaacggttaagactctgctggttaaagcggttgaaggcagcagcttcccgctggttgcgctgctggtgcgcggtgatcacgagctgaacgaagttaaagcagaaaaactgccgcaggttgcaagcccgctgactttcgcgaccgaagaagaaattcgtgctgtggttaaagccggtccgggttcactgggtccggtaaacatgccgattccggtggtgattgaccgtaccgttgcggcgatgagtgatttcgctgctggtgctaacatcgatggtaaacactacttcggtatcaactgggatcgcgatgtcgctaccccggaagttgcagatatccgtaacgtggtggctggcgatccaagcccggatggccagggtacgctgctgatcaaacgtggtatcgaagttggtcacatcttccagctgggtaccaagtactccgaagcactgaaagcctccgtacagggtgaagatggccgtaaccaaatcctgacgatgggttgctacggtatcggggtaacgcgtgtggtagctgcggcgattgagcagaactacgacgaacgcggcatcgtatggcctgacgctatcgcgccgttccaggtggcgattctgccgatgaacatgcacaaatccttccgcgtacaagagcttgctgagaaactgtacagcgaactgcgtgcacaaggtatcgaagtgctgctggatgaccgcaaagagcgtccgggcgtgatgtttgctgatatggaactgatcggtattccgcacactattgtgctgggcgaccgtaacctcgacaacgacgatatcgaatataaatatcgtcgcaacggcgagaaacagttaattaagactggtgacatcgtcgaatatctggtgaaacagattaaaggctga

SEQ ID NO: 484597 - DNA, 708 bp, Shigella sonnei
atgagcagtttccagttcgagcaaataggcgttattcgctcgccctataaagaaaaattcgccgttccgcgccagcctggtctggtaaaaagcgccaacggcgaactgcatctcattgctccctacaaccaggccgacgccgttcgcggcctggaagcgttcagccatttatggatccttttcgtctttcatcaaacgatggaaggcggctggcgtccgactgtgcgtccaccgcgcctcggcggtaacgccagaatgggggttttcgcaacacgctctactttccgccctaacccaattggtatgtcgctggtagagctgaaagaggttgtttgccataaagacagcgtgattctgaagctcggcagtctggatctggtcgatggtacgccggtagtggatatcaaaccgtatctcccctttgccgaatcgcttcccgatgccagtgccagctatgcgcaaagtgcgccagctgcagagatggcggtgagttttaccgcagaggtcgaaaagcagcttttgacgctggagaagcgttatccgcagttaacgctgtttatccgcgaagtactggcgcaggacccgcgcccggcctatcgtaaaggtgaggaaacgggcaaaacctatgccgtctggctacatgattttaacgttcgctggcgcgtcaccgacgcaggttttgaagtctttgcgctggaaccgcgttaa

SEQ ID NO: 484598 - DNA, 405 bp, Shigella sonnei
atgcgtgctttaccgatctgtttagtagcactcatgctaagcggctgttccatgttaagcagatcccctgtcgaacccgttcaaagcactgcaccccagccgaaagcggagcctgcaaaaccgaaagcgccgcgcgccacgccggtccgaatttataccaatgcagaagaattagtcggcaaaccgttccgcgatctcggtgaagtcagtggcgactcttgccaggcctctaatcaggactctccgccgagcattccaaccgcgcgtaagcggatgcaaatcaacgcctctaaaatgaaagccaatgcggtattactgcatagctgcgaagtcaccagcggtacgctaggctgctatcgtcaggctgtatgtatcggctctgcgcttaacattacggcgaaatga

SEQ ID NO: 484599 - DNA, 816 bp, Shigella sonnei
atggcgttcaaattcaaaacctttgcggcagtgggagccctgattggatcactggcactggtaggctgcggtcaggatgaaaaagatccaaaccacattaaagtcggcgtgattgttggtgccgaacagcaggtagcagaagtcgcgcagaaagttgcgaaagacaaatatggcctggacgttgagctggtaaccttcaacgactatgttctgccaaacgaagcattgagcaaaggcgatatcgacgccaacgccttccagcataaaccgtaccttgatcagcaactgaaagatcgtggctacaaactggtcgcagtaggcaacacttttgtttatccgattgctggttactccaagaaaatcaaatcactggatgaactgcaggatggttcgcaggttgccgtgccaaacgatccaactaatcttggtcgttcactgctgctgctgcaaaaagtgggcttgatcaaactgaaagatggcgttggcctgctgccgaccgttcttgatgttgttgagaacccaaaaaatctgaaaattgttgagctggaagcaccgcagctgcctcgatctctggacgacgcgcaaatcgctctggcagttatcaataccacctatgccagccagattggcctgactccagcgaaagacggtatctttgtcgaagataaagactccccgtacgtgaacctgatcgtaacgcgtgaagataacaaagacgccgagaacgtgaagaaattcgtccaggcttatcagtctgatgaagtttacgaagcagcaaacaaagtgtttaacggcggcgctgttaaaggctggtaa

SEQ ID NO: 484600 - DNA, 654 bp, Shigella sonnei
atgtctgagccgatgatgtggctgctggttcgtggcgtatgggaaacgctggcaatgaccttcgtatccggattttttggctttgtgattggtctgccggttggcgttctgctttatgtcacgcgtccggggcaaattattgctaacgcgaagctgtatcgtaccgtttctgcgattgtgaacattttccgttccatcccgttcattatcttgctggtatggatgattccgtttacccgcgttattgtcggtacatcgattggtttgcaggcagcaattgttccgttaaccgttggtgcagcaccgtttattgcccgtatggtcgagaacgctctgctggagatcccaaccgggttaattgaagcttcccgcgcaatgggtgccacgccaatgcagatcgtccgtaaagtgctgttaccggaagcgttgccgggtctggtgaatgcggcaactatcaccctgattaccctggtcggttattccgcgatgggtggtgcagtcggtgccggtggtttaggtcagattggctatcagtatggctacatcggctacaacgcgacggtgatgaatacggtactggtattgctggtcattctggtttatttaattcagttcgcaggcgaccgcatcgtccgggctgtcactcgcaagtaa

SEQ ID NO: 484601 - DNA, 1032 bp, Shigella sonnei
atgataaaactttcgaatatcaccaaagtgttccaccagggcacccgcaccatccaggcgttgaacaacgtcagcctgcatgtgccagctggacaaatttatggcgttatcggtgcctcaggcgcgggtaagagtacgcttatacgttgtgtaaacctgctggagcgcccaaccgagggtagcgtgctggtcgatggccaagaattgaccacgctgtcagaatccgagttgaccaaagctcgccgccagattggtatgattttccagcattttaacctgctctcttcgcgtactgtttttggcaacgtggctctgccgctggagctggacaacacaccgaaagacgagatcaaacgtcgcgtgacggaattgctgtcattggttggtcttggcgataagcatgatagctacccgtcgaatctttccggtgggcagaaacaacgtgtggcgattgcccgtgcattagccagcaatcccaaagtattgctgtgtgatgaagccaccagcgcgctggacccggcaacgacacgttctattctcgaactgctgaaagacattaaccgccgtctgggtttgacgattctgttgatcacccacgaaatggacgttgtgaagcgtatttgtgattgcgtggcggtcatcagcaatggcgaactgatcgagcaggacacggtaagtgaagtgttctcgcatccgaaaacgccgctggcgcagaagtttattcagtcgaccctgcatctggatatcccggaagattaccaggaacgtctgcaagcggagccatttactgactgcgtgccgatgctgcgtctggagtttaccggtcaatcggtcgatgccccactgctttctgaaaccgcgcgtcgtttcaacgtcaacaacaacattattagcgcgcagatggactacgccggtggcgttaaattcggcatcatgctgactgaaatgcacggcacacaacaagatacgcaagccgccattgcctggctgcaggaacaccatgtaaaagtagaggtactgggttatgtctga

SEQ ID NO: 484602 - DNA, 576 bp, Shigella sonnei
gtggcgaagagcgtacccgcaatttttcttgaccgtgatggcaccattaatgtcgatcacggctatgtccatgagatcgacaactttgaatttatcgacggtgttattgacgccatgcgcgagctaaaaaaaatgggctttgcgctggtggtagtaaccaaccagtctggcattgctcgcggtaaatttaccgaagcacagtttgaaacgctgaccgagtggatggactggtcgctggcggaccgagatgtcgatctggatggtatctattattgcccgcatcatccgcagggtagtgttgaagagtttcgccaggtctgcgattgccgcaaaccacatccggggatgcttttgtcagcacgcgattatttgcatattgatatggccgcttcttatatggtgggcgataaattagaagatatgcaggcagcggttgcggcgaacgtgggaacaaaagtgctggtgcgtacgggtaaacctattacacctgaagcagaaaacgcggcagattgggtgttaaatagcctggcagacctgccgcaagcgataaaaaagcagcaaaaaccggcgcaatga

SEQ ID NO: 484603 - DNA, 222 bp, Shigella sonnei
atgggaattattgcttggattatttttggcctgatagccggcattatcgccaagctaatcatgccggggcgtgatggtggtggatttttcctgacctgtattctcgggatagtcggtgcggtggtcggcggctggctggcgaccatgtttggcattggcggctccatcagcggttttaatttgcacagcttcctggtggcggtggtgggtgaggtagcctga

SEQ ID NO: 484604 - DNA, 735 bp, Shigella sonnei
gtgagtcattaccatgagcagttcctgaaacaaaatccgttagccgtcctgggcgtgttacgcgatttgcacaaagccgcaattcctttgcgtctcagttggaatggcgggcagctgatcagcaaaatactggcaataaccccggataaactggtgctggatttcggcagtcaagccgaagacaacatcgctgtgctaaaggcacagcacattaccattaccgccgaaactcagggtgcgaaagtcgagtttactgttgaacaactacagcagagtgaatacttgcagcttccggcatttatcaccgtaccgcctcccaccttatggtttgtacaacgacgccgatatttccgcatctccgccccactccatccgccttatttttgccagaccaaactggcggataacagtacgttacgtttccgcctgtatgatttgtcgttaggcggcatgggcgcattactggaaacagcaaagcctgccgaattacaagaaggcatgcgcttcgctcagattgaagtcaacatggggcaatggggtgtttttcactttgacgcccagttaatctctatcagcgagcgcaaagtgattgatggcaagaatgaaaccatcaccactccccgtctgagcttccgttttcttaacgtcagcccgacggtggagcggcaattacagcggattattttctctctcgagcgagaagcccgggaaaaagcggacaaagtgcgcgactga

SEQ ID NO: 484605 - DNA, 612 bp, Shigella sonnei
gtgaaattgagatggtttgcctttttgattgtgttattagcgggttgttcatcaaagcatgactatacgaacccgccgtggaacgcgaaagttccggtgcaacgtgcgatgcagtggatgccaataagccagaaagccggtgcagcctggggcgtcgatccacaattgatcacggcgattatcgctatcgaatcgggtggtaatccgaatgcggtgagtaaatcgaatgccattggtttgatgcagttaaaagcttcaacctccggacgtgatgtttatcgccgtatgggctggagtggtgagccgacgaccagcgagctgaaaaatccggagcgtaatatttcaatgggggcggcttacctgaatattctggaaaccggcccgctggcaggcattgaagatccgaaggtactgcaatatgcgctggtggtgtcatacgctaacggggcaggtgcgctgctacggactttctcgtcagatcggaaaaaggcgatcagcaaaatcaacgatttggatgctgacgagttcctcgaacacgtagcgcgaaatcaccctgcgccgcaggctccgcgctatatctacaaacttgagcaggcactggacgcgatgtaa

SEQ ID NO: 484606 - DNA, 915 bp, Shigella sonnei
atgtctctgtttcacttaattgccccatcgggttactgcattaaacagcacgccgcgctgcgtggtatccagcgccttaccgacgaggggcatcaggtcaataacgtcgaggttattgcccgtcgttgtgagcgttttgcgggtacggaaacggagcgcctggaagatctcaattcccttgccagactgaccacccccaacaccatcgtgctggctgtacgcggcggttacggtgccagtcgtttactggcagatattgactggcaggcactggtggctcgccaacaacatgacccgttgctcatttgcgggcatagcgattttaccgccattcagtgcggtcttctggcgcatggcaatgtcatcacctttagcggccccatgctggtagcaaactttggcgcggatgaactgaacgcctttaccgagcaccatttctggctggcgttacgcaatgaaaccttcaccattgaatggcaaggggaaggcccgacatgtcgggccgaaggcacgttgtggggaggcaatcttgcgatgctgatttcactgatcggtacaccgtggatgccaaaaattgagaacggtattctggtgctggaagatattaacgagcaccctttccgggacgaacgtatgctgttgcagctctatcatgcgggaattttgccacgtcagaaggcgatcattctcggtagctttagcggcagcacgcccaatgattatgacgcaggttacaacctggagtcagtgtacgcgtttttgcgttcccgcctgtcgattccactcattaccggcctcgattttggtcatgaacaacgcacggttacgctgccgttgggcgcacatgccattctgaataacacccgggaaggcactcagttgacgattagcggtcatcctgttcttaaaatgtaa

SEQ ID NO: 484607 - DNA, 1737 bp, Shigella sonnei
ttggatgccacaacaataattagccttttcatcttaggatccatccttgtcaccagcagtatattacttagttcattttcttcccgtcttggcattcctattctggttatttttctggcgatcggcatgctggcaggagtcgatggcgtcggcggtatcccgtttgataattaccccttcgcctacatggtaagtaacctggcactggcgattattttgctcgacggcgggatgcgcactcaggccagttcctttcgtgtggcgttaggaccggcactgtcgctggcgacgctgggcgtgcttatcacctctggtttaaccggcatgatggcggcgtggctgtttaatcttgatttgattgaaggcttattaatcggcgctatcgtcggctctaccgatgctgcagcggtcttttctctgctgggtggtaaggggcttaacgaacgtgttggctcgacgctggaaattgaatccggcagtaatgatccaatggcggtctttctgacgattaccctgattgcgatgatccagcaacatgaaagcagtgtcagttggatgttcgtggtcgatattctgcagcaatttggcctcgggattgtcatcggacttggcggtggttatttactgctgcaaatgattaatcgcatcgccctgcctgccggattatatccattgctggcattaagcggcggtattttaatttttgctttaaccacggcgctggaaggcagcggtattctggctgtttatctgtgcggttttctgctgggtaatcggccgattcgcaaccgctacggcatcctgcaaaatttcgacggcctcgcctggctggcgcaaatcgccatgttcctggtgctggggctattggttaacccaagcgatctgctgcctattgccattccggcgctcattttgtcggcatggatgatattcttcgcccgtcccctttcggtatttgctggattgctccccttccgcggtttcaatctgcgtgagcgcgtgtttatcagctgggtaggattacgcggcgcggtgccaatcatcctggccgtgttcccgatgatggcggggctggagaatgcacgtctgttctttaatgtcgccttctttgtggttctggtttcactgctcttgcagggaacatcactctcgtgggcggcgaaaaaagccaaagtggtggttccgcccgtcggacgtccagtgtcacgcgttggtctggatattcatccggaaaatccgtgggagcagtttgtttatcaattgagtgccgataaatggtgtgtaggtgcggcactgcgcgatctgcatatgccaaaagagacgcgtattgcggcactatttcgtgataaccagttgcttcatcctaccggcagcacccgactgcgcgaaggcgatgtgttgtgtgtaattggtcgggaacgcgatctcccggcgctcggtaaactgttcagccagtcgccaccggtcgcgctggatcaacgcttctttggtgacttcattctcgaagccagcgccaaatatgctgatgttgcgctgatatatggcctggaagacgggcgagaatatcgtgataagcagcaaacgctgggtgaaattgtccagcagttgttaggcgcggcaccggttgtcggtgaccaggtagagtttgccgggatgatctggacggtggccgagaaagaagataatgaagtgttgaagattggcgtacgggtggctgaagaggaagctgaatcttaa

SEQ ID NO: 484608 - DNA, 150 bp, Shigella sonnei
atgatagtgtccattaaaaggatggacactatttccctggaacctgaactcaccgcacaggcgttctacataaaacgcttacgcttcattgttgactcgaactcgacttcagataaatcacgctttacccttgatggagcctgtacatag

SEQ ID NO: 484609 - DNA, 1071 bp, Shigella sonnei
atgacccgtccgatacaggccagcctcgatctgcaggcattaaaacagaatctgtccattgtccgccaggccgcgccgcacgcgcgcgtctggtcggtggtaaaagcgaacgcttacgggcatggtattgagcgtatctggagcgcgctcggggccaccgatggctttgcattacttaacctggaagaggcaataacgttacgtgagcgcggctggaaggggccgatcctgatgctggaaggatttttccatgctcaggatctggagatttatgaccagcaccgcctgaccacctgcgtacacagcaactggcagctcaaagcactgcaaaatgcgcggctaaaagcaccgttggatatttatcttaaagtgaacagtgggatgaatcggttgggcttccagcccgatcgcgtgcttaccgtctggcagcagttgcgggcaatggcgaatgttggcgagatgaccctgatgtcgcattttgccgaagcggaacatcctgatggaatttccagcgcgatggcgcgtattgagcaggcggcggaagggctggagtgtcggcgttcgttgtccaattcggcggcgactctgtggcacccggaagcgcattttgactgggttcggcctggcattattttgtatggcgcttcgccgtccggtcagtggcgtgatatcgccaataccggattacgtccggtgatgacgctaagcagtgagattattggtgtccagacgctaaaagcgggtgagcgtgtgggctacggcggtcgctatactgcgcgcgatgaacagcgaatcggcattgtcgccgcagggtacgccgacggttatccgcgccacgcgcctaccggtacccctgttttagtggacggcgtgcgcaccatgacggtggggaccgtctcgatggatatgctagcggtcgatttaacgccttgcccgcaggcgggtattggtacgccggttgagctgtggggcaaggagatcaaaattgatgatgtcgccgccgctgccggaacggtgggctatgagttgatgtgcgcgctggtgctacgcgtcccggttgtgacggtgtaa

SEQ ID NO: 484610 - DNA, 1299 bp, Shigella sonnei
atgcgagttgtcatactgggaagtggtgtggtaggcgttgccagcgcctggtacttaaatcaggcaggacatgaggtcaccgtcattgatcgggagccgggggccgccctggaaaccagcgccgcgaatgccgggcaaatctcccccggatatgctgcaccgtgggcggcaccaggtgtgcctttaaaagcgatcaaatggatgttccagcgccatgcgccgctggcggttcgtctcgacggtacgcagtttcagttgaaatggatgtggcaaatgttacgtaactgcgacaccagccactacatggaaaacaaagggcggatggtgcgtctggcggaatacagccgtgattgcctgaaagcattgcgcgccgaaaccaatattcagtatgaagggcgtcagggtgggacgctgcaactgttccgtaccgaacaacagtatgaaaatgcgacccgcgatatcgccgtgctggaagatgccggcgtaccgtatcagctgctggaatccagccgcctggcggaagtggagcccgcgctggcagaagtagcgcacaaactgacgggtggtctgcaactgcccaatgatgaaaccggagactgccagctgtttacccagaatctggcgcggatggcagagcaggcgggggttaaattccgctttaatacgcccgttgaccaactgctttgcgacggcgagcaaatctacggcgtgaagtgtggcgatgaagtgattaaggccgatgcgtatgtgatggcgtttggttcttactcgacggcgatgctcaaaggcattgttgatattccggtgtatccgctgaaaggctactcgctgactattccaattgcgcaggaagatggtgcgccagtatccaccattcttgatgaaacctacaaaatcgccattacccgtttcgataaccgcattcgtgttggcggaatggcggaaattgttggttttaacaccgagctgttgcaaccgcgtcgtgaaacgctggaaatggtggttcgcgatctctatccacgcggcggtcatgtcgagcaggcgactttctggacggggttgcgcccgatgacgccagacggtacgccggttgtcgggcgtacacgctttaaaaatctgtggctgaataccggtcacggcacgctcggctggacgatggcttgcggttccggtcagttgttaagcgatctgctctctggtcgcacgccagcgatcccatatgaggatctaagcgtagcgcgctacagccgtggatttacgccatcacgtccgggccatttacatggcgcacacagctaa

SEQ ID NO: 484611 - DNA, 1533 bp, Shigella sonnei
atggcgacgatcgattctatgaataaggacaccacacgtttgagcgatggacccgactggacgttcgacctgctggatgtttatctggcagagatagaccgggtggcgaaactctaccggctggatacctacccgcaccagattgaagtgataacctcagaacagatgatggatgcctactccagcgtcggcatgccaattaactatccgcactggtcattcggtaaaaaatttatcgagactgaacggctgtataagcacggtcagcaagggctggcctatgaaatcgtcattaactctaacccgtgtatcgcttacctgatggaagagaacaccattaccatgcaagcgctggtgatggcacacgcctgctatgggcataactctttctttaaaaacaattacttattccgcagttggaccgacgccagttcgattgtcgattatctgatttttgcccgtaaatatattaccgagtgcgaagaacgttatggcgtggatgaagtagaacggcttctggactcgtgccacgcgctgatgaactacggcgtggaccggtacaaacgcccgcaaaaaatctcgctgcaagaagagaaagcccggcagaaaagtcgcgaagagtatctgcaaagtcaggtcaatatgctctggcgtactctgccgaagcgcgaggaagagaaaacggttgctgaagcgcgccgctatccgtccgaaccacaagaaaacctgctctattttatggagaaaaatgcgccactgctggaatcatggcagcgtgaaatcctgcgtattgtgcgtaaggtgagccagtatttttatccgcaaaaacagactcaggtgatgaacgaaggctgggcgaccttctggcactacaccatccttaaccatctgtatgatgaagggaaagtaacggaacgttttatgctggagtttttgcacagccacaccaatgtggtcttccagcccccctataacagcccgtggtacagcggcatcaacccgtatgccctcgggttcgccatgttccaggatattaaacggatttgtcagtcgccaacggaagaagacaaatactggttcccagatatcgccggttccgactggctggaaacgctgcatttcgcgatgcgtgatttcaaagatgaaagttttatcagccagtttctgtcaccgaaagtgatgcgtgatttccgcttcttcaccgtgctggatgatgatcggcataattatctggagatttccgctattcataatgaagaaggttatcgggagatgcgtaaccggttatcgtcgcaatataacttaagtaatctggagccgaatattcagatctggaacgtggatttgcgcggcgaccgttcgctgacgctgcgttatattccacataatcgcgcaccgctggatcgggggcgcaaagaagtcctgaagcatgtgcatcgcctgtggggatttgatgtgatgctcgaacagcaaaacgaagacggcagcatcgagttgctggaacgttgcccgccaagaatgggaaatctgtaa

SEQ ID NO: 484612 - DNA, 720 bp, Shigella sonnei; identical to SEQ ID NO: 472566

SEQ ID NO: 484613 - DNA, 1542 bp, Shigella sonnei
atggagatctcctggggccgcgcgctatggcgcaattttttgggccagtcccccgactggtacaaactcgccctcatcattttcttaatcgtaaacccgttaattttcctcatcagccctttcgtcgcgggctggttgctggtagcggaatttattttcactctggcgatggccctgaaatgctacccgctgctccccggtggtctgttggctatcgaagcggtattcatcggcatgaccagcgcggaacacgtccgtgaagaggtggcggcaaatcttgaagtcttgctgttactgatgtttatggtggcgggtatctattttatgaaacagctattgctgttcatatttacccgtttgctgttaagcattcgctccaaaatgctgctgtcgctctctttttgcgtggcggcggcgttcctctccgcgttcctcgatgccttaaccgtcgtggcggtggtgatcagcgttgcagtcggtttttatggtatttatcaccgcgtagcctcttcccgtactgaagataccgacctgcaagacgatagtcatatcgacaagcattacaaagtggttctggaacagttccgtggctttctgcgtagcctgatgatgcatgccggtgtcggcaccgcattaggcggcgtgatgaccatggtgggcgaaccacagaacctgatcatcgctaaagcggctggctggcattttggcgatttcttcctgcgcatgtcgccggtgaccgttccggttctgatttgtggcctgttaacctgcctgctggtggagaagctgcgttggtttggctacggtgaaacgctgccggagaaagtccgcgaagtgctgcagcagtttgacgatcaaagccgccaccagcgtacccgtcaggataaaatccgtctgattgtccaggcgattattggcgtctggttggtgactgcgctggcgttgcatctggcggaagttggtttgattggtttgtcagtcattattctggcgacatcattgatcggtgtcaccgatgagcatgctatcggtaaagccttcaccgaatctctgccattcaccgcactgttgacggtgtttttctcggtagtcgcggtgattatcgaccaacaactgttttcgccgattattcagtttgtgttgcaggcatcggaacatgctcagctgtcgctgttctatatattcaacggtctgctgtcatccatttcggataacgtcttcgtggggacgatttatatcaacgaagcgaaagcggcaatggaaagtggcgctatcacgttgaagcaatacgagctgctggcggtcgccattaataccggtaccaatctgccctctgtcgctacgccgaacggtcaggctgcgttcctattcctgctgacctctgcactcgcgccattgattcgcctctcttatggccgcatggtgtggatggccctgccttacaccctcgtcctgacactcgtcggactgctctgcgtcgagtttacgcttgcccctgtaaccgaatggtttatgcaaatgggctggatagcaacgctttga

SEQ ID NO: 484614 - DNA, 531 bp, Shigella sonnei; identical to SEQ ID NO: 459081

SEQ ID NO: 484615 - DNA, 744 bp, Shigella sonnei
atgtctgctctccccgtggatgacgtctgggggattggacggcggatcagcaaaaaactggacgcgatggggatcaaaaccgttcttgatttggcggatacagatatccggtttatccgtaaacattttaatgtcgtgctcgaaagaacggtgcgtgaactgcgcggtgaaccctgtttgcaactggaagaatttgcaccgacaaagcaggaaattatctgttcccgctcgtttggtgaacgtatcacggattatacgtcgatgcggcaggccatttgtagttacgctgcccgggcggcggaaaaacttcgcagtgagcatcaatattgtcggtttatctccacatttattaagacgtcaccatttgcgctcaatgaaccttattacggcaatagcgcgtcggtaaaactgctgacgcccactcaggacagcagggatatcattaacgccgctacgcgatctctggatgccatctggcaagcgggccatcgctaccaaaaagcgggcgtgatgctgggggatttcttcagtcagggagtcgcgcagctcaatttattcgatgacaacgcaccgcgccccgggagtgagcaattgatgacggtaatggatacactgaatgctaaagagggcagaggaacactctattttgccgggcaggggatccaacaacaatggcagatgaagcgagccatgctttcaccacgttatacaacgcgaagttctgatttactgcgggtcaaataa

SEQ ID NO: 484616 - DNA, 3798 bp, Shigella sonnei
ttgcataccgctggatttatcatcgacgccaacccgcagtcagcgaaaattgcgacattatctgccagcaataatggtgtactcgccaatgagaatgcagcaaacaccgtctcggtcaatgtcgctgatgaaggaagcaacccaatcaatgatcataccgtcacgtttgcggtattaagcggatcggcaacttccttcaacaatcaaaacaccgcaaaaacggatgttaatggtctggcgacttttgatctgaaaagtagtaagcaggaagacaacacggttgaagtcacccttgaaaatggcgtgaaacaaacgttaatcgtcagttttgtcggcgactcgagtaccgcgcaggttgatctgcagaagtcgaaaaatgaagtggttgctgacggcaatgacagcgccacaatgaccgcgaccgtccgggatgcaaaaggcaacctgctcaatgacgtcatggtcactttcaatgttaattcagcagaggcgaaactgagccaaaccgaagtgaatagccacgacgggatcgccacagctacgctgaccagtttgaaaaatggtgattatagggttacggcctctgtgagctctggttcccaggctaatcaacaggtgaattttatcggtgatcaaagtactgctgccctgaccctcagtgtgccttcaggtgatatcaccgtcaccaacacagctccgcaacatatgactgcaaccttgcaggataaaaatggcaacccactaaaagataaagaaatcaccttctctgtgccaaacgacgtcgcaagtaagttctcgattagcaacggaggaaaaggcatgacggatagtaacggggttgcaatcgcctccctgaccggcacgttagcgggcacgcatatgatcatggctcgtctggctaacagcaatgtcagcgatgcacagccaatgacgtttgtggcggataaagacagagcggttgtcgttttgcaaacatcgaaagcggaaatcattgggaatggcgtggatgagacaactctgacagcaacagtgaaagatccgtcgaatcatccggtggcggggataacggtaaacttcaccatgccacaggacgttgcggcaaactttacccttgaaaataacggtattgccatcactcaggccaatggggaagcgcatgtcacgctgaaaggtaaaaaagcgggcacgcatacggttaccgcaacgctgggtaataacaataccagtgattcgcagccggtaacatttgtggcggacaaagcctcggctcaggttgtcctgcagatatcaaaagatgagatcacaggtaatggcgtcgatagcgcaacgctaactgcaacggttaaagatcagttcgacaatgaggtgaataatcttccggtaacattcagctcagcctcttcaggactcaccctgaccccgggagtaagtaataccaatgagtctggcatcgcgcaggccactctcgcaggcgttgcctttggtgagcagacggtcactgcatcactggctaataatggtgccagcgacaacaaaactgtgcattttattggcgacacagcggcggcaaaaattatcgagttgacgcctgtcccagacagcataatcgccggtaccccgcagaacagctccggcagcgccatcaccgccacagtcgttgataataatggctttccggtgaaaggtgtgactgtgaacttcaccagcagaacaaactctgccgaaatgacgaatggcggccaagccgtaacgaacgaacagggtaaggctaccgtcacttataccaatacccgctcctcgatagaatcaggagcgagaccggataccgttgaggccagtctggaaaatggtagctccacgcttagcacatcaattaatgtcaacgctgatgcgtctacggcacatctcacctggctacaggcactttttgatacagtctccgcaggcgagacaaccagtctgtatattgaggtgaaggataattacggcaacggtgtcccccagcatcaggtgaccctcagcgtttcaccaagtgaaggcgtgccccccagtaataacgctatatatactaccaaccacgacggcaatttttacgcaagctttaccgctacaaaagccggggtttatcaagtgacggcaaccctcgaaaatggcgattcgatgcaacaaacagtgacctatgtgccgaacgtcacgaatgccgaaatcacgctggcaacctcgaaggatccggtgattgccgacaataacgatctcacgacactaacagcaacagtcgctgatacagagggcaatgcgatagccaacactgaagtaacatttactctgccggaagatgttaaggcgaacttcacgctgagcgatggcggtaaagcgattactgatgctgaaggcaaagcgaaagtcacgctgaaaggtacaaaagcaggcgctcatactgttacagcatcgataactggcggtaagagtgagcagttggtggtgaactttactgcggatacgctcactgcgcaggttaatcttaacgttaccgaggacaattttatcgctaataacgtcgggatgaccaggctgcaggcaacagtgactgatggaaacggcaacccgttagccaatgaggcggtgacattcacgctaccggcagatgtgagcgcaagctttactctcggacaaggcggttccgccattactgacatcaacggcaaggctgaagttacactgagcggtacaaaatccggcacctaccccgtgacagttagcgtgaacaattatggtgtcagtgatacgaaacaggtgactttgattgccgatgctggtaccgcaacactagcctccttaacctctgtatactcattcgtcgtcagcacgaccgaaggcgcgaccatgactgcaagcgtcactgacgctaacggcaacccggtagaaggcataaaagttaatttccgcggaacctccgtcacgctaagcagcaccagcgttgaaacggatgatcggggtttcactgaaattcttgtgacaagcaccgaagtcggactgaaaacagtttcagcctctctggcagataaacctactgaagtcatatcgcgattactgaatgcaaaagcagatattaattctgcaacgattaccagtctggagatacctgaaggtcaggtcatggtcgcacaagacgtagcagttaaagctcacgtcaacgaccagtttggcaacccgattcttaatgaatctgtaacattcagtgcagagccaccagagcacatgaccatcagccaaaatattgtctctactgatacgcatggtatagccgaggtctccatgacgcccgaaagaaacggttcgtatatggtgaaagcatccctggcgaatggagcctcacttgagaaacaactggaggctattgatgaaaaactgacactctcggcgtccagcccgcttatcggtgtcaattccccaacaggtgcaactctgacggcaacgctaacttctgcaaatggcactccagtggagggtcaggtcatcaactttagcgtaacgccagaaggtgcgacgttaagtggcggaaaagtgagaactaactcttctggtcaggctccagtcgttctgaccagcaataaagtcggtacatatacggtgactgcatcgttccataacggcgtaacaatacagacacagacaaccgtgaaagtcactggcaactcaagcaccgcccatgttactagctttatcgctgatccatcgactatcgccgccaccaacagtgatttaagtaccttaaaggcaacggttgaggatggctga

SEQ ID NO: 484617 - DNA, 1152 bp, Shigella sonnei
gtggccctgttcgataaagacgatcggcaaagtaatcctcatgccataaccgctggacttaactatacccccttcccgctgatgaccttcagcgcggagcaacgccagggtaaacagggcgaaaatgacacccgttttgccgtcgattttacctggcaacctggcagcgcaatgcagaaacagcttgacccgaatgaagtcgctgcacggcgtagccttgcaggcagccgttatgatctggtggatcgcaacaacaatatcgttctggaatatcgcaaaaaagaactggttcgcctaaccctgacagaccccgtgacagggaagtcaggagaagtgaaatcactggtttcgtcgctacaaaccaaatatgccctgaaaggctataacgtcgaagccaccgcactggaagctgccggtggcaaagtggtcacaacgggtaaagatattctagttaccctgccggcttaccggttcaccagtacgccagaaaccgataacacctggccgattgaagtcaccgccgaagatgtcaaaggcaatttgtcgaatcgtgaacagagcatggtggtcgttcaggcacctacgctaagccagaaagattcctcggtatcgttaagtacccaaacattgaacgcggattcccattcaaccgccacactgacttttattgcgcatgatgcagcaggtaatcctgttgtcgggctggtgctctcgacgcgtcacgaaggtgttcaggacatcaccctttctgactggaaagataatggtgacggaagctatacccagatcctgaccacaggagcgatgtctggcacgctgacgctgatgccacagctgaatggtgtggatgcggctaaagcccccgccgtggtgaatatcatttctgtttcgtcatcccgaactcactcgtcaattaagattgataaggaccgttatctctccggcaatcctatcgaggtgacggtagaactgagagatgaaaatgacaaacctgttaaggaacaaaaacagcaactgaataacgcagtcagcatcgacaacgtgaaaccaggagtcactacagactggaaagaaaccgcagatggcgtctataaggcgacctataccgcctataccaaaggcagtggacttactgcgaagctattggaatga

SEQ ID NO: 484618 - DNA, 1029 bp, Shigella sonnei
atgttagctcgttcagggaaggtaagcatggctacgaagaagagaagtggagaagaaataaatgaccgacaaatattatgcgggatgggaattaaactacgccgcttaactgcgggtatctgtctgataactcaacttgcgttccctatggctgcggcagcacaaggtgtggtaaacgccgcaacccaacaaccagttcctgcacaaattgccattgcaaatgccaatacggtgccctacacccttggagcgctggaatcggcccaaagcgttgccgaacgtttcggtatttcggtggctgagttacgcaaactcaaccagtttcgtacgtttgctcgaggttttgataatgtccgccagggtgatgaactggatgtcccggcacaagttagtgaaaaaaaattaaccccgccgccgggtaatagcagtgacaacctcgagcaacagatagccagtacttcacagcaaatcgggtctctgctcgccgaagatatgaacagcgagcaagcggcaaatatggcgcgtggatgggcctcttctcaggcttcaggcgcaatgacagactggttaagccgcttcggtaccgcaagaatcacgctgggcgtggatgaagattttagcctgaagaactcccagttcgattttctccatccgtggtatgaaacgcctgataatctctttttcagtcagcatactctccatcgtactgacgagcgtacgcagattaacaacggcttaggttggcgtcatttcactcccacatggatgtcgggcatcaacttctttttcgaccacgatcttagccgttaccactcccgcgtcggcattggcgcggagtactggcgcgactatctaaaattaagcagtaacggctatttgcgactgaccaactggcgcagcgcacctgaactggacaacgattataaagcacgcccggccaatggctgggatgtacgcgcagaaagctggctacccgcctggccgcaccttggcggtaaactggtctatgaacagtattatggcgattaa

SEQ ID NO: 484619 - DNA, 150 bp, Shigella sonnei
atgaacgccatcaccattttcccctcgattataaaacttgagttattcagtagtctcccctcttgcaactcacacccaaaactgcctaacgaaaagttattaattttcaatcgtattgctatcagtatttacattttttcgctgtgctag

SEQ ID NO: 484620 - DNA, 798 bp, Shigella sonnei
atgattaagtggccctggaaagtacaagaatcagcacatcaaactgcccttccctggcaggaagcactatcgatcccccttttaacgggtctgacggaacaggaacaaagcaaattagtcactcttgccgaacgttttttacagcaaaagcggcttgttcctttacagggctttgaactggattcattaagaagctgccggatagcacttctattttgcctacccgttctggagttaggactggaatggctggatggttttcatgaagtcttaatttatcctgcgccatttgtggtcgatgatgaatgggaagacgatatcggtctggtgcataaccaacgtattgttcagtcaggtcagagctggcagcaagggcctatcgttttgaactggttggatatacaagattcttttgatgcatctggttttaacctgattattcatgaagtcgctcataagctggacacccgtaacggcgatcgcgccagcggagttccctttattccgttgcgtgaggttgctggctgggaacacgatcttcatgctgcaatgaacaacattcaggaagaaatcgaattggttggcgagaatgcggcgagcattgatgcttatgcagccagcgatcctgctgaatgttttgccgtactttctgaatatttctttagcgccccagaactttttgctcctcgtttcccttcattgtggcaacgtttctgccaattttatcaacaagatcctttgcagagactgcatcacgctaatgatacagactcgttttcggcgacgaatgttcattaa

SEQ ID NO: 484621 - DNA, 423 bp, Shigella sonnei
atgaaccgattctcaaaaactcaaatttatttacattggataacgctgcttttcgttgcaataacctatgccgcgatggaactccgtggctggtttcctaaaggtagtagtacttatctgctgatgcgagaaacacattacaatgcgggtatattcgtttgggtgttaatgttttcacgcctgattataaaacaccgttatagtgatccttctattgtaccaccgccacctgcctggcaaatgaaagcggcttcgctaatgcacatcatgctttatataaccttccttgcacttcctctgctggggattgctttgatggcttacagtggaaaatcgtggagtttccttggtttcaatgtgtctccctttgttaccccaaacagcgaaattaaagcactgataaaaaatattcacgaaacctag

SEQ ID NO: 484622 - DNA, 672 bp, Shigella sonnei
atgactctggaggaaactgttttggcaattcgtcttcacaaactggctgttgctttaggtgtctttattgttagcgctcctgccttttcgcatggtcatcactcacacggcaaacccttaacagaggtcgaacaaaaagctgctaatggtgtttttgatgatgccaatgtacaaaaccgaacgctcagtgactgggatggagtctggcaatccgtttatcctttactgcaaagtggcaaacttgaccccgtctttcagaagaaagcggatgcagataaaattaaaacatttgctgaaattaaagattattatcacaaaggttatgcaacagatatcgagatgattggcattgaggacggcattgttgaattccatagaaataatgaaacaacatcctgtaaatatgattacgatggatacaaaatactcacctataaatcaggcaagaaaggcgttcgttacttattcgaatgtaaagatcctgaaagcaaagcccctaaatatatacaatttagcgatcatataattgcaccacgaaaatcatctcattttcacatttttatgggtaatgattcacagcaatttttattaaatgaaatggaaaactggccaacgtattatccatatcagttgagtagcgaagaagtggtcgaggaaatgatgtctcattga

SEQ ID NO: 484623 - DNA, 636 bp, Shigella sonnei
atgcgtctgacagcaaaacaggtgacatggctgaaagttagcctgcatcttgccggattgttgccgtttctctggctggtctgggcgatcaatcacggtggactgggtgccgatccggtgaaagatattcagcattttaccggtcgcactgcactgaaatttttgctggcgaccttgttaatcacacctctggcacgctacgcaaaacagccgttattgatacgcactcgccgcctgttaggcttatggtgctttgcctgggcgacactgcatttaaccagttacgcattgctggagctgggcgtgaataatctggcgttattaggcaaggagttaattacccggccttatttaacgttaggaattatcagctgggttattttgcttgctttagcgtttacttcaacccaggcgatgcagcgaaaactcggcaagcactggcaacagttgcataatttcgtctatcttgtcgcgatcctggccccaatacattatctgtggtcagtgaagattatttcaccgcagccgctcatctacgctgggctggctgtactgcttttagccttacggtataagaagttgcgttccctttttaagcggttacgcaagcaggttcacaacaaattatctgtataa

SEQ ID NO: 484624 - DNA, 1005 bp, Shigella sonnei
atgaaaaagaatcaatttttaaaagaatcagatgttacggccgagtcggtattctttatgaagcgtcgacaggtgttaaaagcactgggcatcagcgcagctgcactttctttgcctcacgctgcgcatgccgatctgcttagctggtttaaagggaacgatcgcccgcccgcccccgccggaaaaccgctggagttcagcaagcctaccgcctggcaaaataatctgccactgacgccagtagataaagtctccggttataacaacttctatgaattcgggctggataaagccgatcccgccgctaatgctggtagcctgaaaaccgatccatggacactgaaaatcagcggcgaagtggcaaaaccattgaccctcgatcacgatgatttaacccgtcgcttcccgctggaagagcgtatttatcgtatgcgctgcgtggaggcatggtcgatggtggtgccgtggattggttttccgctgcacaaattgctggcgcttgccgaacccaccagcaatgcgaagtatgtcgctttcgaaacaatttatgcaccggaacaaatgccaggccagcaggaccgctttatcggcggcgggctgaaatatccttatgtcgaaggattgcgtctcgacgaagcaatgcatccgctcacactgatgaccgtgggtgtttatggcaaggcgttaccgccacaaaatggcgcgccggtacgactgattgtgccgtggaaatatggctttaaagggattaaatcgatagtcagtattaagctgacccgcgagcgtccgccaaccacctggaatctggctgcgcctgacgaatacggtttttacgccaacgttaatccgcatgttgatcacccgcgctggtcacaggctaccgaacgatttattggttcaggcggcatcctcgatgttcagcgccagccaacgctactgtttaatggttacgccgaccaggtggcatcgctgtatcgtggcctggatttgcgggagaatttctga

SEQ ID NO: 484625 - DNA, 414 bp, Shigella sonnei
atgttaaagcgttatttagtactctccgtagtaacggcagcattttcattaccttctttggtttatgccgcacaacaaaacattcttagcgtgcacattttgaaccagcaaaccggaaaacccgctgccgacgtgacagtcactcttgaaaagaaagcggacaacggctggttacaacttaataccgccaaaacagataaggatggacgaattaaggcactgtggcccgagcaaactgcaactacgggcgattaccgtgtcgtatttaaaaccggggactatttcaagaaacaaaatcttgaaagtttcttccctgagatccccgttgaatttcatattaataaagtgaacgagcattatcatgtgcctttattacttagccaatatgggtattcaacctatcgtggcagttaa

SEQ ID NO: 484626 - DNA, 672 bp, Shigella sonnei
atgaagattttacttattgaagataatcaaaggacccaggagtgggtaacgcaggggctttccgaagcgggttatgtcattgatgccgtttctgatggcagagatgggctttatcttgcgctgaaggatgattatgcattgatcattctggatattatgcttccgggtatggatggctggcagatcttacaaacgttaagaacagcaaagcaaacccctgttatttgccttactgcaagggattctgtcgatgacagagtcagagggctggacagtggagcaaatgattatctggtaaaacctttttcattttctgagttgctggcaagggttcgggcacaattaaggcaacatcacgctttgaattcaacattagaaatcagtggcttaagaatggactctgtaagtcaaagtgtgagcaggaacaatatcagtattacactgacgcgcaaggagtttcagttactttggctactggcctccagagctggcgaaattatacccagaacggttattgcgagtgaaatttggggaatcaactttgatagtgataccaatacggtggatgtcgccattcgcaggctccgcgcaaaagttgatgatccttttcctgaaaagctaatcgccacaatccgggggatgggctattcattcgtagcggtaaaaaaataa

SEQ ID NO: 484627 - DNA, 1359 bp, Shigella sonnei
atgaaaagattatctataaccgtccgtttaaccttgctttttatattgctgctgtctgttgctggcgctggaattgtctggactctctataatggcctggcaagtgagttgaaatggcgcgatgatacaacactcattaaccggacagcacagatcaagcagttgttaattgatggggtaaatccagatacgttacctgtatactttaaccggatgatggatgttagtcaggatatcttgatcattcatggtgatggcatcaataaaattgttaaccggacaaatgtcagtgatgacatgttaaataacatacctgctagtgagacaatcagcgcagctggcatttacagaagcattattaatgatactgagattgatgctttacgaattaatattgatgaagtttcgccatcattaacggttactgtggctaaattggcttcagccagacataacatgcttgaacagtataaaattaatagcattataatttgcattgtcgccattgtactttgctcagtattaagtccgctgttaatcagaacgggattacgagagatcaaaaagttgagtggtgtaacggaagcgctgaattataacgatagccgggagcctgttgaggttagcgcattaccgagagaactaaaacctcttgggcaggcgttgaataaaatgcatcatgctttagtcaaagattttgagcgtctaagtcaatttgctgacgatctcgctcatgaacttagaacgcccattaatgcattactgggtcagaatcaggttacgctcagtcaaaccagaagtatcgctgaatatcaaaaaacaattgccggtaacattgaagagctggaaaatatttcgcggttaacagagaacatactgtttcttgcccgggcagataaaaacaatgttttggtgaaactggactcgctttctctcaataaggaagtcgaaaatttgttggattatcttgaatacctttcagacgagaaagagatttgctttaaggtcgagtgcaatcagcaaatctttgcggataaaattttactgcaacgaatgttatcgaatcttattgttaatgccattagatattcaccagaaaaatcgcgtattcatataaccagttttcttgataccaacggctatcttaatattgatgtcgccagtcctggaacgaaaattcatgagcctgaaaaactcttccgtagattttggcggggagataattcgcgtcattccgtaggtcagggacttggtctttctttagtcaaagcgattgccgaattacatgggggaagtgctacgtatcactatctcaataagcataatgtgttccggattatgttaccgcaaagaaattaa

SEQ ID NO: 484628 - DNA, 594 bp, Shigella sonnei
atgatcattcgtgacgaaaactattttactgataaatatgaattaacccgcacacactctgaagtactggaagcggtgaaagtggttaaaccgggtaaaacgctggatctgggctgtggcaatggtcgtaacagtctttacctggcagccaatggttatgatgttgacgcatgggataaaaatgccatgagtatcgccaatgtagagcgcattaaatccattgaaaatctggataatttacacacccgagtcgttgatctgaataacctcacatttgatagacagtacgattttattctttcgactgtggtactgatgttccttgaggctaaaaccatcccagggctgattgccaatatgcaacgttgcactaaacctggtggttacaacctgattgtggcggcgatggataccgctgattatccatgtaccgtcggcttcccgtttgccttcaaagagggagaattacgtcgatattacgaaggctgggagagggtgaaatacaatgaagacgtcggcgagctgcaccgcaccgacgccaacggtaatcgtattaaactgcgtttcgccacgatgctggcacgtaaaaaatga

SEQ ID NO: 484629 - DNA, 993 bp, Shigella sonnei
atgcagagcgataaagtgctcaatttgccggcaggctactttggtattgtgttggggacgatagggatgggatttgcctggcgctatgccagccaggtttggcaggtcagccactggttaggggatgggctggtgattctggcgatgatcatctggggattattaactagcgcatttattacccgactcatacgctttccgcatagcgtgctggcggaagttcgccatccagtgctgagcagttttgtgagtttgtttccggcaacgacgatgctggtggcgattggttttgttccgtggtttcgcccactggcggtgtgcctgttcagttttggtgtcgtggttcagttggcttatgccgcctggcaaactgcgggattatggcgcggatctcaccctgaagaagctaccacgcctggactgtatctgccgacagttgccaacaactttatcagcgcaatggcctgtggtgcgttgggctacaccgacgccggtctggtgtttttaggcgcaggcgttttctcatggctaagtcttgaaccggtgatcttgcagcgtctgcgcagttcgggagaattacccacggcactgcggacatcactcggcattcagctcgctcctgcgctggtggcctgtagtgcctggttgagcgtcaacggcggcgagggtgatacgctggcgaaaatgctttttggttatggactgctgcaactgctgtttatgctacgtctgatgccatggtatctctcccagccatttaatgcttcattctggagtttctcgttcggcgtatctgcactggcaaccaccggtttgcatctggggagtggcagcgaaaatggatttttccatacgctggcggtaccgctgtttatctttaccaattttattattgcaatactgctcatccgtacttttgcgcttctgatgcagggaaaattgttagtcagaaccgagcgcgccgttttaatgaaagcagaggacaaagaatga

SEQ ID NO: 484630 - DNA, 981 bp, Shigella sonnei
atgcgcaaatatcgtctaagtgaagaacagcgagcctttagttatcaggaagatggcactaaaaaaagtgtgttattacggcagattatcgccattagcgattttaacgatgtgatagcaggaaccgctggcggctggatcgatcgcgaaacggtgttagcacaggaaggaaattgctggatttacgaccagaatgctattgcgttcggcggaacggtgatttctggtaatacgcgtatcaccggcaccagcgtgctgtggggagaggtttacgcaacggataacgtctggatcgataatagtgaaatcagccagggtgcatatataagtgacagtgtcaccattcgtgactcattagtttacgggcaatgtagaatatttggtcacgccttaattgatcaacattctatgatcgtcgccgcacaaggcttaacgcccgaccatcaactcctgctccaaatttatgatcgcgcaagggttagcgcctcgcgtattgtccaccaggcacaaatttatggcgatgccgtcgtccggtatgcttttattgaacatcgcgccgaagtttttgattttgccagtgttgaaggtaatgaagagaacaacgtctggctatgcgattgcgcaaaagtctacggtcacgcgcaggtgaaagctggcatagaagaagatgccattccgacgattcattacagttcgcaggtggcggaatatgccattgtggaaggtaattgtgtgttaaaacatcatgtcttgattggcggaaatgccgtggtacgtggtggaccgattctgctcgacgagcacgttgtaatacaaggtgagagccgtatttcaggtgcggtgataattgaaaaccatgtggagttaaccgaccacgccgtcgttgaagcctttgatggcgacacggttcatgtccgtggtccaaaagtcattaacggcgaggagcgcattacgcgaacgccgctggcagggttattatga

SEQ ID NO: 484631 - DNA, 537 bp, Shigella sonnei; identical to SEQ ID NO: 461861

SEQ ID NO: 484632 - DNA, 225 bp, Shigella sonnei; identical to SEQ ID NO: 261075

SEQ ID NO: 484633 - DNA, 1620 bp, Shigella sonnei
atggccgccgtgtgcggtaccagcggcattgcttctcttttttctcaggcggcattcgcggcagattctgatattgccgacgggcaaacccagcgttttgacttctccattctacagtcaatggcgcacgacttagcgcaaacagcgtggcgtggtgcgcctcgtccgttacctgacacgctggcgacaatgacgccgcaggcttataacagtattcaatacgacgccgaaaaatcgctctggcataacgttgagaaccgtcaactggacgctcagttcttccatatgggaatgggattccgtcgccgcgttcgtatgttttctgtagatccagcaacacatctggcgcgtgaaattcactttcgcccggagttgttcaaatacaacgatgcaggtgttgataccaaacaattagaagggcaaagcgatctcggctttgccggttttcgcgtgtttaaagcccccgaactggcgcgccgtgatgtagtatcatttctcggcgcgagttatttccgcgccgttgatgatacatatcaatacggtttgtcggcccgcggcctggcgatcgacacttacaccgacagtaaagaagagttccccgactttaccgccttctggtttgatacggtaaaaccgggggcaactacctttaccgtttatgcgttgctcgatagcgccagtattactggtgcctataagttcactatccattgtgagaaaagtcaggtgattatggatgtggaaaatcacctgtatgcgcgcaaagacattaaacagctgggcattgcgccgatgaccagtatgttcagctgcggtactaatgaacgtcggatgtgcgacaccattcatccgcaaattcatgactctgatcgtctgtccatgtggcggggcaacggcgagtggatttgccgtccgctgaacaatccgcaaaaattgcagttcaatgcttacaccgacaacaacccgaaagggtttggtttattgcaactggatcgtgacttctcccattatcaggacattatgggctggtataacaaacgcccaagtttgtgggtggaaccgcgtaacaagtggggtaagggcaccatcggcctgatggaaatcccaacaacgggcgaaacgctggataacattgtctgcttctggcagccagaaaaagctgtaaaagcaggtgatgagtttgcattccagtatcgtctgtactggagtgcgcaaccgcctgttcattgcccattagcgcgcgttatggcgacgcgtaccggcatgggcggtttcccggaaggttgggcgccaggtgaacactatcccgaaaaatgggcgcgtcgttttgccgtcgatttcgttggtggtgatctgaaagctgccgcgccaaaaggcattgagccggtgattacgctttccagtggggaagcgaagcaaatcgaaattctctatattgaacccatcgatggttatcgtattcagtttgactggtatccgacttcggactctactgatccggtcgatatgcggatgtatctacgttgtcagggggacgctatcagtgaaacatggctgtatcagtatttcccgccagcgccggataaacgtcagtatgttgacgaccgcgtgatgagttaa

SEQ ID NO: 484634 - DNA, 1344 bp, Shigella sonnei
atggcgaacagcatcacggcggatgagattcgggaacagttttcgcaggcaatgtcagccatgtaccagcaagaagttccgcaatatggcacgctgctggaactggtagctgatgtgaatctggctgtgctggaaaacaatcctcaactgcacgaaaaaatggtaaatgcagacgagctggcgcgactgaatgttgaacgtcatggggcgattcgcgttgggactgcacaagagcttgctactcttcggcggatgtttgccattatggggatgtacccggtgagctattacgatctctcgcaggcaggggtgccggtacattcgacagcatttcggcccattgatgatgcttctctggcgcgtaatcccttccgcgtttttacctccttactccgccttgagcttatcgagaacgaaattttgcgccagaaagcggcggagattctgcgtcagcgcgatatcttcaccccacgttgtcgacaactgttagaggaatatgagcagcagggcggttttaacgaaacacaggcacaggagtttgtgcaggaagccctggaaacgtttcgctggcaccagtcagcaacggtagatgaagaaacctatcgcgccttgcacaacgaacatcggttgattgctgatgtggtctgttttcctggatgccatatcaaccacctgacgccacgtacgctggatattgaccgggtgcagtcgatgatgcctgaatgcggaattgaacccaaaattctcatcgaggggccgccgcgccgcgaggtaccgattttactacgccagaccagctttaaagcactggaagagacggtgttgtttgcggggcagaaacagggcacgcataccgcgcgctttggtgaaattgagcagcgtggcgtggcattaacgccgaaagggcgacaactgtatgatgatcttctgcgtaacgctggaaccgggcaggataatctcactcaccaaatgcatttacaggaaaccttccgcacttttcctgacagtgagtttttaatgcgtcagcaagggttggcatggttccggtaccgtctgacgccttcgggtgaggcgcatcgtcaggcgattcatcctggagacgatccacagcccttaattgaacgtggttgggtagtggcgcaacccatcacctatgaagatttcttgcccgttagcgcggcggggatcttccagtcaaatctgggtaatgaaacgcagacacgcagtcacggtaatgccagtcgcgaagcatttgagcaggcgttgggttgtccggttttggatgagttccagctttaccaggaagcggaagaacgcagtaaacgtcgctgtggtttgctttaa

SEQ ID NO: 484635 - DNA, 924 bp, Shigella sonnei
atggaaaaaaatagtctgtttagtcagcgcatccgtttgcgccaccttcatacattcgtagctgtcgcacaacaaggaactttggggcgcgcggctgaaacccttaatttgagtcaacctgcgctctctaagacattgaatgaactggagcagctgacgggcgctcgcttgtttgagcgtggtcgtcagggggcgcaacttaccttacccggcgaacaatttttaacgcatgcagtcagagttcttgacgccatcaacactgccggacagtcgcttcatcgtaaagaaggtcttaataatgatgtcgtcagggttggtgcactacctactgcggcactggggatattaccttcggttataggtcagtttcatcagcaacaaaaagagacgaccttgcaagttgcgacaatgagtaaccctatgattctggcgggtttaaaaaccggggaaatcgatatcggcattggtcggatgtcagatcctgaactgatgaccgggcttaattacgaactgctgtttcttgaatcgctgaagctggttgtccgccctaatcacccgctacttcaggagaacgtaacgctaagccgggtgctggaatggccggtcgttgtatcaccagaaggcactgcgccacgccagcattcagatgcattagtgcagagccagggctgtaaaattccttcgggttgtatcgaaacgctgtctgcttcgctatctcgtcaacttacggttgaatacgattacgtgtggtttgtcccttctggcgctgtaaaagacgacctgcgtcatgccacgctggtggccctgcctgttccgggacatggtgcaggcgaaccgattggaatactgacccgcgtagatgcgacgttctcttctggttgccagttgatgattaacgctattcgaaaatcaatgccgttctga

SEQ ID NO: 484636 - DNA, 1641 bp, Shigella sonnei
atgaatacaactccctcacagcgattaggttttttgcatcacatcaggctggttccgttatttgcctgcattcttggcggtatcttagttctattcgcattaagttctgctctggctggctatttcctctggcaggccgatcgcgatcagcgtgatgttactgcggagattgagattcggaccgggttagcgaacagttcagattttttgcgttcagcccggatcaatatgattcaggccggggctgcgagttgtattgcggaaatggaagcaatgaagcgaaatattgcgcaagccgaatcggagattaaacagtcgcagcaagggtatcgtgcttatcagaatcggccggtgaaaacacctgctgatgaagccctcgacactgaattaaatcaacgctttcaggcttatatcacgggtatgcaacctatgttgaaatatgccaaaaatggcatgtttgaagcgattatcaatcatgaaagtgagcagatccgaccgctggataatgcttataccgatattttgaacaaagccgttaagatacgtagcaccagagccaaccaactggcggaactggcccatcagcgcacccgcttgggtgggatgttcatgattggcgcgtttgtgcttgccctggtcatgacgctgataacatttatggtgctacgtcggatcgtcattcgtccactgcaacatgccgcacaacggattgaaaaaatcgctagtggcgatctgacgatgaaggatgaaccggcgggtcgtaatgaaatcggtcgcttaaatcgtcatttacagcaaatgcagcattcactggggatgacagtagggactgttcgacagggtgcggaagagatttatcgtggcaccagcgaaatttcagctggcaatgcggacctgtcatctcgcaccgaagaacaagcggcggctatcgaacaaactgccgccagcatggagcaactcactgcgacggtgaaacagaatgcggataacgcgcatcatgccagcaaactggcgcaagaggcttctattaaagccagcgatggcgggcagacggtttccggtgtagtaaaaacgatgggcgctatctccacgagttcgaagaaaatttctgagatcaccgccgtcatcaacagtattgctttccagacgaatattctggcactgaatgctgccgttgaagccgcgcgagcgggtgagcaagggcgtggatttgccgttgtcgccagcgaagtacggacactcgcaagtcgcagcgctcaggcggcgaaagagattgaaggcttgatcagtgaatcagtcaggttaattgacctggggtcggatgaggtggcaacggccgggaaaaccatgagcactattgttgatgccgtcgcgagtgtcacacatatcatgcaggaaatcgccgccgcctcggatgaacaaagtagaggcataacgcaggttagccaggcgatttctgaaatggataaggtgacgcaacagaatgcttctctggtagaagaggcctcagcggcggcggtgtcccttgaagaacaggcggcacgattaactgaggcggtggatgtattccgtctgcacaaacattctgtgtcggcagaacctcgcggagcgggtgaaccagttagtttcgctacggtgtga

SEQ ID NO: 484637 - DNA, 168 bp, Shigella sonnei
atgaacctagcaattcagatcttagcctcttacccgccatccggcaaggagaaaggctatgaagcacaaccctctggtagtgtgtctgctcattatctgcattacgattctgacattcacactcctgacccgacaaacgctctacgaactgcggttccgggacggtga

SEQ ID NO: 484638 - DNA, 174 bp, Shigella sonnei; identical to SEQ ID NO: 474239

SEQ ID NO: 484639 - DNA, 531 bp, Shigella sonnei
atggaaaataaatactcaaggttacaaatcagcattcactggctggtctttttgctggttatcgcagcgtattgcgcaatggagtttcgtggtttcttcccacgtagcgatcggccactcatcaacatgattcatgtttcctgcggcatctcaattctcgtgctgatggtcgttcgtcttttgttaaggctgaaatacccaaccccgccgattatacctaagccaaaaccgatgatgacgggactggcgcatttgggacatttggtgatgtatctcctgtttattgcgctgccagtgattggtttggtgatgatgtataaccggggcaacccgtggtttgcgtttggtttgacgatgccttacgcttcagaggccaatttcgaacgggttgatagcttaaagtcgtggcatgagacgctggcgaatctgggatattttgtcatcgggttgcacgctgcggctgcactggcacaccactatttctggaaggacaacacacttctacgcatgatgccgcgtaaacgttcctga

SEQ ID NO: 484640 - DNA, 1002 bp, Shigella sonnei
atgagtaaagttggtattaacggttttggtcgtatcggtcgactggtgttgcgtcgattacttgaagtcaaaagcaacatagacgttgtcgctattaatgatctcacttccccaaaaattctcgcctacctgctgaaacatgattcaaactacggaccattcccctggagcgttgattttacggaagattcacttatcgttgatgggaaaagtatcgcggtttacgccgaaaaagaggctaaaaatattccgtggaaagcgaaaggtgcagaaatcattgtcgaatgtactggcttttatacctccgccgagaaatcgcaggcacatcttgatgctggtgcgaagaaggtgttgatttccgcccctgccggtgaaatgaaaactatcgtttataacgtcaatgacgacactctggatggcaacgacaccattgtttccgtggcgtcatgcaccactaactgtcttgcgccgatggccaaagccttgcatgacagtttcgggatagaagtcggcacgatgacgaccattcatgcctatactggcacccagtcactggtggatggcccacgtggtaaagatttacgtgcttcacgcgcagcggcagaaaatatcattccccacactacgggggcggcaaaagccattggtctggtgatcccggaactgagcggcaaactgaaaggtcatgcgcaacgcgtgccggtgaaaacaggttcggtcactgaactggtatcgattctcggaaaaaaagtgactgccgaagaggtgaataacgcacttaaacaagcaaccaccaataacgagtcatttggttataccgatgaagaaatagtctcttccgatatcattggcagccatttcggttcggtgtttgatgccacgcaaacggaaattaccgccgtgggcgatttacaactggtgaaaacggtcgcctggtacgataacgaatatggcttcgtcacgcagcttattcgcaccctcgaaaaattcgctaaactctga

SEQ ID NO: 484641 - DNA, 633 bp, Shigella sonnei
atgtttcagcgtttgccatgcatggatgacttctgccggaaaatcaacgtgaacgataaaatctcgcccgcggggaccgtagccattgatcagttcgtcaatcggctgggtgaagcgatgcaggcggttaaatttggtaaccccgctgaacgcaacgacattgcgatggggccgttgattaacgccgcggcgctggaaagggttgagcaaaaagtggcgcgcgcagtagaagaaggggcgagagtggcgttgggtggcaaagcggtagaggggaaaggatattattatccgccgacattgctgctggatgttcgccaggatatgtcgattatgcatgaggaaacctttggcccggttctgccggtggtcgcatttgacacgctggaagaggctatctcaatggctaatgacagtgattacggcctgacctcatcaatctatacccaaaatctgaacgtcgcgatgaaagccattaaagggctgaagtttggtgaaacttacatcaaccgtgaaaacttcgaagctatgcaaggcttccacgccggatggcgtaaatccggtattggcggcgcagatggtaaacatggcctgcatgaatatctgcagacccaggtggtttatttacagtcgtaa

SEQ ID NO: 484642 - DNA, 153 bp, Shigella sonnei
atgtcagtacccgttcaacatcctatgtatatcgatggacagtttgttacctggcgtggagacgcatggattgatgtggtaaaccctgctacagaggctgtcatttcccgtatacccgatggtcaggccgaggatgcccgtaaggcaatctga

SEQ ID NO: 484643 - DNA, 915 bp, Shigella sonnei
ttggagtcattaccaattgccggaaatattattaaatgcgttgctatcagtgaatccgttcgcggtgaaggactggcgctgacattagccactgaattgataaacctcgcctatgagcggcacagcacgcatctgtttatttataccaaaaccgaatacgaggcgctgttccgccagtgcggtttttccacgctgaccagcgtacccggcgtgatggtgctgatggaaaacagcgccacgcggctgaaacgctatgccgaatcgctgaaaaaatttcgtcatccagggaacaagattggctgcattgtgatgaacgccaatcccttcacgaatggtcaccgttatctgattcaacaagctgcggcacagtgcgactggttgcatctgtttttagtcaaagaagattcttcacgcttcccctatgaagaccggttggatctggtgttaaaaggcaccgccgatattccacgcctgactgtgcatcgcggctccgaatacatcatctcccgcgctacgttcccttgctacttcattaaagaacagagcgtcattaaccattgttacaccgaaattgatctgaagattttccgtcagtacctcgctcccgcgctgggtgtaactcaccgctttgtcggtactgaacccttttgtcgcgttaccgcccagtacaaccaggatatgcgctactggctggaaacgccgactatctccgcaccgcccatcgaactggttgaaattgagcggctgcgttaccaggagatgccgatatccgcttcccgggtacgtcaactgctggcgaaaaacgatctcacggctatcgcgccgctggtccctgcagtcacgctgcattatttgcagaacctgcttgagcactcccgccaggacgcggcagctcgtcaaaagacccccgcatga

SEQ ID NO: 484644 - DNA, 297 bp, Shigella sonnei
atgaaaataaaccagcccgccgttgcaggcacccttgagtctggggatgtgatgatacgcatcgccccactcgatacgcaggatatcgacctgcaaatcaatagcagcgttgagaaacagtttggcgatgcaattcgcaccaccattctggacgttctcgcccgctacaacgtgcgcggcgtacagctgaatgtcgatgacaaaggcgcactggactgcattttacgtgcacgactggaagccctgctggcacgcgccagcggtatcccggctctgccatgggaggattgccaatga

SEQ ID NO: 484645 - DNA, 909 bp, Shigella sonnei
atgatttccgcttcgctgcaacaacgtaaaactcgcacccgccgcagcatgttgtttgtgcctggtgccaatgccgcgatggtcagcaactccttcatctacccggctgatgccctgatgtttgacctcgaagactccgtagcattgcgtgaaaaagacaccgcccgccgcatggtttaccacgcgctgcaacatccgctgtatcgcgatattgaaaccattgtgcgtgtcaacgcgctggattccgaatggggtgtcaacgacctggaagccgtcgttcgcggtggtgcggacgttgtgcgtctgccgaaaaccgataccgctcaggatgttctggatatcgaaaaagagatcctgcgtatcgaaaaagcctgtggtcgtgaacccggcagcaccggcctgctggcggcgattgaatctccgctggggattacccgcgcagtggaaatcgctcacgcttccgagcgtttgatcggtatcgccctcggtgcagaagactatgtgcgcaacctgcgtacagaacgctccccggaaggaactgaactgctgttcgcacgctgttccattttgcaggccgcgcgctctgcgggtattcaggcgttcgataccgtctattccgacgctaacaacgaagccggattcctgcaagaagccgcccacatcaaacagctgggctttgacggcaaatcgctgatcaacccgcgtcagattgatctgttgcacaacctctacgcaccgacccagaaagaagtggatcacgcccgccgcgtcgtagaagccgctgaagccgccgctcgcgaaggcctcggcgtggtttccctgaacggcaagatggtggacggtccggttatcgatcgtgcccgtctggtgctctcccgtgcagaactttccggcatccgcgaagaataa

SEQ ID NO: 484646 - DNA, 1533 bp, Shigella sonnei
atgacgcagaaaattgaacaatctcaacgacaagaacgggtagcggcctggaatcgtcgcgctgaatgcgatcttgccgctttccagaactcaccaaagcaaacctaccaggctgaaaaagcgcgcgatcgcaaactgtgcgccaaccaggaagaagcgattcgtcgctctggtttacaggacggcatgacggtttccttccatcacgctttccgtggcggtgacctgaccgtcaatatggtgatggacgtcatcgctaagatgggctttaaaaacctgaccctggcgtccagctccctgagtgattgccatgcgccactggtagaacacattcgccagggcgtggttacccgcatttatacctccggcctgcgcggtccactggcagaagaaatttcccgtggtctgcttgcggaaccggtgcaaatccactctcacggcggacgtgtgcatctggtacagagcggcgaactgaatatcgacgtggctttcctcggcgtcccgtcctgtgatgaattcggtaatgccaacggttacaccggtaaagcctgctgcggctccctcggctatgcaatggttgatgccgacaacgcaaaacaggttgtgatgcttaccgaagaactgctgccttatccgcataatccggcaagcattgagcaagatcaggttgatttgatcgtcaaagttgaccgcgttggcgatgctgcaaaaatcggcgctggcgcgacccgtatgaccactaacccgcgcgaactgcttattgcccgtagcgctgcggatgtgattgtcaactctggctacttcaaagaaggtttctccatgcaaaccggcaccggcggcgcatcgctggcggtaacccgtttcctggaagacaaaatgcgtagccgcgatattcgcgccgacttcgccctcggcggtattaccgcgacgatggttgatctgcacgaaaaaggtctgatccgcaaactgctggatgtgcagagctttgacagccatgctgcgcaatcgctggcccgtaaccccaatcacatcgaaatcagcgccaaccagtacgctaactggggttcgaaaggcgcatcggttgatcgtctcgacgtggtggtactgagcgcgctggaaattgacacccagttcaacgttaacgtgctgaccggctctgacggcgtactgcgtggtgcttccggtggtcactgcgataccgcgattgcctctgcgctttccatcatcgtcgcgccgctggtacgcggtcgtattccgactctggtggataacgtgctgacctgcatcaccccaggctccagtgtcgatattctggtcacagaccacggtatcgcagttaacccggcacgtccggaactggcagaacgtctgcaggaagcgggcattaaagtggtttccattgagtggctgcgcgaacgcgcgcgtctgctgaccggtgaaccacagccgattgaattcaccgaccgcgtcgttgccgttgtgcgttaccgcgatggctcggtgatcgatgttgtgcatcaggtgaaggaataa

SEQ ID NO: 484647 - DNA, 552 bp, Shigella sonnei
atgcacctgcttcctgaactcgccagccaccatgcggtgtcaattcccgagctgctcgtcagccgggatgaaaggcaagcacggcaacacgtctggctcaagcgccatcctgttccactggtctcctttaccgtggttgcgcctgggccgattaaagacagcgaggtcacacgccgaatttttaatcatggcgtgacagccttgcgtgccttagccgcaaaacagggctggcaaattcaggagcaggctgcactggtttccgccagcgggccggagggcatgttgagcattgccgccccggctcgcgacctcaagctcgccaccattgagcttgaacatagtcatcctctcgggcggttatgggatatcgatgtcctgacgcccgaaggcgaaattctctcccgccgcgactattcactgccgcctcgccgctgcctgttgtgcgagcaaagcgcagccgtctgcgcgcgtggaaaaacccatcaactgaccgatttactcaaccgcatggaggcactgctgaacgatgtcgatgcctgcaacgtcaactaa

SEQ ID NO: 484648 - DNA, 879 bp, Shigella sonnei
atgtcgatgcctgcaacgtcaactaaaaccacaaagcttgcgacgtcattgatcgatgagtacgccctgctgggctggcgcgccatgctgactgaagtcaatctgtcaccgaaaccaggcctcgtggatcggattaactgcggtgcacataaagatatggcgctggaagatttccaccgcagcgcgctggcgattcagggctggctaccccgtttcattgaatttggtgcctgtagtgcggaaatagcaccagaagcggtactccacggattacgcccaattggtatggcttgcgaaggtgatatgttccgcgccactgcgggcgtaaacacgcataaaggcagcattttttctttagggctactatgtgcggcaattggccgtttgcttcaactcaaccaaccggtaacgccaacaaccgtttgttctacggcggcaagtttctgccgtggcctgaccgatcgagaactgcgtaccaataattcacaactgacggcaggtcaacggttgtaccagcagcttggccttaccggcgcacgcggtgaagccgaagcgggttatccactggtgatcaatcacgccttgccgcattacctcactctgctggatcaggggttagatcctgaactggcattgctcgataccttgctcctactgatggcgatcaacggcgataccaacgttgcatcgcgcggtggcgaggggggcctgcgctggctacagcgcgaggcgcaaacattattgcaaaaagggggcattcgaacccccgccgatctcgattatctccggcagttcgacagggagtgtatcgaacgaaatctcagtccaggcggcagtgccgacctgctgatccttacctggtttttagcacagatttaa

SEQ ID NO: 484649 - DNA, 1464 bp, Shigella sonnei
atgtctttagcaaaagataatatatggaaactattggccccactggtggtgatgggtgtcatgtttcttatccctgtccccgacggtatgccaccacaggcatggcattacttcgctgtgtttgtggcaatgattgtcggcatgatcctcgagccaattccggcaacagcgatcagttttattgcggttactatttgcgttattggcagtaattacctgctctttgatgccaaagaattagctgacccagcgtttaatgcgcaaaaacaggcgctgaaatggggtctggctggtttttccagcaccacggtatggctggtatttggcgcatttatttttgcattagggtatgaagtttccgggttaggtcgtcgcattgcccttttcctggtgaaattcatgggcaaacgcacgctgacgttgggttatgcgattgtcattatcgacattctgctggcaccgtttacaccgtccaacaccgcgcgtaccgggggtacggtttttccggtcattaaaaacctgccgccgctgtttaaatcattccccaacgatccgtccgcgcgtcgtattggcggctatttgatgtggatgatggtcattagtaccagtctgagttcgtccatgtttgtcaccggtgcggcaccaaacgtgctgggtctggagttcgtcagcaaaattgccggtatccagattagctggttgcagtggttcctctgcttcctgccggttggggttatcttgcttatcattgcgccgtggctttcctacgtgctgtacaaaccggaaatcacacacagtgaagaagtggcaacctgggcgggtgatgaactgaaaaccatgggtgcgctgacacgcagagagtggacactgattggccttgtattgctcagcttaggtttgtgggtttttggcagtgaagtcattaatgctactgcagttggtctgctggcagtttcgctaatgctggccctgcacgttgtgccttggaaagatattacccgctataacagcgcatggaacacgctggtcaacctggcaactctggttgtgatggctaacggcctgactcgttctggctttattgactggttcgccggtaccatgagtacgcacctggaaggattctcaccaaacgcaacggtgattgtactggttctggtgttctactttgcacactacctgtttgccagcctgtctgcgcacaccgcaaccatgctgtcggttattctggccgtcggtaaaggtattccgggcgtaccaatggaacaactgtgtatcctgctggtgctgtctatcggtatcatgggctgtctgacgccgtatgcaaccggtcctggggtgattatttacggctgtggctatgtgaaatcaaaagattactggcgtcttggcgcaatcttcggggtgatttacatctctatgttgctgttggttggctggccgattctcgccatgtggaactaa

SEQ ID NO: 484650 - DNA, 807 bp, Shigella sonnei
atgaaagcattctggcgtaacgccgcgttgctcgcggtttctctgcttcccttctcttctgccaacgccgtagcgttgcaggcaaaacagtatggcgattttgatcgctatgtcctggccctctcctggcaaaccggattttgccagagtcaacacgatcgaaatcgtaacgaacgagatgaatgtcgcctacaaaccgaaacgaccaacaaagctgattttctgaccgtacatggtctgtggccaggattgcctaaatcggttgctgcccgtggtgttgatgaacgccgctggatgcgcttcggttgcgctactcgcccaatcccgaatctaccagaagcgcacgccagccggatgtgttcatcgccggaaaccgggttatcactggaaacggccgctaaactaagtgaagtcatgccaggagctggcggacgttcctgcctggaacgctacgaatatgccaaacacggtgcctgctttggttttgatccggacgcatacttcggtacgatggtacgcctgaatcaagaaattaaagagagcgaagccggaaaattccttgcggataattacggtaaaacagtgagccgccgtgactttgacgccgcctttgccaaaagctggggaaaagagaacgtgaaagcagttaagctaacgtgccagggtaaccctgcgtatttgactgaaattcagatctcgatcaaagctgacgccatcaacgctccgctttctgcaaactcattcttgccacaaccacacccaggcaactgtggcaaaaactttgtgattgataaagtgggttattaa

SEQ ID NO: 484651 - DNA, 411 bp, Shigella sonnei; identical to SEQ ID NO: 263334

SEQ ID NO: 484652 - DNA, 1239 bp, Shigella sonnei
atgaaagcattgacttatcacggcccacatcacgttcaggtagaaaatgttcccgatccgggcattgaacaggctgatgatattattctgcgtattacggcaacggcgatctgtggctctgacctccatctttatcgaggcaaaataccccaggttaaacatggcgatattttgggtcatgaatttatgggggaagtcgttgaaaccggaaaggacgtaaaaaatttgcaaaaaggcgaccgggtggtaattccgtttgtcattgcttgtggcgactgttttttctgtcgaatgcagcaatatgccgcctgcgaaaataccaatgcgggtaaaggcgctgcgctcaataaaaaacagataccagctcccgcggcattgtttggttatagtcacctgtatggtggcgttcctggtggacaggcggaatatgtccgcgtccctaaagggaatgtggggccgtttaaagtaccgcctttgctttcagatgataaagcccttttcctttctgatattctgccaacggcatggcaggcagcaaaaaatgcgcagatccaacaaggttcaagcgttgcagtctatggtgccggtccagtgggattgttgacaatcgcctgtgcacggttgctcggtgcggaacagatttttgttgttgatcatcatccctaccgcttgcgtttcgccgctgaccgctacggcgcgatcccgattaatttcgatgaagatagcgatccggcacagtcaattattgaacaaacggcaggtcaccggggcgtggatgcagtaatagacgccgtcggttttgaagcgaaaggcagcaccacggaaacggtgctgactaacctgaaactggagggcagcagcggtaaagcgttgcgccagtgtattgcggcggtcaggcgtggcggcattgttagcgtaccgggcgtctacgctggatttattcacggtttcctgtttggcgacgcctttgataaagggttgacgtttaaaatgggacagacccacgttcacgcatggctgggtgaattattaccgttaattgagaaaggattactgaaaccagaagaaattgttacccactatatgccgtttgaagaggccgcccggggatatgagattttcgaaaaacgtgaagaggagtgccgtaaggtgattctggtacccggtgcacaaagcgcagaggcggcgcagaaggcggtttcaggtctggtgaatgcgatgccggggggaacaatatga

SEQ ID NO: 484653 - DNA, 429 bp, Shigella sonnei
atgtataagacaatcattatgccagttgatgtatttgaaatggaattgagcgacaaagctgttcgccacgctgaattcctcgcccaggatgacggagttattcatctacttcacgtactacccgggtcagccagcctgagcctgcaccgttttgccgctgatgtgcgtcgttttgaagagcatctgcaacatgaagcagaagaacgtctgcaaacgatggtcagccacttcaccatcgatccttcccgcattaaacaacatgtccgttttggtagcgtgcgggatgaagtcaatgagttggcagaagaactgggggctgatgttgtagttatcggttctcgcaacccatcgatttcgacccatctgttaggttctaacgcctcgagcgtgatccgccacgccaatctgcctgtactggtcattcgctaa

SEQ ID NO: 484654 - DNA, 1596 bp, Shigella sonnei
atgatgatgtttaaagcccaggagataaacatgctcgacacaaatatgaaaactcaactcaaggcttaccttgagaaattgaccaagcctgttgagttaattgccacgctggatgacagcgctaaatcggcagaaatcaaggaactgttggctgaaatcgcagaactgtcagacaaagtcacctttaaagaagataacagcttgccggtgcgtaagccgtctttcctgatcaccaacccaggttccaaccaggggccacgttttgcaggctccccgctgggccacgagttcacctcgctggtactggcgttgctgtggaccggtggtcatccgtcgaaagaagcgcagtctctgctggagcagattcgccatattgacggtgattttgaattcgaaacctattactcgctctcttgccataactgcccggacgtggtgcaggcgctgaacctgatgagcgtactgaacccgcgcatcaagcacactgcaattgacggcggcaccttccagaacgaaatcaccgatcgcaacgtgatgggcgttccggcagtgttcgtaaacgggaaagagtttggtcagggccgcatgacgttgactgaaatcgttgccaaaattgatacgggcgcggaaaaacgtgcggcagaagagctgaacaagcgtgatgcttatgacgtattaatcgtcggttccggcccggcgggtgcagcggcagcaatttactccgcacgtaaaggcatccgtaccggtctgatgggcgaacgttttggtggtcagatcctcgataccgttgatatcgaaaactacatttctgtaccgaagactgaagggcagaagctggcaggcgcactgaaagttcacgttgatgaatacgacgttgatgtgatcgacagccagagcgccagcaaactgatcccagcagcagttgaaggtggtctgcatcagattgaaacagcttctggcgcggtactgaaagcacgcagcattatcgtggcgaccggtgcaaaatggcgcaacatgaacgttccgggcgaagatcagtatcgcaccaaaggcgtgacctactgcccgcactgcgacggcccgctgtttaaaggtaaacgcgtagcggttatcggcggcggtaactccggcgtggaagcggcaattgacctggcgggtatcgttgagcacgtaacgctgctggaatttgcgccagaaatgaaagccgaccaggttctgcaggacaaactgcgcagcctgaaaaacgtcgacattattctgaatgcgcaaaccacggaagtgaaaggcgacggcagcaaagtcgttggtctggaatatcgagatcgtgtcagcggcgatattcacaacatcgaactggccggtattttcgtgcagattggtctgctgccgaacaccaactggctcgaaggcgcagtcgaacgtaaccgcatgggtgagattatcattgatgcgaaatgcgaaaccaacgtcaaaggcgtattcgcagcgggtgactgtacgacggttccgtacaagcagatcatcatcgccactggcgaaggtgccaaagcctctttgagtgcttttgactacctgattcgcaccaaaactgcataa

SEQ ID NO: 484655 - DNA, 564 bp, Shigella sonnei; identical to SEQ ID NO: 473220

SEQ ID NO: 484656 - DNA, 759 bp, Shigella sonnei
atgttaaaaaagatacttttactggctctgcttcctgcaatcgccttcgcagaggaacttccttccccagtaaaagcgattgaaaaacagggcattacaatcatcaaaacgttcgatgcccccggaggaatgaaaggttatctcggaaagtatcaggatatgggcgtcaccatctacctgactcccgatggtaagcacgctatctctggttacatgtacaacgagaaaggtgaaaacctgagtaacacacttatcgaaaaagaaatttacgcaccagccggacgcgaaatgtggcaacggatggaacaatcccactggatcctcgacggtaaaaaagatgcgccggtcattgtctacgtcttcgccgatccgttctgcccatattgtaaacagttctggcagcaggcgcgcccgtgggtagattctggcaaagtgcaattaagaacattgttggttggggttatcaagccagaaagcccggcgacagcagcggcaattcttgcctccaaagatcccgcaaaaacctggcaacaatatgaagcctctggtggcaagcttaagctaaacgtgcctgcaaacgtaagtacagagcaaatgaaagtgttaagtgacaatgagaaactgatggacgatctgggggcaaatgtcacgccggctatctattacatgagtaaggaaaatacgctgcaacaggccgtggggttgcccgatcagaaaacgcttaatatcattatgggggtaatgactccaacttattga

SEQ ID NO: 484657 - DNA, 1767 bp, Shigella sonnei
atgaataattctattaaccataaatttcatcacattagccgggctgaataccaggaattgttagccgtttcccgtggcgacgctgttgccgattatattattgataatgtctctattctcgacctgatcaatggcggagaaatttccggcccaattgtgattaaaggacgttacattgccggtgttggcgcagaatacgctgatgctccggctttgcagcggattgatgctcgcggcgcaacggcggtgccagggtttattgatgctcacctgcatattgaatccagcatgatgacgccggtcacttttgaaaccgctaccctgccgcgcggcctgacgaccgttatttgcgaccctcatgaaatcgtcaacgtgatgggagaagccggattcgcctggtttgcccgctgtgccgaacaggcaaggcaaaaccagtacttacaggtcagctcttgcgtacccgccctggaaggctgcgatgttaacggtgccagttttacccttgaacagatgctcgcctggcgggaccatccgcaggttaccggccttgcagaaatgatggactaccctggcgtaattagcgggcagaatgcgctgctcgataaactggatgcatttcgccacctgacgctggacggtcactgcccgggtttgggtggtaaagaacttaacgcctatattactgcgggtattgaaaactgccacgaaagttatcagctggaagaaggacgccggaaattacaactcggcatgtcgttgatgatccgcgaagggtccgctgcccgcaatctcaacgcgctggcaccgttgatcaacgaatttaacagcccgcaatgcatgctctgtaccgatgaccgtaacccgtgggagatcgcccatgaaggacacatcgatgccttaattcgccgcctgatcgaacaacacaatgtgccgctgcatgtggcatatcgcgtcgccagctggtcgacggcgcgccactttggtctgaatcacctcggcttactggcacccggcaagcaggccgatatcgtcctgttgagcgatgcgcgtaaggtcacggtgcagcaggtactggtgaaaggcgagccgattgatgcgcaaaccttacaggcggaagagtcggcgagactggcacaatccgctccgccatatggcaacaccattgcccgccagccagtttccgccagcgactttgccctgcaatttacgcccggaaaacgctatcgggtcattgacgtcatccataacgaattgattacgcactcccactccagcgtctacagcgaaaatggttttgatcgcgatgatgtgtgctttattgccgtacttgagcgttacgggcaacggctggctccggcttgtggtttgcttggcggctttggactgaatgaaggtgcgctggctgcgacggtcagccatgacagccataatattgtggtgatcggtcgcagtgccgaagagatggcgctggcggtcaatcaggtgattcaggatggcggcgggctgtgcgtggtacgtaacggccaggtccaaagtcatctgccgttgcccattgccggcctgatgagcaccgacacggcgcagtcgctggcggaacaaattgacgccttgaaagccgccgcccgtgaatgcggtccgttacccgatgagccgtttattcagatggcgtttctttctctgccagtgatccccgcgctaaaactaaccagtcaggggctatttgatgtcgagaagtttgccttcactacgctggaagtcacggaataa

SEQ ID NO: 484658 - DNA, 1392 bp, Shigella sonnei
atgctggctttcttaaaccaggttcgcaagccgaccctggaccttccgctcgaagtgcggcgcaaaatgtggttcaaaccgttcatgcaatcctacctggtggtctttatcggctacctgacgatgtacctgattcgcaagaactttaacatcgcgcagaacgacatgatctcgacctacgggttgagcatgacgcagctggggatgatcggcctgggtttctccatcacttatggcgtgggtaaaacgctggtttcctactacgccgacggcaaaaacaccaaacaattcctgccgttcatgctgatcctgtctgccatttgtatgctgggcttcagtgccagtatgggcagcggctcggttagcctgttcctgatgattgccttctacgccttaagcggctttttccagagtaccggcggttcgtgcagttactccaccatcaccaaatggacgccgcgtcgtaaacgcgggacattcctcggtttctggaatatttctcacaaccttggcggtgcaggcgcagcaggcgtggcgctgttcggggcaaattacctgttcgatggccatgtcatcggcatgtttatcttcccgtcgattatcgcgctgattgtcggttttatcggcctgcgttacggcagcgactccccggaatcttatggcctcggcaaagctgaagaactgttcggcgaggagatcagcgaagaggacaaagagacagaatctaccgatatgaccaagtggcagatctttgttgagtatgtgctgaaaaacaaagtgatctggctgctgtgcttcgccaacattttcctctatgtggtacgtattggtatcgaccagtggtcaaccgtatacgcgttccaggaactgaaactctctaaagcggtggcgattcagggctttacgctgtttgaagctggtgcgctggtcggtacgctgctgtggggctggctctctgacctggcgaacggtcgccgtggcctggtggcctgcatcgcgctggcgctgattatcgccacgctcggtgtgtatcaacatgccagtaacgaatatatctatctggcttctctctttgcgttgggtttcctggtctttggcccgcaattgttgattggtgtggctgctgttggctttgtacctaaaaaagcgattggcgctgccgatggtattaaaggcacctttgcttacctgattggtgacagctttgccaagttaggtctgggaatgattgccgatgggacgccggtattcggccttaccggctgggcaggcaccttcgccgcacttgatatcgccgcgattggttgtatctgcctgatggcgatagtggcggtgatggaagaacgcaaaatccgccgcgagaaaaaaattcagcagttgacagtggcataa

SEQ ID NO: 484659 - DNA, 1320 bp, Shigella sonnei
atgttgccgtttctgaaagcgcctgccgatgcgccattaatggctgataaatatgaaattgatgcccgctatcgctactggcgtcggcatattctgctgaccatctggctgggttacgcgctgttttacttcacgcggaaaagttttaacgccgccgtaccagaaatccttgctaacggcgtgctcagccgtagcgatatcggcctgttagcgaccctgttttacattacctatggcgtgtcgaagtttgtctccggcattgtcagcgatcgctcaaatgcccgttattttatggggatagggcttatcgccacgggcattatcaacattctgtttggcttctcgacgtcgctatgggcgtttgccgtactctgggtgctgaacgcctttttccagggctggggttcaccggtgtgtgcgcgtctgttaacggcctggtattcacgtaccgagcgcggtggttggtgggcattatggaacacggcgcataacgtcggcggcgcactcattcccattgtgatggcagcggctgcactacattacggctggcgtgccgggatgatgattgctggttgtatggcgatcgtcgtgggaatttttctctgctggcggctgcgcgatcgcccgcaggcgttaggtttaccggcggtcggtgaatggcgacacgacgcgctggagatagctcaacaacaagaaggggcagggctgacgcgtaaagagatcctcaccaaatatgtgttgctgaatccgtatatctggctgctttcgttttgctatgtgctggtctatgtggtccgggcggcgatcaacgactggggcaatttgtatatgtccgagacgctgggcgtcgatctggtcacggcgaatacggcagtgacgatgtttgaactgggtggatttatcggtgcgctggtagcgggttggggctcggacaaattgtttaacggcaaccgagggccgatgaatttgattttcgccgccggaattttgctttcagtcggctccctgtggctgatgccatttgccagctacgtgatgcaggcaacctgcttcttcaccattggtttttttgtctttggcccacagatgttaatcggtatggcggcggcagagtgttcccacaaagaggcggcaggggcggcgacggggtttgtcggcttgtttgcttatctgggggcgtcgcttgctggttggccgctggcgaaagtactcgatacctggcactggagcggattttttgtggttatctctatcgccgccgggatttccgcactgctgttactgccctttttgaacgcccagacaccgcgcgaagcgtga

SEQ ID NO: 484660 - DNA, 1503 bp, Shigella sonnei
atgaagacgttgttctcccgcttaattaccgttattgcctgcttttttatcttctctgccgcatggttttgcctgtggagtatcagcctgcatctggttgagcgccctgatatggcggtgctgttatttccgtttggtctgcgtctggggctaatgctgcaatgcccgcgcggatactggcccgtattgctgggtgcggagtggctgctgatttactggctaacgcaggcggtcggtttaacccattttccgttattgatgatcggtagtttactgacgttactgcccgtagcgctgatctcgcgctatcgccatcagcgtgactggcgcaccttgctgttacagggggcggcgttaacggcggcggcgttgttgcagtcgctgccctggctttggcacggcaaagagtcgtggaatgcgctgttgctgactttaactggcggcctgacgctggccccgatatgtctggtgttctggcactatctcgccaataacacctggctgccgctcggcccgtcactggtttctcagccaatcaactggcgcgggcgacatctggtctggtacttgctgctgtttgttatcagtctctggctccagttgggattgccggacgaactgtcgcgctttacgccattctgtctggtgctgccgattatcgcgctggcctggcactatggttggcaaggggcgctgattgcgacgttgatgaacgccatcgcgctgatcgccagtcaaacctggcgcgatcatccggtggatttattgctctcgctgctggtgcaaagtctgacagggttgttgcttggcgctggcatccagcggttgcgtgaacttaaccagtcgctgcaaaaggaactggcgcgcaatcagcatctggctgaacggttgctggaaaccgaagagagcgtgcgccgtgatgtggcgcgtgagctgcatgatgatatcggccagaccatcactgctattcgtactcaggcgggcattgttcagcggctggcggcagataacgccagcgtgaagcagagcgggcaactcatcgaacaactatcgctgggcgtttacgacgcggtgcgccgtttgttgggtcggttacgtccgcgccagttggatgatctcaccctggagcaggccatccgctcactgatgcgggaaatggagctggaagggcgcggtattgtcagccatctcgaatggcgaatcgatgaatcagcgttaagcgaaaaccagcgcgtgacgctgtttcgtgtctgccaggaagggctgaacaacattgtgaaacatgctgatgccagcgcggtcaccctgcaaggctggcagcaggatgaacggttgatgctggttattgaagacgatggcagcggtttgccgccgggttccgggcaacaaggttttggcctcaccggaatgcgcgagcgcgtaacggcgctgggtggcacattacacatttcctgtctgcacggcacgcgtgtcagcgtttctctacctcaacgctatgtctaa

SEQ ID NO: 484661 - DNA, 591 bp, Shigella sonnei
atgatcaccgttgcccttatagacgatcacctcatcgtccgctccggctttgcgcagctgctggggctggaacctgatttgcaggtagttgccgagtttggttcggggcgcgaggcgctggcggggctgccggggcgcggtgtgcaggtgtgtatttgcgatatctccatgcccgatatctccggtctggagctgctaagccagctgccgaaaggtatggcgacgattatgctctccgttcacgacagtcctgcgctggttgagcaggcgcttaacgcgggggcacgcggctttctttccaaacgctgtagcccggatgaactcattgctgcggtgcatacggttgccacgggtggctgttatctgacgccggatattgccattaaactggcatccggtcgtcaggacccgctaaccaaacgtgaacgccaggtggcggaaaaactggcgcaaggaatggcggtgaaagagattgccgccgaactgggcttgtcaccgaaaacggtacacgtccatcgcgccaatctgatggaaaaactgggcgtcagtaacgacgtagagctggcgcgccgcatgtttgatggctggtga

SEQ ID NO: 484662 - DNA, 291 bp, Shigella sonnei
atgcaaaacacaactcatgacaacgtaattctggagctcaccgttcgcaaccatccgggcgtaatgacccacgtttgtggcctttttgcccgccgcgcttttaacgttgaaggcattctttgtctgccgattcaggacagcgacaaaagccatatctggctactggtcaatgacgaccagcgtctggagcagatgataagccaaatcgataagctggaagatgtcgtgaaagtgcagcgtaatcagtccgatccgacgatgtttaacaagatcgcggtgttttttcagtaa

SEQ ID NO: 484663 - DNA, 1689 bp, Shigella sonnei
atggcaagttcgggcacaacattgacgcgtaagcgctttaccggcgcagaatttatcgttcatttcctggaacagcagggcattaagattgtgacaggcattccgggcggttctatcctgcctgtttacgatgccttaagccaaagcacgcaaatccgccatattctggcccgtcatgaacagggcgcgggctttatcgctcagggaatggcgcgcaccgacggtaaaccggcggtctgtatggcctgtagcggaccgggtgcgactaacctggtgaccgccattgccgatgcgcggctggactccatcccgctgatttgcatcactggtcaggttcccgcctcgatgatcggcaccgacgccttccaggaagtcgacacctacggcatctctatccccatcaccaaacacaactatctggtcagacatatcgaagaactcccgcaggtcatgagcgatgccttccgcattgcgcaatcaggccgccctggcccggtgtggatagacattcctaaggatgtacaaacggcggtttttgagattgaagctcagcccgcggtggcagaaaaagccgctgcacccgcctttagcgaagaaagcattcgtgacgtagctacaatgattaacgctgccaaacgcccggtgctttatctgggtggtggtgtgatcaatgcgcctgcgcgggtgcgtgaactggcggagaaagcgcaactgcctaccaccatgactttaatggcgctgggcatgctgccaaaagcgcatccgttgtcgctgggtatgctggggatgcacggcgtgcgcagtaccaactatattttgcaggaggcggatttgttgattgtgctcggtgcgcgttttgatgaccgggcgattggcaaaaccgagcagttctgtccgaatgccaaaattattcatgtcgatatcgatcgcgcagagctgggtaaaatcaagcagccgcatgtggcgattcaggcggatgttgatgacgtgctggcgcaattgatcccgcaggtggaagcgcaaccgcgtgcagagtggcaccagttggtagcggatttgcagcgcgaattcccgtgtccaatcccgaaagcgtgcgatccattaagccattacggcctgatcaacgccgttgccgcctgtgtcgatgacaatgcgattatcaccaccgatgtgggtcagcatcagatgtggaccgcgcaagcttatccgctcaatcgcccacgccagtggctgacctccggtgggctgggcacgatgggttttggcctgcctgcggcgattggcgcggcgctggcgaacccggatcgcaaagtgttgtgtttctccggcgacggcagcctgatgatgaatattcaggagatggcgaccgccagtgaaaatcagctggatgtcaaaatcattctgatgaacaacgaagcgctggggctggtgcatcagcaacagagtctgttctacgagcaaggcgtttttgccgccacctatccgggcaaaatcaactttatgcagattgccgccggattcggcctcgaaacctgtgatttgaataacgaagccgatccgcaggctgcattgcaggaaatcatcaatcgccctagcccggcgctgatccatgtgcgcattgatgccgaagaaaaagtttacccgatggtgccgccaggtgcggcgaatactgaaatggtgggggaataa

SEQ ID NO: 484664 - DNA, 1185 bp, Shigella sonnei
atgaaaaggcatagaaacgtcaatttgttattgatgttggtattactcgtggccgtcggtcagatggcgcaaaccatttatattccagctattgccgatatggcgcgcgatctcaacgtccgtgaaggggcggtgcagagcgtaatgggcgcttatctgctgacttacggtgtctcacagctgttttatggcccgatttccgaccgtgtgggtcgccgaccggtgatcctcgtcggaatgtccatttttatgctggcaacgctggtcgcggtcacgacctccagtttgacggtattgattgccgccagcgcgatgcaggggatgggcaccggcgttggcggcgtaatggcgcgtactttgccgcgagatttatatgaacggacacagttgcgccatgctaacagcctgttaaacatggggattctcgtcagtccgttgctcgcaccgctaatcggcggtctgctggatacgatgtggaactggcgcgcctgttatctctttttgttggttctttgtgctggtgtgaccttcagtatggcccgctggatgccggaaacgcgtccggtcgatgcaccgcgcacgcgcctgcttaccagttataaaacgcttttcggtaacagcggttttaactgttatttgctgatgctgattggcggtctggccgggattgccgcctttgaagcctgctccggcgtgctgatgggcgcggtgttagggctgagcagtatgacggtcagtattttgtttattctgccgattccagcagcgttttttggcgcatggtttgccggacgtcccaataaacgcttctccacgttaatgtggcagtcggttatctgctgcctgctggctggcttgctgatgtggatccccgactggtttggcgtgatgaatgtctggacgctgctcgttcccgccgcgctgttctttttcggtgccgggatgctgtttcctctggcgaccagcggcgcgatggagccgttccccttcctggcgggcacggctggcgcgctggtcggcggtctgcaaaacattggttccggcgtgctggcgtcgctctctgcgatgttgccgcaaaccggtcagggcagcctagggttgttgatgaccttaatgggattgttgatcgtgctgtgctggctaccgctggcgacgcggatgtcgcatcaggggcagcccgtttaa

SEQ ID NO: 484665 - DNA, 498 bp, Shigella sonnei
atgacaggaagtcaggtcattgatgctgaagaggacaggcataaactggttgtagagtacaaggatgctctgcaacctgccgatttttatcacaatttcaaacagcggggcatccgctccgtacagctcattccctatcttgaatttgatgaccggggcgatctgacggccgcttcggtgacagcagagctgtgggggaaatttttaattgccctgttcgagtgttgggtgcgggcagatatcagtcgtatctcgattgagctttttgacgccaccttacaaaaatggtgtggcagcgaaaacccgcaaccgcgctgtgactgccaggcgtgcgactggcatcgcctgtgcccgcacgctcggcaggagacgccagacagcgtgctttgtgcgggctatcaggcgttttattcttactccgcaccgcatatgcgggtgatgcgtgatctgataaagcagcatcgttctcccatggagctgatgacgatgctgcggtga

SEQ ID NO: 484666 - DNA, 363 bp, Shigella sonnei; identical to SEQ ID NO: 459671

SEQ ID NO: 484667 - DNA, 348 bp, Shigella sonnei; identical to SEQ ID NO: 459672

SEQ ID NO: 484668 - DNA, 450 bp, Shigella sonnei
atgggtatcatagcgcaaaataaaatcagttcattgggcatgctgttcggtgccatcgctttaatgatggggattatccacttttcattcggccctttttccgcaccaccgccaacgcttgaaagcatcgtggcggacaaaacggctgaaattaaaagaggtcttctcgccggaataaaaggcgaaaaaattaccaccgtggagaaaaaagaggacgtagatgtcgataaaatcctcgatcaaagcggtatcgcactggccattgctgcgctactttgcgcatttgttggcggtatgcgtaaggaaaatcgctggggcattcgcggcgcgctggtttttggcggcggaacgctggctttccataccttgctttttggtatcggcatcgtgtgcagcattttgctgatattccttatcttttccttcctgaccggcggttcgctggtttaa

SEQ ID NO: 484669 - DNA, 462 bp, Shigella sonnei
gtggcactggctgaggcctgcccggctcttgttgacgcggcactggcagataatgcagccgctgtttttgaacctgccgcagctgaggcgctctgtcccgctgctgtttcagaagacttagcgttcgtctcggacgtttttgccgccttcgcggaatttcctgccgccgttgccgaggaagctgcactactggcacttgatgatgcattcgtttctgaagatttcgctgcctcttttgaggccgccgcaccccgtgccgaggtggcagcttctgacgccttcgtggtcgctgtggatgcagaagtggctgccgatttttgtgatgctgcggcattcgtttctgacgttttcgcggcactggcgctggtagctgccgcgctttttgatgactctgcagcagcactttttgctgcttcacgggcctttgtcgatgccgttcctgcgctggaagacgctgactga

SEQ ID NO: 484670 - DNA, 600 bp, Shigella sonnei
atgcgtaaagtttgtgcagccattttgtccgcagccatctgtctgtccgtatccggtgcgcctgcatgggcgtctgaacatcagtccacactgagcgcggggtatcttcatgcccgtacgaacgctcccggcagcgataatctgaacgggattaacgtgaaataccgttatgagtttacggacgcgctggggctgattacgtccttcagctatgcaggagacaagaatcgccagctgacccgctacagcgatacccgctggcatgaagattccgtgcgtaaccgctggttcagcgtgatggcggggccgtctgtacgcgtgaatgaatggttcagcgcgtatgcgatggtgggtgtggcttacagccgtgtgtcgactttctccggggattatctccgcgtaactgacaacaaggggaaaacgcacgatgtgctgaccggaagtgatgacggtcgccacagcaacacgtctctggcgtggggggctggcgtgcagtttaacccgaccgaatccgtgaccattgaccttgcttatgaaggttccggtagtggtgactggcgaacggatgcatttattgttggtatcggataccgtatctga

SEQ ID NO: 484671 - DNA, 1542 bp, Shigella sonnei
gtggtgaagggtgtgcgcttcagtctgcgcctgaccagtggtaagggaacggatgccagactggtgaccaccgccatcaccgcagacacggagcaccgtttcagcggcctgccgctcggggaatacaccctgacggtgcgggcgataaacagctatggccagcagggtgaacctgccaccaccaccttccggattgccgcaccggcagcaccgtcgcggattgagctgacgccgggctattttcagataaccgcaacgccgcatcttgccgtttatgacccgacggtacagtttgagttctggttctcggaaaagcggattgcggatatcaggcaggttgaaaccagcgcccgctatcttggcacggcgctgtactggatagccgccagtatcaatatcaaaccgggccatgattattatttttacgttcgcagtgtgaacaccgttggcaaatcggcattcgtggaggctgtcggtcgggcgagcgatgatgcggaaggttacctggattttttcaaaggagagatagggaaaacacatctggctcaggagctgtggacgcagattgataacggtcagcttgcgcctgacctggctgaaatcaggacgtccattacggatgtcagcaatgaaatcacgcagactgtcaataagaaactgaaagaccagagtgcggcaatccagcagatacagaaggttcaggttgatacaaataataatctgaacagcatgtgggctgtgaagctgcaacagatgaaggacggacgcctttatattgcgggtatcggtgccggtattgagaatacgccagcaggaatgcagagtcaggtgctgctggcggcagacaggattgcgatgattaatcctgcgaatggcaacacaaagccgatgtttgttggtcagggcgatcagatattcatgaacgacgtgttcctgaaacgcctgacggctcccaccattaccagcggcggtaatcctccggcattttccctgacaccggacggaaaactgaccgctaaaaatgcagatatcagtggcagtgtgaatgcgaacgccgggacgctcaacaatgtcacaattaatgagaactgtcagattaaggggaaactgtcagccaaccagattgaaggcgatatagtcaaaacagtgggtaaggcttttccgcgggactcccgggcaccggagcggtggccatcagggaccattaccgtcaggatttatgacgatcagccttttgacaggcaaattgttattccggcggtggcattcagcggcgctaaacatgagcgggagaataacgatatttattcgtcatgccgcctgatagtacggaaaaacggtgctgaaatttataaccgtaccgcgctggataatacgctgatttacagtggtgttattgatatgccagctggtcgcggccacatgacgctggagttttcggtgtcagcatggctggtgaataactggtatcccacagcaagtatcagcgatttgctggttgtggtgatgaagaaagccaccgcaggcatcagtatcagctga

SEQ ID NO: 484672 - DNA, 1644 bp, Shigella sonnei
gtggaagtgacgaaggcaaaaccggtgacgcgcaccattacgtccgcgaacattgaccgcctgcgggttaccttcggggtgcagtcactggtgcagaccacgtcaaagggtgaccgaaacccgacatccgtccgcctgctgattcagttacagcgtaacggtaactgggtgacagaaaaggatgtcaccattaacggcaagaccacctcgcagtttctggcgtcggtgattctggataatctgcctccccgtccttttaacatccggatggtccgggagacagcggacagcaccacggaccagctgcagaataagacgctgtggtcgtcatacaccgaaatcatcgatgtgaaacagtgctacccgaacacggccattgtggggctgcaggtggatgcggagcagttcggcggccagcagatgacggtgaactaccatatccgcggtcgcatcatccaggtgccgtcaaactatgacccggaaaaacgcacgtacagtggtatctgggacggcagcctgaaaccggcatacagcaacaatccggcctggtgtctgtgggacatgctgactcacccgcgctacggcatgggaaaacgtctgggggcggcggatgtggacaagtgggcgctgtatgccatcgggcagtactgcgaccagacggtcccggatagtttcggggagaccgagccgcggatgaccttcaatgcgtacctggcacaacagcgtaaggcatgggacgtgctcagtgatttctgctcggcgatgcgctgtatgccggtatggaacggccagacgctgacgtttgttcaggaccgcccgtcggatgtggtgtggccgtacaccaacagcgatgtggtggtggatgataacggcgtgggtttccgctacagcttcagtgccctgaaggaccggcacacggcggtggaggtgaattataccgacccgcagaacggctggcagacctccacggaactggtggaagacccggaagccatactgcgctacggacgcaacctgctgaagatggacgcgttcggctgtaccagccgcggtcaggcccaccgtgccggactgtgggtgataaagaccgaactgctggaaacgcagacggtggatttcacgctcgggtctcaggggctgcggcacacacccggtgacatcattgaaatctgtgataacgactatgccgggaccctgaccggcggacgtgtcctgtccattgatgctgccacccgcactctgacgctggaccgtgaagtgacacttccggagaccggtgccgccacggtgaacctgattaacggcagcggtaagccggtgagtgtggacatcaccgaacaccccgcgccggaccggatacaggtcagtaccctgcctgatggtgtggagacatacggggtgtggggactctccctgccgtcactgcgccgtcgcctgttccgctgtgtctccgtccgggaaaacacggacggcacctttgccatcacggcggtgcagcacgtactggaaaaagaagccatcgtggataacggtgcccgctttgagccgcagtcaggttccctgaacagcgtcatcccaccggcagtgcagcacctgacggccagtatctggcgcaggcgaaatgggacacgccgcgggtggtga

SEQ ID NO: 484673 - DNA, 204 bp, Shigella sonnei
atgggaaaaggtggcggtaaggcacacacgcctcgtgaggcgaaggataatctcaaatccacgcagatgatgagcgtgattgatgcgattggtgagggactgatagaaggtccggtgaagggactgcagagtatcctggtgaacaaaaccccgctgacggacacggacggtaatcccgtgatacacggtgtgacggcggtctga

SEQ ID NO: 484674 - DNA, 582 bp, Shigella sonnei; identical to SEQ ID NO: 12419

SEQ ID NO: 484675 - DNA, 744 bp, Shigella sonnei
atgacacagactgaatcagcgattctggcacatgcccggcggtgtgcgcctgcggagtcgtgcggcttcgtgataagcacgccggagggggagcggtatatcccttgtgtgaatatttccgcagagccggaggcgtattttcgtatcgcaccggaagactggctgcgggcagagatgcagggggagattgtggcactggtccacagtcatcccggtgggctgccctggctgagcgaggctgaccggcggttgcagataaaaagcgcactgccctggtggttggtctgccggggtgacattcacaaattccgctgtgtgccacatctgacaggacggcgctttgagcacggggtgacggactgttacacgctgttccgggatgcttatcatctggcggggactgaaatgccggattttcatcgcgaggatgactggtggcgcaacggtcagaacctttacctggacaatatggcggtcaccggcttttaccgggtgcccctgtcctctgcacaggcgggcgatattctgctgtgctgctttggtgcttcggtaccgaaccatgccgccatttactgcggcaacggtgagctgcttcaccatctgcctgaacaactgagtaaacgggagaggtattccgaaaaatggcaacgacgaacgcattcagtctggcgtcaccgccactggcacgcatctgccttcacggggatttacaacgatttggccgccgcctcagcctgtatgtga

SEQ ID NO: 484676 - DNA, 699 bp, Shigella sonnei; identical to SEQ ID NO: 6139

SEQ ID NO: 484677 - DNA, 330 bp, Shigella sonnei; identical to SEQ ID NO: 8147

SEQ ID NO: 484678 - DNA, 2574 bp, Shigella sonnei
atgtcccagccggttggtgatcttgttattgacctgagtctggatgctgtccgtttcgatgagcagatgagccgggtaaggcgtcatttttcaggtctggataccgacgccagaaaaaccgccagtgctgttgaacagggcctgagccgccaggcgctggctgcacaaaaagccgggatttccgtcgggcagtataaagcggccatgcgaaccctgcccgcacagtttacggatatcgccacgcagcttgccggtggtcagaatccctggctgatcctgctgcaacagggcggtcaggtgaaggactccttcggcgggatgatccccatgttcagggggcttgccgatgcgatcaccctgccgatggtcggggtcacctcgctggcggtggcgacaggtgcactggtgtacgcctggtaccagggagattccacgctttcagcgtttaataaaaccctggttctttccggtaatcagtccggactgactgccgatcgtatgctgactctctcaagagccgggcaggcagcagggctgacgtttaaccaggcgagagagtcactggcagccctggtgaatgccggtgtgcgtggtggtgaacagtttgatgccatcaaccagagtgtcgcgcgttttgcgtctgcatccggtgtggaggtggataaagtcgctgaagccttcgggaagctgaccactgacccgacgtcgggactgatggcgatggcgcgccagttccgtaacgtgacggcagagcagattgcgtatgttgcacagctgcagcgttccggagacgaggccggggcattgcaggcggcgaacgatatcgccacgaaaggctttgatgagcagacccgtcgcctgaaagaaaacatgggaacactggagacctgggcggataaaacagggaaggcattcaaatcgatgtgggatgccattctggatatcggtcgtccggaatcctcagcggatatgctcgccagtgcgcagaaggcatttgatgaggcggataaaaaatggcagtggtaccagagtcggagccagcgccgcggtaaaacctcctctttccgggccaaccttcagggcgcatgggatgaccgggaaaatgcccgtctgggtctggcagcggcaacgctgcagtcggatatggaaaaagccggtgaactggcggcaagggacagggctgagcgtgagtcgtcacagctgaagtataccggagaggcgcagaaggcgtatgagcgcctgctgacgccactggagaaatataccgcccggcaggaagagctgaataaggccctgaaagacgggaaaatcctgcaggcggattacaacacgctgatggcgtcggcaaaaaaggattatgagtcgacgcagaaaaagccgtccggtgtgaaggtgtctgccggtgagcgccaggaagaccaggcgcatgcagccctgctggcgcttgaaactgagctcaggacgctggagaagcacagcggtgcgaatgaaaaaatcagccagcagcgccgtgatttatggaaagcggaaaatcagtatgtggtcctgaaagaggccgccacgaaacggcagttatctgagcaggaaaaatccctgctggcccatgagaaagaaacgctggagtacaaacgccagctggctgagctgggcgacaagattgaacaccagaaacggctgaatgagctggcacagcaggcggcgcggtttgaacagcagcagagcgcgaagcaggcggcaatcagcgcaaaagcccgcggactcaccgaccgtcaggcgcagcgggagtcggaagagcagcgccttcgtgaggtgtacggtgataatccggctgcgctggcgaaggccacatctgcactgaagaacacctggtctgcggaggagcagcttcgtggaagctggatggccgggatgaagtccggctggggcgagtgggcggaaagtgcgacggacagtttttcgcaggttaaaaacgcggccacgcagacctttgacggtattgcacagaatatggcagcgatgctgatcggcagcgaacagaactggcgtggtttcacccgttctgtgctgtccatgctgacagagatttttctgaagcaggcgatggtggggatagtcgggagtatcggcagcgccattggcggtgctttcggtggtggtgcgtctgcctccacggggacggccattcaggctgcggcggcgaacttccatttcgcgaccgggggatttacggggacggggggtaaatatgaacctgcggggattgttcatcgcggggagtttgtcttcacgaaggaggcgaccagccggattggtgtcggcaatctgtaccgcctgatgcggggctatgcggaaggtggttatgtcggcggtgccggaagtccggcgcagatgcggcgggcggaaggcattaattttaatcagaacaatcacgtggtgattcagaacgacggccccaacgggcgggcagggccgcagctgatgaaagcggtgtatgagatggcccgcaagggggcacaggatgaactccggctgcagttgcgtgatggcggtatgttatcagggagcggtggatga

SEQ ID NO: 484679 - DNA, 414 bp, Shigella sonnei; identical to SEQ ID NO: 5302

SEQ ID NO: 484680 - DNA, 432 bp, Shigella sonnei
atgtttctgaaaacagaacaatttgaatataacggtgtgtctgtcacgctttccgaattgtctgcgctgcagcgtatcgagcatcttgccctcctgaaacggcgtgcagaacaggcagaatccagcggcaacctgcaggtaagcgtggaagatctcgtcagaaccggcgcgtttctggtggcgatgtccctgtggcataaccatccacagaaaacgcagtcaccgtcaatgaatgaggccgtgatgaagatagagcaggaagtgctcaccacctggcctgccgatgccattgcccgggcggaagacgtggtgttgtgcctgtccgggatgatcgaagctgttcgtccggatactgatattactgaagtggcgaaaaataacacgctgactgatgatgatttttctgcgggaaagtcttcgacggcgagctga

SEQ ID NO: 484681 - DNA, 753 bp, Shigella sonnei
atggcaacaccaaatcccctggagccggtaaaaggtgccggtaccactctgtgggtttacaacggcaaggctgatgcttatgcaaacccgttgtcagacgatgactggcagcgactggctaaggtgaaggatctgacgccgggcgagatgacggctgaatcctatgatgataactacctggatgatgaagacgcggactggagcgcgaccgggcaggggcagaaatctgcaggtgataccagttttacgctggcctggaaaccgggagaggaaggccagaaagggcttataggctggtttgaaagcggcgatgtccgggcctataaaatccgttttccgaatggcacggtggatgtgtttcgtggctgggtcagcagtatcggtaaggccgtgacggcgaaagaagtgatcacccgcacggtgaaagtcactaacgtgggtaaaccttctgtagcggaagaacgcagcaaaattacgccggtcagtgcgattaaggtgacgccgacatccggtacggtggcaaaagggaaaacaaccaccctgacggtttcttttgagccggaaagtgcaaccgacaagacgttcagagcggtttccgccgatccgtcgaaagccaccattagtgtgaaagatatgacaattacggtaaacggcgtggcgacaggtaaggtgcagatccctgtggtgagcggaaatggtcagttcgccgcagtggctgaagtcaccgttactgaagcgggcgctgcagggtaa

SEQ ID NO: 484682 - DNA, 396 bp, Shigella sonnei
atgaaacacactgacattcgtgccgcagtgctggatgcactcgagcagcatgaacacggggcgacgctgtttgatggtcgccccgttgtttttgacgaagaggattttcctgcgatcgcggtttatctgacggatgcagagtataccggtgaagagctggatgcagatacctggcgggccacactgcatattgaggtgtttttaccggcacaggtacctgattcggagctcgatcagtggatggaaagccggatttatccggcgatgactgcgatccctgcactggcaggactgattaccacgatggttacgcagggctatgagtatcgtcgtgatgacgatatggcgttatggagctctgcggatctgacttattccattacatacgagatgtga

SEQ ID NO: 484683 - DNA, 576 bp, Shigella sonnei
atggcgataaaagggcttgatcaggcgattgacaatctgagccgggttcgtaaaaacgccattccggctgcttctgcaatgaccattaaccgcgtggccacaacggcgattaatcagtcttcgtcacaggttgcccgggaaaccagggtgagacggaaactggtaaaggaacggtccagactgaaacgggcgacggtcagaaatccgaatgccagaattatcgttaaccgcggtgatctccctgtgattaagctggggatcagaatgctggggcgtcgtccgaacagcatactcaaagccggtcagcatcgttatcagcgggcatttatccagcgattaaataatgggcgctggcatgttatgcaacgtcttccccaggccagatatgaggagggcaatgacgacaagggaaggaaaaagcgtaatcgccttcccattcaggtggtgaaaatcccgatggcggccccactgaaacaggcatttgatgagaatgttgaccgtatccggcgtgaacgcctgcctaaagaactggcatacgcgctgaaacaacaactgaggattgcgataaaacgatga

SEQ ID NO: 484684 - DNA, 1296 bp, Shigella sonnei
atggacgctgacagttctgacagcactgttacgccaggcaggttgcccgacggtttatcctcttgcccttgcttctacctcggtaaaaaattgatgaatctttcagccaatgcacaagcaactctcctgctaaccagcgatttttctcgcgcggcggcgagtgagtataaacctcttagtaatagtgaatgggggaagtttgcattatggctgaagcaccaacgtatcagtcccgccgagcttctggtgccgcaaccgcaagagaaacttacaggctggagcgatccgcgtatttctcaggagcgtattcttggcttgctggcgcgtggtcatagtctggcgttggcggtagataagtggcaacgcgccggtttatggatcttaacccgcggagatgctgattatcccgttcgcttgaaaaaccgattgcgaacggatgcacctcccgttttatttggctgcgggaataaagcattactgcaagcggaaggtatggcgattgttggctcgcgagatgctccgactgacgatttgcgctatacccaacaactggccgcgaaactggcccaacaggggatttgcgttatctctggtggtgcgcgaggtattgatgaatgtgcaatggcgtcggcactggaggccgggggaactgccgttggcgtattagctgatagcttgttaaaaacgagtacgttagtgaaatggcgtgaagggcttatagcaggcaacctggtgttgatttcgccgttttacccagaggtacgtttcaccgtcggcaatgcgatggcgcgaaataaatatatttattgccttgctgaaagcgcaatggttgtacgtgcgggaatgaccggtggaacgataaccggggcgatggaggcattaaaacatcagtggctgcctgtgcaggttaaaccaaatcaggatatgcaatcagccaattcacgattagtagaaaatggggcgtcatggagtgctgaacaggctgagaatgtgacgatcagactgccagacgttcctgggctgatgtatgacagagcactccgtaacgctcaaccagaactgttttcgctgcatgaagatgacgcaaattacgcagtaatgcccgcgtatacgcctgtcgatttttatcaactctttgtggcggaactggcgatccttgcaaaggaatcgataagtattgaaaggctggcgtcttgtactggtttaaccatcgaacaaattagtgtgtggctgaaccgcgcagaagaagagggaagggttatccgattgggcgaaggtcattatcagttcaggtaa

SEQ ID NO: 484685 - DNA, 594 bp, Shigella sonnei
atgaatgcaatcatttctgcagcagttttattgatcctgattatggatccgctcggaaacctgcctattttcatgtccgtactgaaacatactgaaccgaaaagacggcgggcaatcatggtgcgagagttgcttattgctctcctggtgatgctggtgttcctgtttgcgggtgagaaaattctggcatttctcagcctgcgagcagaaaccgtctccatttctggcggcatcattctgtttctaatcgccattaagatgattttccccagcgcttcaggaaatagcagcgggcttccggcaggtgaagagccatttatcgtgccgttggcaattccgttagtcgccgggccgactattctcgccacgctgatgttgttgtctcatcagtacccgaatcagatgggacatctggtgattgctctgctgctggcctggggcggcacctttgtcatcctgctacagtcttcgctatttttacgtctgctgggcgagaaaggggtgaacgcacttgaacgcctgatgggattgattctggtgatgatggcaacccagatgttcctcgacggcattcgaatgtggatgaaggggtaa

SEQ ID NO: 484686 - DNA, 1104 bp, Shigella sonnei; identical to SEQ ID NO: 470676

SEQ ID NO: 484687 - DNA, 2187 bp, Shigella sonnei
atgtccgatcgtatcgatagagacgtgattaacgcgctaattgcaggccattttgcggatcctttttccgtactgggaatgcataaaaccaccgcgggactggaagtccgtgcccttttacccgacgctaccgatgtgtgggtgattgaaccgaaaaccgggcgcaaactcgcaaaactggagtgtctcgactcacggggattctttagcggcgtcattccgcgacgtaagaattttttccgctatcagttggctgttgtctggcatggtcagcaaaacctgattgatgatccttaccgttttggtccgctaatccaggaaatggatgcctggctattatctgaaggtactcacctgcgcccgtatgaaaccttaggcgcgcatgcagatactatggatggcgtcacaggtacgcgtttttctgtctgggctccaaacgcccgtcgggtctcggtggttgggcaattcaactactgggacggtcgccgtcacccgatgcgcctgcgtaaagagagcggcatttgggaactgtttatccctggggcgcataacggtcagctctataaatacgagatgattgatgccaatggcaacttgcgtctgaagtccgacccttatgccttcgaagcgcaaatgcgcccggaaaccgcgtctcttatttgcgggctgccggaaaaggttgtacagactgaagagcgcaaaaaagcgaatcagtttgatgcgccaatctctatttatgaagttcacctgggctcctggcgtcgccacaccgataacaatttctggttgagctaccgcgagctggccgatcaactggtgccttatgctaaatggatgggctttacccacctcgaactactgcccattaacgagcatcccttcgatggcagttggggttatcagccaaccggcctgtatgcaccaacccgccgttttggtactcgcgacgacttccgttatttcattgatgccgcacacgcagcgggtctgaacgtgattctcgactgggtgccaggccacttcccgaccgatgactttgcgcttgccgaatttgatggcacgaacttgtatgaacacagcgatccgcgcgaaggctatcatcaggactggaatacgctgatctacaactatggtcgccgtgaagtcagtaacttcctcgtcggtaacgcgctttactggattgaacgttttggtattgatgcgctgcgcgtcgatgcggtggcgtcaatgatttatcgcgactacagccgtaaagagggggagtggatcccgaacgaatttggcgggcgcgagaatcttgaagcgattgaattcttgcgtaataccaaccgtattcttggtgagcaggtttccggtgcggtgacaatggctgaggagtctaccgatttccctggcgtttctcgtccgcaggatatgggcggtctgggcttctggtacaagtggaacctcggctggatgcatgacaccctggactacatgaagctcgacccggtttatcgtcagtatcatcacgataaactcaccttcgggattctctacaactacactgaaaacttcgtcctgccgttgtcgcatgatgaagtggtccacggtaaaaaatcgattctcgaccgcatgccgggcgacgcatggcagaaattcgctaacctgcgcgcctactatggctggatgtgggcattcccgggcaagaaactgctgttcatggggaacgaatttgcccaaggccgtgagtggaaccatgacgccagcctcgactggcatctgttggaaggcggcgataactggcaccacggtgtccagcgtctggtgcgcgatctgaacctcacctaccgccaccataaagcaatgcatgaactggattttgacccgtacggctttgaatggctggtggtggatgacaaagaacgctcggtgctgatctttgtgcgtcgcgataaagagggtaacgaaattatcgttgccagtaactttacgccggtgccgcgtcatgattatcgcttcggcattaatcagccaggcaaatggcgtgaaatcctcaataccgattccatgcactatcacggcagtaatgcaggcaatggcggcacggtacacagcgatgagattgccagccacggtcgtcagcattcactaagcctgacactaccaccgctggccactatctggctggttcgggaggcagaatga

SEQ ID NO: 484688 - DNA, 1974 bp, Shigella sonnei
atgacacgactcgccattggcaaacccgctcccctcggcgcgcattacgacggtcagggcgtcaacttcacacttttctccgctcatgccgagcgggtagagctgtgtgtctttgacgccaatggccaggaacatcgctatgacttgccagggcacagtggcgacatttggcacggttatctgccggatgcgcgcccgggtttgcgttatggttatcgcgttcatggcccctggcaacccgccgaggggcatcgctttaacccggcgaagttgttgattgatccttgcgcgcggcaaattgaaggggaattcaaagataacccgctgctgcacgccggtcataatgaacctgactatcgcgacaacgccgccattgcgccgaaatgcgtagtggtggttgatcactatgactgggaagatgatgccccgccgcgcacgccgtggggcagcaccatcatttatgaagcccatgttaaaggattaacgtacctgcacccggagatcccggtcgagatccgtggcacttataaagccctcgggcatccggtgatgatcaactatttgaaacagttgggcattaccgcgctggaactgctgccggtggcgcagtttgccagtgaaccacgtctgcaacgcatggggctaagtaactactggggttacaacccggtggcgatgtttgcgctgcatccggcgtatgcctgctcgccagaaacggcgctgcatgagtttcgcgatgcaatcaaagcactgcataaagcgggtatcgaagtcattcttgatatcgtgctcaaccatagtgcggaactggacctcgacggcccgttattctcgctgcgtgggatcgacaaccgtagctattattggataagagaagacggcgattatcacaactggaccggttgtggcaacacgctcaatttgagtcatccggcggtggtggattatgcctgcgcctgcctgcgttattgggtagaaacctgtcacgtcgatggtttccgctttgatctggcggcagtcatgggccgtacgccagagttccgtcaggatgcgccgttgtttaccgctatccagaactgcccggtgctctcgcaggtgaagttaattgctgaaccgtgggatatcgcccttggtggttatcaggtgggaaatttcccgccgctgtttgccgagtggaacgatcatttccgcgatgctgcccgtcgtttctggctacattatgatttgcctctgggggcgtttgccgggcgttttgctgcctccagcgatgtttttaaacgtaatggtcgtctgccgagtgccgcgattaatctcgtcactgcgcatgacggttttacgcttcgcgactgcgtttgcttcaaccataaacacaatgaagcaaacggagaagaaaatcgcgacgggaccaacaacaattacagtaacaatcatggtaaagaagggttaggcggttctcttgacctggttgaacggcggcgcgacagtattcacgccctgttaacaacgttgttgctctcccagggtacgccgatgttactggccggtgacgaacacggtcacagccagcatggcaataacaatgcctactgtcaggataaccaattaacctggttggactggtcgcaggcaagcagtggtttaaccgcatttaccgccgcgttaatccatctgcgcaagcgcattcccgctttggtggagaatcgctggtgggaagaaggcgacggcaatgtccgttggctaaatcgatatgctcaacctttaagcacggatgagtggcaaaacgggccgaaacagctgcaaattctgctctcggatcgctttttgatcgcaattaacgccacgcttgaggtaacagagattgttttacctgctggggagtggcacgccattcccccattcgctggagaggataacccagtgattacggctgtctggcagggacctgcacacggattgtgtgtgttccagagatga

SEQ ID NO: 484689 - DNA, 1296 bp, Shigella sonnei
atggttagtttagagaagaacgatcacttaatgttggcgcgccagctgccattgaaatctgttgccctgatactggcgggaggacgtggtacccgcctgaaggatttaaccaataagcgagcaaaaccggccgtacacttcggcggtaagttccgcattattgactttgcgctgtctaactgcatcaactctgggatccgtcgtatgggcgtgatcacccagtaccagtcccacactctggtgcagcacattcagcgcggctggtcattcttcaatgaagaaatgaacgagtttgtcgatctgctgccagcacagcagagaatgaaaggggaaaactggtatcgcggcaccgcagatgcggtcacccaaaacctcgacattatccgccgttataaagcggaatacgtggtgatcctggcgggcgaccatatctacaagcaagactactcgcgtatgcttatcgatcacgtcgaaaaaggcgcacgttgcaccgttgcttgtatgccagtaccgattgaagaagcctccgcatttggcgttatggcggttgatgagaacgataaaattatcgaattcgttgaaaaacctgctaacccaccgtcaatgccgaacgatccgagcaaatctctggcgagtatgggtatctacgtctttgacgccgactatctgtatgaactgctggaagaagacgatcgtgatgagaactccagccacgactttggcaaagatttgattcccaagatcaccgaagccggtctggcctatgcgcacccgttcccgctctcttgcgtacaatccgacccggatgccgagccgtactggcgcgatgtgggtacgctggaagcttactggaaagcgaacctcgatctggcctctgtggtgccggaactggatatgtacgatcgcaattggccaattcgcacctacaatgaatcattaccgccagcgaaattcgtgcaggatcgctccggtagccacgggatgacccttaactcactggtatccggcggctgtgtgatctccggttcggtggtggtgcagtccgttctgttctcgcgcgttcgcgtgaattcattctgcaacattgattccgccgtattgttaccggaagtatgggtaggtcgctcgtgccgtctgcgccgctgcgtcatcgatcgtgcttgtgttattccggaaggcatggtgattggtgaaaacgcagaggaagatgcacgtcgtttctatcgttcagaagaaggcatcgtgctggtaacgcgcgaaatgctacggaagttagggcataaacaggagcgataa

SEQ ID NO: 484690 - DNA, 1434 bp, Shigella sonnei
atgcaggttttacatgtatgttcagagatgttcccgctgcttaaaaccggcggtctggctgatgttattggggcattacccgcagcacaaatcgcagacggcgttgacgctcgcgtactgttgcctgcatttcccgatattcgccgtggcgtgaccgatgcgcaggtagtatcccgtcgtgataccttcgccggacatatcacgctgttgttcggtcattacaacggggttggcatatacctgattgacgcgccgcatctctatgatcgtccgggaagcccgtatcacgataccaacttatttgcctataccgacaacgtattgcgttttgcgcttctggggtgggttggggcagaaatggccagcgggcttgacccattctggcgtcctgatgtggtgcatgcgcacgactggcatgcaggccttgcgcctgcgtatctggcggcgcgcgggcgtcctgcgaagtcggtgtttactgtgcacaacctggcctatcaaggcatgttttatgcacatcacatgaatgacatccaattgccatggtcattctttaatattcatgggctggaattcaacggacaaatctctttcctgaaggccggtctgtactatgccgatcacattacggcggtcagtccaacctacgctcgcgagatcaccgaaccgcagtttgcctacggtatggaaggtctgttgcaacagcgtcatcgtgaagggcgtctttccggcgtactgaacggcgtggacgagaaaatctggagtccagagacggacttactgttggcctcgcgctacacccgcgatacgttggaagataaagcggaaaataagcgccagttacaaatcgcaatggggcttaaggttgacgataaagtgccgctttttgcagtggtgagccgtctgaccagccagaaaggtctcgacctggtgctggaagccttaccgggtcttctggagcagggcgggcagctggcgctactcggcgcgggcgatccggtgctgcaggaaggtttccttgcggcggcagcggaataccccggtcaggtgggcgttcagattggctatcacgaagcattttcgcatcgcattatgggcggcgcggacgtcattctggtgcccagccgttttgaaccgtgcggcttaacgcaactttatggattgaagtacggtacgctgccgttagtgcggcgcaccggtgggcttgctgatacggtttctgactgttctcttgagaaccttgcagatggcgtcgccagtgggtttgtctttgaagataataatgcctggtcgctgttacgggctattcggcgtgcttttgtactgtggtcccgtccttcactgtggcggtttgtgcaacgtcaggctatggcaatggattttagctggcaggtcgcggcgaagtcgtaccgtgagctttactatcgcttgaaatag

SEQ ID NO: 484691 - DNA, 2448 bp, Shigella sonnei
atgaatgctccgtttacatattcatcgcccacgcttagcgtagaagctcttaagcactctatcgcttacaagctgatgtttacgattggaaaggacccggtcgtcgccaataaacatgaatggctgaacgcaacgttatttgctgtgcgcgatcgtctcgtggagcgctggttacgttcaaaccgtgcccagttgtcgcaagaaacacgtcaggtttactacctgtcgatggagtttttgattggccgtacgctctccaacgccatgttgtcgctaggaatttacgaagatgtacagggcgcactggaagcgatggggttaaatctcgaagagctgattgatgaagaaaatgacccaggcctcggtaacggtggcctgggacgtctggcggcttgcttccttgattctctggcgacgttagggttgccggggcgcggttacggcatccgctatgactacggtatgttcaagcagaacatcgttaacggtagccagaaagagtcgccagactactggctggaatacggtaacccgtgggaattcaaacgccacaacacgcgctataaagtccgttttggcggtcgcattcagcaggaaggtaaaaaaacgcgctggattgaaaccgaagagattctgggagtcgcttacgatcagataatccctggttacgacaccgacgcgaccaacacgctgcgtttgtggagtgcgcaagccagtagcgaaattaacctcggtaaattcaaccagggtgactacttcgcggcagtggaagataaaaaccactccgagaacgtatctcgcgtactgtatccggatgactccacctactccgggcgtgagctgcgcctgcgtcaggaatacttcctggtttcctcgaccattcaggacattttaagccgccattatcagttgcataaaacctacgataacctggcggataaaatcgcgattcatctcaatgatacccatccggtactgtcgattcctgagatgatgcgtctgctgatcgatgagcaccaatttagctgggacgacgcgtttgaggtgtgttgtcaggtcttctcctacactaaccacacgctgatgagcgaggcgctggaaacctggccggttgatatgctgggtaaaattctgccgcgtcacctgcagatcatctttgaaatcaacgactatttcctgaaaaccttgcaggaacagtatccgaacgataccgatctgctgggacgggcgtcgatcattgatgaatccaacggtcgtcgtgtgcgtatggcctggctggcggttgttgtgagccacaaagttaacggtgtatcggaactgcactctaatctgatggtgcaatcgttgtttgccgactttgcgaaaatcttcccgggtcgtttcaccaacgtcaccaacggtgtgacgccgcgtcgctggctggcggtagcgaacccatcgctttcagccgtgctggacgaacacctgggccgtaactggcgcaccgaccttagcctgcttaatgagctgcaacaacactgtgatttcccaatggttaatcacgctgtgcatcaggcgaagctggagaacaaaaagcgtctggcagagtatatcgcccagcagctgaatgtggtggtgaatccaaaggcgttgttcgatgtacaaatcaaacgtattcacgaatacaaacgtcaattgatgaatgtgttgcatgtgattacccgctataaccgcatcaaggccgacccggatgcgaagtgggtaccgcgcgtgaatatttttggcggtaaggcggcttcggcctattacatggcgaagcacattattcatttgatcaatgacgtagcgaaagtgatcaacaacgatccgcagattggcgataagctgaaagtcgtgttcatcccgaactacagcgttagcctggcgcagttgatcattccggcggcagatctgtctgaacagatttcgctggcagggacggaagcttccggcaccagtaacatgaagtttgcgcttaacggtgcgctgactatcggtacgttggacggtgcgaatgtcgagatgctggatcatgtcggtgctgacaatatctttatttttggtaacacagcggaagaagtggaagaactgcgtcgtcagggctacaaaccgcgtgaatactacgagaaagatgaggagctgcatcaggtgctgacgcaaatcggcagcggtgtattcagtccggaagatccgggtcgctatcgcgatctggttgattcgctgatcaacttcggcgatcactatcaggttctggcggattatcgcagctatgtcgattgtcaggataaagtcgacgaactctacgagcttcaggaagagtggaccgcaaaagcgatgctgaacattgccaatatgggctacttctcttctgaccgtactatcaaagagtacgccgatcatatctggcatatcgatccggtgagattgtaa

SEQ ID NO: 484692 - DNA, 138 bp, Shigella sonnei; identical to SEQ ID NO: 262704

SEQ ID NO: 484693 - DNA, 1698 bp, Shigella sonnei
atggaaccaaaaacaaaaaaacagcgttcgctttatatcccttacgctggccctgtactgctggaatttccgttgttgaataaaggcagtgccttcagcatggaagaacgccgtaacttcaacctgctggggttactgccggaagtggtcgaaaccatcgaagaacaagcggaacgagcatggatccagtatcagggattcaaaaccgaaatcgacaaacacatctacctgcgtaacatccaggacaccaacgaaaccctcttctaccgtctggtaaacaatcatcttgatgagatgatgcctgttatttataccccaaccgtcggcgcagcctgtgagcgtttttctgagatctaccgccgttcacgcggcgtgtttatctcttaccagaaccgccacaatatggacgatattctgcaaaacgtaccgaaccataatatcaaagtgattgtggtgactgacggtgaacgtattctggggcttggtgaccagggcatcggcgggatgggcattccgatcggtaaactgtcgctctataccgcctgtggcggcatcagcccggcgtatacccttccggtggtgctggatgtcggaacgaacaaccaacaactgcttaacgatccgctgtatatgggctggcgtaatccgcgtatcactgacgacgaatactatgaattcgttgatgaatttatccaggctgtgaaacaacgctggccagacgtgctgttgcagtttgaagactttgctcaaaaaaatgcgatgccgttacttaaccgctatcgcaatgaaatttgttcttttaacgatgacattcagggcactgcggcggtaacagtcggcacactgatcgcagcaagccgagcggcaggtggtcagttaagcgagaaaaaaatcgtcttccttggcgcaggttcagcgggatgcggcattgccgaaatgatcatcgcccagacccagcgcgaaggattaagcgaggaagcggcgcggcagaaagtctttatggtcgatcgctttggcctgctgacggacaagatgccgaacctgctgcctttccagaccaaactggtgcagaaacgcgaaaacctcagtgactgggataccgacagcgatgtgctgtcactgctggatgtggtgcgcaatgtaaaaccagatattctgattggcgtctcaggacagaccgggctgtttacggaagagatcatccgtgagatgcataaacactgtccgcgtccgatcgtgatgccgctgtctaacccgacgtcacgcgtggaagccacaccgcaggacattatcgcctggaccgaaggtaacgcgctggtcgccacgggcagcccgtttaatccagtggtatggaaagataaaatctaccctatcgcccagtgtaacaacgcctttattttcccgggcatcggcctgggggttattgcttccggcgcgtcacgtatcaccgatgagatgctgatgtcggcaagtgaaacgcttgcacagtattcgccgctggtgctgaacggcgaaggtctggtactaccggaactaaaagatattcagaaagtctcccgtgcaattgcgtttgcggttggcaaaatggcgcagcagcaaggcgtggcggtgaaaacctctgccgaagctttgcaacaagccattgacgataatttctggcaagccgaataccgcgactaccgccgtacctccatctaa

SEQ ID NO: 484694 - DNA, 663 bp, Shigella sonnei
atggcggaagagtgcatcgtggtcgccgattacgcggtaaaagtgccagatggtctggactcggcggcggccagcagcattacctgtgcgggggtcaccacctacaaagccgttaagctgtcaaaaattcgtcccgggcagtggattgctatctacggtcttggcggtctgggtaacctcgccctgcaatacgcaaagaatgtctttaacgccaaagtgatcgccattgatgtcaatgatgagcagttaaaactggcaaccgaaatgggtgcagatttagcgattaactcacgcaccgaagacgccgccaaaattgtgcaggagaaaaccggtggcgctcactctgcggtggtaacagcagtagctaaagctgcgtttaactcggcagttgatgctgtccgtgcaggcggtcgtgttgtggctgtcggtctgccgccggagtctatgagcctggatatcccacgtcttgtgctggatggcattgaagtggtcggttcgctggtcggcacgcgccaggatctaaccgaagccttccagtttgccgccgaaggcaaagtggtgccgaaagtcgccctgcgtccgttagcggacatcaacaccatctttaccgagatggaagaaggcaaaatccgtggccgtatggtgattgatttccgtcactaa

SEQ ID NO: 484695 - DNA, 285 bp, Shigella sonnei
atgaaaatggccaatcatccccgcccgggggacattattcaggaatcactggacgaacttaatgtcagcctgcgcgagtttgccagagcaatggaaattgcgccctcaacggcaagccgattgctgaccggaaaagcagctttgacgccagaaatggcaattaaactttccgtggtgatcggcagttcgccgcaaatgtggctgaatctgcaaaacgcctggagtctggcagaggcagaaaaaacggtggatgtgtcgcgattacgccgtctggttacgcaataa

SEQ ID NO: 484696 - DNA, 654 bp, Shigella sonnei
atgagtaagtcgaaaatgattgtgcgcaccaaatttattgatcgcgcctgtcactggaccgtggtgatttgcttcttcctggtggcgctgtccgggatttcgttcttcttcccgacgctgcaatggctgacgcaaaccttcggtacgccgcagatgggacgcattttgcacccgttcttcggcattgcgattttcgtcgcactgatgtttatgtttgtgcgttttgtgcatcacaacatcccggataagaaagatattccgtggctgttgaacattgtcgaagtattaaaaggcaatgagcacaaagtggcggatgttggtaagtacaacgccgggcaaaagatgatgttctggtcgatcatgagcatgattttcgtgctgctggtgaccggggtgattatctggcgtccgtactttgcgcagtacttcccgatgcaggttgttcgctacagcctgctgatccacgcggctgcgggtatcatcctgatccacgccatcctgatccatatgtatatggcattctgggtgaaagggtcgattaaagggatgatcgaagggaaggtgagccgtcgctgggcgaagaaacaccatccgcgctggtatcgtgaaatcgagaaggcagaagcgaaaaaagagagtgaagaagggatataa

SEQ ID NO: 484697 - DNA, 885 bp, Shigella sonnei
atggctatggaaacgcaggatattatcaaaaggtccgcaactaactccatcacgccgccttctcaggtgcgtgattacaaagcagaagtcgcaaaacttatcgacgtttccacctgtatcggctgtaaagcctgtcaggtggcgtgttcggagtggaacgacatccgtgatgaagtggggcactgcgtcggggtttacgataaccccgccgatctgagcgccaagtcctggacggtgatgcgctttagcgaaaccgaacagaacggcaagctggagtggctgatccgtaaagacggctgtatgcactgtgaagatcccggctgcctgaaggcgtgcccgtctgctggtgcaatcattcagtacgctaacgggattgtcgatttccagtcggaaaactgcatcggctgtggttactgcattgccgggtgtccgtttaatattccgcgcctcaacaaagaggataaccgggtatataaatgcacgctctgcgtcgatcgcgtcagcgtcggccaggaaccggcttgtgtgaaaacctgtccgaccggggctatccacttcggcaccaagaaggagatgctggagctggcggaagagcgcgtggcgaaactgaaagcgcgtggttacgaacatgctggcgtctacaacccgaaaggggtcggtggtacgcacgttatgtacgtgctgcatcacgccgatcagccggagctgtattacggtctgccgaaagatccgaagatcgacacctcggtaagcctgtggaaaggcgcgttgaaaccgctggcagcggctggctttattgccacttttgccgggttgattttccactacatcggtattggcccgaataaggaagtggacgatgacgaggaggatcatcatgagtaa

SEQ ID NO: 484698 - DNA, 2412 bp, Shigella sonnei
atgaccaaccactgggtggatatcaaaaacgctaacgtcgtaatggtaatgggcggtaacgctgctgaagcgcatcccgtcggtttccgctgggcgatggaagcgaaaaacaacaacgatgcaaccttgatcgttgtcgatcctcgttttacgcgtaccgcttctgtggcggatatttacgcacctattcgttccggtacggacattacgttcctgtctggcgttttgcgctacctgatcgaaaacaacaaaatcaacgccgaatacgttaaacattacaccaacgccagcctgctggtgcgtgatgattttgctttcgaagacggcctgttcagcggctacgacgctgaaaaacgccagtatgataagtcgtcctggaactatcagttcgatgaaaacggctatgcaaaacgcgatgaaacactgactcatccgcgctgtgtgtggaacctgctgaaagcgcacgtttcccgctacacgccggacgtcgttgaaaacatctgcggtacgccaaaagccgacttcctgaaagtgtgtgaagtgctggcctccaccagcgcaccggatcgcacaaccaccttcctgtacgcgctgggctggacgcagcacaccgtgggtgcgcagaacatccgtactatggcgatgatccagttgctgctcggtaacatgggtatggccggtggcggcgtgaacgcattgcgtggtcactccaacattcaggggctgactgacttaggtctgctctctaccagcctgccaggttatctgacgcttccgtcagaaaaacaggttgatttgcagtcgtatctggaagcgaacacgccgaaagcgacgctggctgatcaggtgaactactggagcaactatccgaagttcttcgttagcctgatgaaatctttctatggcgatgccgcgcagaaagagaacaactggggctatgactggctgccgaagtgggaccagacctacgacgtcatcaagtatttcaacatgatggacgaaggcaaagtcaccggttacttctgccagggctttaacccggttgcgtccttcccggacaaaaacaaagtggtgagctgcctgagcaagctgaagtacatggtggttatcgatccgctggtgactgaaacctctaccttctggcagaaccacggcgagtcgaacgatgtcgatccggcgtctattcagactgaagtattccgtctgccttcgacctgctttgccgaagaagatggttctatcgctaactccggtcgctggttgcagtggcactggaaaggtcaggacgcgccgggcgaagcgcgtaacgacggcgaaattctggcgggtatctaccatcatctgcgcgagctgtaccaggccgaaggtggtaaaggcgtagaaccgctgatgaagatgagctggaactacaagcagccgcacgaaccgcaatctgacgaagtggcgaaagagaataacggctatgcgctggaagatctctatgacgctaatggcgtgctgattgcgaagaaaggtcagttgctgagtagctttgcgcatctgcgtgatgacggtacaaccgcatcttcttgctggatctacaccggtagctggacagagcagggcaaccagatggctaaccgcgataactccgacccatccggtctggggaatacgctgggatgggcctgggcgtggccgctcaaccgtcgcgtgctctacaaccgtgcttcggcggatatcaatggtaaaccgtgggatccgaaacggatgctgatccagtggaacggcagcaagtggacgggtaacgatattccggacttcggcaatgccgcaccgggtacgccaaccgggccgtttatcatgcagccggaagggatgggacgcctgtttgccatcaacaaaatggcggaaggtccgttcccggaacactacgagccgattgaaacgccgctgggcactaacccgctgcatccgaacgtggtgtctaacccggttgttcgtctgtatgaacaagacgcgctgcggatgggtaaaaaagagcagttcccgtatgtgggtacgacctatcgtctgaccgagcacttccacacctggaccaagcacgcattgctcaacgcaattgctcagccggaacagtttgtggaaatcagcgaaacgctggcggcggcgaaaggcattaataatggcgatcgtgtcactgtctcaagcaagcgtggctttatccgcgcggtggcggtggtaacgcgccgtctgaaaccgctgaatgtaaacggtcagcaggttgaaacggtgggtattccaatccactggggctttgagggtgtcgcgcgtaaaggttatatcgctaacactctgacgccgaatgtcggtgatgcaaactcgcaaacgccggaatataaagcgttcttagtcaacatcgagaaggcgtaa

SEQ ID NO: 484699 - DNA, 588 bp, Shigella sonnei
atggacgtcagtcgcagacaattttttaaaatctgcgcgggcggtatggctggaacaacggtagcggcattgggctttgccccgaagcaagcactggctcaggcgcgaaactacaaattattacgcgctaaagagatccgtaacacctgcacatactgttccgtaggttgcgggctattgatgtatagcctgggtgatggcgcgaaaaacgccagagaagcgatttatcacattgaaggtgacccggatcatccggtaagccgtggtgcgctgtgcccaaaaggggccggtttgctggattacgtcaacagcgaaaaccgtctgcgctacccggaatatcgtgcgccaggttctgacaaatggcagcgcattagctgggaagaagcattctcccgtattgcgaagctgatgaaagctgaccgtgacgctaactttattgaaaagaacgagcagggcgtaacggtaaaccgttggctttctaccggtatgctgtgtgcctccggtgccagcaacgaaaccgggatgctgacccagaaatttgcccgctccctcgggatgctggcggtagacaaccaggcgcgcgtctga

SEQ ID NO: 484700 - DNA, 825 bp, Shigella sonnei
atggtaggattgattcgcggtgtcagcgaggggctcggtccggtcggcggcgcagctgctatctattcattaagcgggctgctgttaatcttcacggttggatttccgcgtattcggcagattccgaaaggctatttactcgccgggagtctgttattcgtcagctatgaaatctgtctggcgctttccttagggtatgcggcgacccgtcatcaggcgattgaagtgggtatggtgaactatctgtggcccagcctgacaattctctttgccattctgtttaatggtcagaaaaccaactggctgattgtaccaggattattattagccctggtcggcgtctgctgggtgttaggcggtgagaatgggttacattatgatgaaatcatcaataatatcaccaccagcccattgagttatttcctggcgtttattggtgcgtttatctgggcagcctattgcacagtaacgaataaatacgcacgcggatttaacggaattaccgtttttgtcctgctaacgggagcatgtctgtggatttactattttctcacgccacaaccagaaatggtatttagcacgcccgtcatgattaaactcatctctgcggcatttaccttaggatttgcttatgctgcatggaatgtcggtatattgcatggcaatgtcaccataatggcggtaggctcgtattttacgcctgtactttcctcagcgcttgcagccgtgctgctcagcgccccgctgtcgttctcgttctggcaaggcgcgctaatggtctgcggcggttccctgctctgctggctggcgacacgtcgtggttaa

SEQ ID NO: 484701 - DNA, 1101 bp, Shigella sonnei
atgaaattaaaaatagttgcggtggttgtaactggtttgttagctgcgaacgtagcacacgctgccgaagtctataacaaggatggtaataaactcgacctttatggcaaggttaccgctctacgttattttactgatgataagcgtgacgatggtgataaaacttatgcccgtctcggctttaaaggagaaacgcaaatcaatgatcaaatgattggttttggtcactgggaatatgattttaaaggctataacgatgaagccaacggctcgcgcggcaacaagacccgtctggcctatgctggtttaaaaattagtgaatttggctctctggactatggtcgtaactacggtgtcggctacgacattggttcatggaccgatatgttgccagaatttggtggcgatacctggagtcagaaagatgtcttcatgacataccgtaccaccggtctagcaacctatcgcaactacgatttctttggcttaattgaagggctgaactttgccgcgcaatatcaaggcaaaaatgaacgtactgacaacagtcatctttatggtgctgactacacgcgtgccaacggtgacggtttcggtatctcctcaacttatgtttatgatggctttggtatcggtgcggtatataccaaatccgatcggacaaatgcgcaggaaagagccgctgctaatcctctcaatgcctccggtaagaatgcagaactatgggccacaggtataaagtatgatgccaacaacatctactttgcagctaattacgctgaaacattaaacatgaccacctatggggatggttatatctctaacaaagcacaaagttttgaagtggtggcgcaatatcaattcgacttcggcttgcgcccatcactcgcttacctgaaatcgaaaggcagagatctgggccgctacggcgaccaggacatgattgagtatatcgacgttggtgcgacgtatttcttcaacaaaaatatgtcgacctatgttgattataaaatcaacctgattgatgaaagcgactttacccgtgccgtagatattcggaccgataacatcgtcgctacgggcattacctatcagttctaa

SEQ ID NO: 484702 - DNA, 1164 bp, Shigella sonnei
atgaccaatattaatacagcttgtgtaaaaaataatgccagttatcaacttaataacgcattacctaacaaagaaaccatctccagcaatttttgtgaacgactagaacaatggggtaataaatcggttaataatggtgaagaaagagcaattgccgtggagcgaattaaagaagcttacaattcgaacatggcatctcttgatttgtcatatcttgatttgagtgaattaccgcctatcccctcgacagttaatacgttaaatctggaaaacaattgtctaacttgtcttgacttagctgacaatgccagtctcgttaatatcaacttcagcgttaataaaattaacacgataacctttccaaaagaatcaaaactggaaaacatttatattgatcataacaatctggaaagtttagatttaaaaaatcagcattcattggttaatctggaagcgcaaaataacaaactgacaaaaattaatatttctgatagttataaactgaaatttcttaatcttgattataacaagctagcatcgctggatgtctcccggcaagaatctctgattgagttaagtgcccatcacaatatgatcactgaccttatattacacaatcatcccaggatgaaaacaatcactttaaacgacaaccatattgcacatttaaacgccaaaaacactacaaaactggaatatttaaacttaagcaataacaatttactgccaaccaatgacattgatcaactaatatcatcaaaacatctttggcatgtattagttaacggcatcaacaatgatacacttgcacaaatgcagtactggactgcagtaagaaatataattgatgacactaatgaagtgaccattgatttatcaggacttaatttaaccactcaaccaccagggctgcaaaacttcacatctatcaatcttgataataaccaactcacacattttgatgcaaccaactacgatagactcgtaaagctaagtctgaatagtaatgctcttgagtcaataaattttcctcaaggcagaaatgtaagtattacacatatatctatgaataataatgctctcagaaatattgatatagataggctttcatcagttacttattttagtgcggcacataatcaactaaatagctgcgcggaatag

SEQ ID NO: 484703 - DNA, 150 bp, Shigella sonnei
atgggctggcaaaagtgtagcggtattaagcgcagctatttagttaaacttaaagtgcctggttcaactatcaaaaatcgctcaccctttttcacctgtttaaaatatgttcagcaacccatcttgatggcgacctcctctccgcgatga

SEQ ID NO: 484704 - DNA, 921 bp, Shigella sonnei
atggaattaaaggattattacgccatcatgggcgtgaaaccgacggacgatctcaagacaatcaagaccgcctatcgtcgactggcccgtaaataccatcctgatgtcagcaaagaaccggatgccgaagcccgcttcaaagaggtcgctgaagcctgggaagtgttaagtgatgaacaacgtcgcgctgagtatgatcagatgtggcaacatcgcaacgatccgcaatttaaccatcagttccatcatggcgacggtcagagttttaatgccgaagattttgacgatatcttctcgtcaattttcggtcagcatgcccgccagagccgtcaacgccccgccgcacgcggccacgatattgaaatcgaagtggcggtattcctcgaagaaacgctgactgagcataagcgtaccatcagctataacctgccggtttataacgcctttggcatgatcgaacaggaaatcccgaaaacgctgaatgtgaagatcccggcgggcgtcggcaatggtcaacgcatccgtctgaaaggccaggggacgccgggcgaaaacggtggtccaaatggcgatttgtggctggtgattcatattgcgccacatccgctgttcgatattgtcggccaggatctggaaattgtggtgccggttagcccgtgggaagcggcgctgggtgctaaagtcaccgttccaacactgaaagaaagcattttgctgactatcccgccaggcagccaggccgggcaacgattgcgcgttaaaggcaaaggtctggtgagcaaaaaacagaccggcgatctgtatgcggtactgaaaatcgtgatgccgccgaaaccggatgaaaacactgccgcgctgtggcagcaactggcagacgcccagtcgtcttttgatccacgtaaagattgggggaaagcatga

SEQ ID NO: 484705 - DNA, 306 bp, Shigella sonnei; identical to SEQ ID NO: 474524

SEQ ID NO: 484706 - DNA, 1875 bp, Shigella sonnei
atggcggcgaacagaacgcaaattattgctggctggtgcgtgcagcgtatgcagcacggtgaacagtgggcgtggatgattgtggttctggcggcgatgctggggcaaattggcctgccaggtggtggctttggttttggctggcactataacggcgcaggcacgccggggcgtaaaggcgttattctgagtggtttctccggctctacgtcgattccgcctgttcacgacaacagtgattacaaaggctacagcagcaccattccgattgcccgttttatcgatgcgatcctcgaaccggggaaagtgatcaactggaacggtaaatcggtaaaactgccgccgctgaaaatgtgtatttttgctggaactaacccattccatcgccatcagcagatcaaccgcattattgaaggctggcgcaagctggaaacggttatcgccatagataaccagtggacctcaacctgccgctttgccgatatcgtgctgcctgcgaccacgcagtttgagcgtaacgatctcgaccagtacggcaaccactccaaccgtggcattatcgccatgaaacaggtggtgccgccgcagttcgaggcgcgcaacgactttgatattttccgcgagctgtgccgtcgctttaatcgcgaagaagcctttaccgaagggctggacgaaatgggctggctgaaacgcatctggcaggaaggtgtacaacaaggcaaaggacgcggcgttcatctgccagcgtttgatgacttctggaataacaaagagtacgtcgagtttgaccatccgcagatgtttgttcgccaccaggcattccgcgaagatccggatctcgaaccgctgggcacgccgagtggcctgattgagatctactcgaaaaccatcgccgatatgaactacgacgattgtcaggggcatccgatgtggtttgagaaaatcgaacgctcccacggtgggcccggctcgcagaagtatccgttgcatctgcaatctgtgcatccggatttccgacttcactcgcagttatgtgagtcggaaactctgcgtcagcaatatacggtagcgggtaaagagccagtattcattaacccgcaggatgccagcgcgcgcggtattcgtaacggtgatgtggtacgcgtctttaacgctcgcggtcaggtgttggcaggggcagtggtttctgaccgctatgcacccggcgtggcacgaattcacgaaggggcatggtacgatccagataaaggcggcgagcctggtgcgctgtgcaaatacggtaaccccaacgtgttgaccatcgacatcggtacatcgcagctggcgcagttgttctcccgtgaactggacgatgaacaactgacgcaaatcgccagtgcgcagatggctgaatggttttcgttgctgaaaagcgaaccgccgctcactgcggcggtgaatgcgctggaaaaccgtattgccgctctgacagtacgtgacgatgcccgtctggaactggccgctgacttttgcggcctgtttctgatgaccgacaaacaagcggcgctgccgtatgcatcggcctacaaacaggacgagcaagagattaaacgcttgttagttgaggcagggatggaaaccagtggcaatttcaacgaatcggcagatcatctggcgatctatctcgagttgttgagtcatctgcatttttcgctgggagaggggaccgttcctgcgcgaagaatcgacagtttgcggcaaaaaacactgacggcgctgcggcaatggttaccagagtttgctgcgcgttgtcgacagtatgacagctttggtttttacgcggcactaagccagttattgctggtgttagtggagtgcgaccaccaaaacagataa

SEQ ID NO: 484707 - DNA, 720 bp, Shigella sonnei
atggtacgcgtggactggctgcgtaagcgccatctcagcgatacctcccagcgcggtgataaccgttttgtgcgcgtgagctgggatgaagccctcgacatgttctatgaagaactggaacgcgtacagaaaactcacgggccgagtgccttgctgaccgccagtggttggcaatcgacggggatgttccataacgcttcggggatgctggcgaaagctattgccttgcatggtaatagcgttggtacgggcggagattactctaccggtgctgcgcaggtgatcctgccgcgcgtggttggctcaatggaagtgtatgaacagcaaacctcctggccgctggtattgcagaacagcaaaaccattgtgctgtggggctctgatttgctgaaaaaccagcaagcgaactggtggtgcccggatcacgatgtttatgaatattacgcgcagctaaaagcgaaagtcgccgccggtgaaattgaggtcatcagcatcgatccggttgtcacatccacccatgagtatctggggcgcgagcatgtgaagcacattgcggttaacccgcaaactgatgtgccgctgcaactggcgctggcgtatacgctgtacagtgaaaacctgtacgacaaaaacttcctcgctaactactgtgtgggttttgagcagttcctgccgtacctgctgggtgagaaagacggtcagccgaaagatgccgcatag

SEQ ID NO: 484708 - DNA, 327 bp, Shigella sonnei
atgaacaataacgatctctttcaggcatcacgtcggcgttttctggcacaactcggcggcttaaccgtcgccgggatgctggggccgtcattgttaacgccgcgccgtgcgactgcggcgcaagcggcgactgaggctgtcatctcgaaagagggcattcttaccgggtcgcactggggggctatccgcgcgacggtgaaggatggtcgctttgtggcggcaaaaccgttcgaactggataaatatccgtcgaaaatgattgccggatcacgtacacaacgcggcgcgtattcgttatccgatggtacgcgtggactggctgcgtaa

SEQ ID NO: 484709 - DNA, 1173 bp, Shigella sonnei
atgcggaaactctggaacgcgctacgccgacccagtgctcgttggtcggtactggcgctggtcgctattgggattgtgattggcattgcgctgattgtattgccacacgttgggatcaaagtcaccagcacaaccgaattttgtgtcagttgccacagtatgcaaccggtgtatgaagaatataaacagtcggtgcattttcagaacgcctctggcgtgcgagctgaatgccatgactgtcatatcccgccggatattccaggcatggtgaagcgcaaactggaagcgagcaacgacatttaccagacctttattgcccactccattgatacacctgaaaaattcgaagccaaacgcgcggaacttgccgagcgtgaatgggcgcgaatgaaagaaaacaactcggcaacctgtcgctcctgccataactacgatgcgatggatcatgccaggcagcatcctgaagcggcacgtcagatgaaggtggcagcgaaagataatcaatcctgcatcgactgtcataaaggtattgcccaccagttaccggatatgagtagcggcttccgtaagcagttcgatgagctgcgcgccagtgctaatgacagtggtgacacgctgtactctattgatattaagccaatttatgcggcgaaaggcgataaagaagcctctggttctctgctgcctgcttcggaagtgaaagtccttaaacgtgacggcgactggctgcaaattgaaattaccggctggacggaaagcgccggacgtcagcgtgtactcacccaattcccaggtaaacgcatctttgttgcctcgattcgtggtgatgtgcagcagcaggtgaaaacgctggagaaaaccaccgttgccgacaccaataccgagtggagcaagttgcaggccaccgcgtggatgaagaaaggcgacatggtgaacgatatcaaaccgatctgggcctatgcggattcgttgtacaacggcacctgtaaccagtgccacggcgcaccggaaatcgcccactttgacgctaacggttggatcggcacgctcaacggcatgattggctttaccagcctcgataaacgtgaagaacgcaccttgttgaaatatctgcaaatgaatgcgtctgacaccgcaggtaaggctcacggcgataagaaggacgaaaaataa

SEQ ID NO: 484710 - DNA, 693 bp, Shigella sonnei; identical to SEQ ID NO: 460214

SEQ ID NO: 484711 - DNA, 1029 bp, Shigella sonnei
atgcgcgtactgctatttttacttctttcccttttcatgttgccggcattttcggctgataacctgttgcgctggcatgatgcgcagcatttcacggtgcaagcctctatgccgcttaaagccaaacgcgcatggaaactgtgcgcgctttatcccagcctgaaagattcatactggttatcgttgaactatggtatgcaggaggcagctcgccgttatggtgtggatttaaaagtgctggaggcaggcggctacagccagttggctacccagcaagcacaaatcgaccagtgtaaacagtggggcgcagaggccattttactcggtagtagcacgacctcatttcccgatctgcaaaagcaggtagcaagtctgccggtgatcgaactggtaaatgctattgatgctccccaggtgaaaagccgcgttggtgtaccctggtttcagatgggctatcaacctgggcgatatttggtgcaatgggcgcacggtaaaccactgaacgtgctgttgatgcccggacccgataatgccgggggcagtaaagagatggtcgagggttttcgcgcagccattgccggaagcccggtgcgtattgttgatattgcgcttggtgataacgatattgaaatccagcgtaacctgttgcaggagatgctggaacgccacccagaaatcgacgtcgttgccggaacggccattgcggcagaggcggcaatgggtgaagggcgtaacctgaaaacgccgcttaccgtggtgtcgttttatctttcacatcaggtgtatcgcgggctgaagcggggaagagtgattatggctgccagcgatcaaatggtctggcagggggaactggcggttgagcaggccatcaggcaattacaggggcaatcggtgtctgataatgtcagcccaccgattttagttctgacgccgaaaaatgccgaccgtgaacatattcgccgctcgctgtcaccagggggatttcgtccggtctatttttatcagcacacatcagcggctaagaaataa

SEQ ID NO: 484712 - DNA, 2700 bp, Shigella sonnei
atggcgctgttaaccctgaccagtaccctggtgggatggtacaacctgcgctttatcagccaggtggaaaaagacaatactcaggcattgattcctaccatgaatatggcgcgccagttgagcgaagccagcgcctgggaacttttcgccgcgcagaacctgaccagtgccgataacgaaaagatgtggcaggcgcaggggcgaatgctcaccgcacaaagcctgaagattaatgcgttgctgcaagcgttacgggaacaaggttttgataccaccgctattgaacaacaggagcaggagatctcccgttcgttacgtcagcaaggggaactggtggggcggcgtctgcaactacgccagcaacaacagcaactcagtcagcagatagtcgctgccgccgatgagatcgcacgcctggcgcaaggtcaggcgaataatgcgacaacttccgctggagcgacccaggccgggatttacgatttgatcgaacaagatcagcgtcaggctgctgaaagtgcactcgatcggctgattgatatcgatcttgagtatgttaaccagatgaatgaactgcgccttagcgctctgcgggtgcagcaaatggtgatgaatctggggctggagcagatccagaaaaatgcaccaacgctggaaaagcagctcaataatgcggtgaaaattctgcaacgtcggcaaatacgcattgaagatccgggagttcgtgcgcaggtcgcaacaacgttaactaccgttagccaatatagcgatctgttggcgctgttccagcaggacagtgaaatcagcaatcacctgcaaactctcgcccaaaataatatcgcccagttcgcgcagtttagtagcgaagtcagtcagctggtcgacaccattgagctgcgtaatcagcacggactggcgcatcaggaaaaagccagtgcacgcgggcaatacagcctgttattgctggggatggtttcactttgcgcactgattctgatcctctggcgcgtggtttatcgctcagtcacgcgtccacttgccgaacaaacgcaggcgctgcaacggctgctggacggtgatattgactcccctttcccggaaaccgctggcgtacgggagctggacaccatcgggcagctgatgggtgcgtttcgcagcagtgttcatgcactgaatcgccaccgtgaacagctggcggcgcaggtcaaagcgcgtacagctgaattgcaggaactagtgatagaacaccgacaggcacgggcggaagcagaaaaagccagccaggcaaaatcggcgtttctggcggcgatgagccatgagatccgcacaccgctgtacggtattctcggcaccgcacagctactggcagataaccccgcacttaacgcccagcgtgatgatttgcgggcaattactgactctggtgaatcgttgctgaccatcctcaacgatattctcgattattccgctatcgaagcaggtggcaagaatgtttcggtcagcgatgagccctttgaaccgcgcccgctgctggaaagtaccctgcaattaatgagcggacgggtgaaaggtcgcccgattcgcctggcaacggcaattgccgatgatatgccgtgcgcgttaatgggcgatccacgacgtattcgtcaggttataaccaacctgttgagcaacgccctgcgttttactgacgaagggtacattatcctgcgtagtcgcactgatggcgagcaatggctggtcgaagtggaagacagcggctgcggtattgatcccgcgaaactggcagaaatcttccagccatttgtgcaggtaagcggcaaacgcggcggcaccgggctggggctgactatcagtagccgtctggcccaggcgatgggcggcgaactgagcgccaccagcacgccggaggttggaagctgtttttgtttacgcttgccgttacgtgttgccacggcacccgtgccaaaaacagtcaatcaggcggtgcgtcttgacggtttacgtttgctgttaattgaagataacccgctaacccagcgaattaccgttgagatgctgaacaccagtggtgcgcaggttgttgctgttggcaatgccgcgcaggctttagagacactgcaaaatagcgaaccgtttgctgccgcactggtggattttgatctgccggatgtcgacggcattacgcttgcccgacaactggcacagcaatatccgtcgctggttttgattggctttagcgcccatgtcattgacgaaacgctgcgccagcgtaccagttcattattccgcgggattatccctaaaccggtgccgcgtgaagtgctcggtcagttactggcgcactatctccaactgcaagtcaataacgatcaatcgctggatgtatcgcaactcaatgaagatgctcagttaatggggacggagaagatccacgaatggctggtattatttacacaacatgccctgccgcttctcgatgaaatcgacattgcccgcgccagtcaggatagcgagaaaataaagcgtgccgcgcatcagctaaaaagcagttgcttgagtttgggaatgcgtatcgccagccagctatgcgcacaactggagcagcagccattatctgccccccttccacacgaagaaattacacgcagtgttgccgctctggaagcatggttgcataagaaagacctgaacgcgatttga

SEQ ID NO: 484713 - DNA, 666 bp, Shigella sonnei
atggcagagaaaaaaagaacccgctggcagcggcggccaggcacgacgggcggcaaattaccgtggaatgactggcgcaatgccacgacctggcgtaaagcgacgcaattattactgttggcaatgaatatttatattgccatcacgttctggtattgggtgcgctattacgaaacggcaagtagcacgacatttgtcgccagaccgggaggtatcgaaggctggctaccgattgccggtctgatgaatctgaaatatagccttacaacaggtcagttaccgtccgtccacgccgccgcgatgctgttattggtcgcttttatcgtcatcagtctattactcaaaaaggccttttgctcatggttatgcccggttggtacgctttctgaattaatcggcgatctcggtaacaaactgtttggtcggcaatgtgtccttccccgctggctggatattcctctgcgcggcgtgaagtatttgctgttgagtttttttctctatatcgcgttattgatgcccgctcaggcgattcactattttatgttgtcgccctacagcgtggtgatggacgtaaaaatgctcgatttctttcgtcatatggggaccgcgacattaatcagcgtgaccgttttgctgattgccagcctgtttattcgccatgcctag

SEQ ID NO: 484714 - DNA, 249 bp, Shigella sonnei
gtggaatgtaccggctgtatgacttgcgtagagtcatgtccggtagcctcaacattgaccttttcactgcaaaaacctgcggcaaataaaaaagcttttgcgttgtctggctggttaatgacgctactggttctgaggattatgttcgcggtgattggttacgcaatgtatgcgggagtatggcaaagcccggtgccggaggaattgtaccgacgcttaattccacaagcgccaatgattggtcactaa

SEQ ID NO: 484715 - DNA, 174 bp, Shigella sonnei; identical to SEQ ID NO: 935

SEQ ID NO: 484716 - DNA, 213 bp, Shigella sonnei
atgtctaataaaatgactggtttagtaaaatggtttaacgcagataaaggttttggctttatcactcctgatgatggcagcaaagacgttttcgtccatttcaccgccatccagagcaatgaattccgcacgctgaacgaaaatcagaaagttgaattttctattgagcaggggcaacgtggccccgcggcagcgaacgttgttacgctctaa

SEQ ID NO: 484717 - DNA, 825 bp, Shigella sonnei
atgcaatcattacatgggaattgtctaattgcgtacgcaagacataaatatattctcaccatggttaatggtgaatatcgctattttaatggcggtgacctggtttttgcggatgcaagccaaattcgagtagataagtgtgttgaaaattttgtattagtatcaagggatacgctttcattatttctgccgatgctcaaggaggaggcattaaatcttcatgcacataaaaaaatttcttcattactcgttcatcactgtagcagagatattcctgtttttcaggaagttgcgcaactatcgcagaataagaatcttcgctatgcagaaatgctacgtaaaagagcattaatctttgcgttgttatctgtttttcttgaggatgagcactttataccgctgcttttgaacgttttgcaaccgaacatgcgaacacgagtttgtacggttatcaataataatatcgcccatgagtggacactagcccgaatcgccagcgagctgttgatgagtccaagcctgttaaagaaaaaattgcgcgaagaagagacatcatattcacagttgcttactgagtgtagaatgcaacgtgctttgcaacttattgttatacatggcttttcaattaagcgagtcgcagtgtcctgtggatatcacagcgtgtcgtatttcatttacgtctttcgaaattattatgggatgacgcccacagagtatcaggagcgatcggcgcagggattgccgaaccgtgactcggcggcaagtattgttgcgcaaggaaatttttacggcactgaccgttctgcggaaggaataagattatag

SEQ ID NO: 484718 - DNA, 729 bp, Shigella sonnei
atgactcatgtctgctcggtgatcctcattcgtcgttcattcgatatttatcatgaacagcataaaatatcgctgcataacgagagtatcgtgctgctggagaaaaatttggcagacgattttgcgttttgttcaccggatacgcgacgactggatatcgatgagctgacagtttgccattacttacaaaatattcgtcagctaccacgcaatttagggttacatagcaaagaccgtctattaattaaccagtcaccccccatgccgctggtgacggcgatttttgatagcttcaatgaatccggggtaaattcaccgatactgagcaatatgctctacctttcctgtttatcgatgttttctcataagaaagaactgatccccttacttttcaatagcatcagcactgtttcaggaaaagttgaacgccttattagctttgatatcgccaaacgttggtatctgcgcgatatcgcggaaagaatgtataccagcgagagtctcataaaaaaaaagttgcaggatgaaaatacctgtttcagtaaaatattactcgcttccaggatgtcgatggccagacgattactcgagttacgtcaaattcctctgcatactattgcagaaaaatgtggctatagcagtacgtcgtactttataaacacatttcgacaatattatggtgtaacgccacatcagtttgcgcaacattcgccaggtaccttttcctga

SEQ ID NO: 484719 - DNA, 282 bp, Shigella sonnei; identical to SEQ ID NO: 460159

SEQ ID NO: 484720 - DNA, 3114 bp, Shigella sonnei
atggctaactattttattgatcgcccggtttttgcctgggtacttgccattattatgatgcttgcaggtggtctggcgatcatgaacttaccggttgcgcagtatccgcagattgcgccaccgaccattaccgtcagcgctacctatccaggtgccgatgcgcaaacggtagaagactcggtcactcaggtgattgagcaaaatatgaatgggcttgatggcctgatgtacatgtcttcaaccagtgatgcggcgggtaatgcctctatcactctgaccttcgagactgggacatctcctgatatcgcacaggttcaggtgcaaaataaactgcaactcgctatgccttcattacctgaagcggtgcagcagcaggggattagcgttgataagtcgagcagtaatattctgatggtagcggcgtttatttctgataacggcagcctcaaccagtacgatatcgcggactatgtagcgtctaatatcaaagacccgctaagccgtaccgcgggcgttggtagcgtacagctctttggttccgagtacgccatgcgtatctggctggacccgcaaaaactcaataaatacaatctggtaccttccgatgttatttcccagattaaggtgcaaaacaaccagatttccggtggtcaactgggtggcatgccacaggcggcagaccagcaactaaacgcctcgatcattgtgcagacgcgtctgcaaacgccggaagaatttggcaaaatcctgttgaaagttcagcaagatggttcgcaagtgctgctgcgtgatgtcgcccgcgtcgaacttggagcggaagattattccaccgtggcgcgctataacggcaaacctgctgccgggatcgccatcaaactggctaccggagcaaacgccctggatacctcgcgggcagtcaaagaggagctgaaccgcttatcagcctatttccccgcaagtctgaagacggtttatccttacgacaccacgccgtttatcgaaatttctattcaggaagtttttaaaacactggttgaggctatcatcctcgtcttcctggtcatgtatctgtttttgcagaatttccgtgccacaatcatcccgacgattgccgtaccggtggttattctcgggacgtttgcgatcttgtcggcggtcggtttcaccatcaacacgttaactatgttcgggatggtgctggcgatagggttactggtggatgacgccatcgtggtggtggagaacgtcgagcgtgtcattgcggaagataagctaccaccgaaggaagcgacgcataaatcgatggggcagatccaacgtgcgctggtcggtattgctgttgttctttccgcagtgtttatgccgatggcctttatgagcggcgcaaccggggagatctaccgccagttctccatcacgctgatctcctccatgctgctttcagtatttgtggcaatgagcctgacccctgccctgtgcgccaccattctgaaagccgcgccggaaggcggtcacaaacctaacgccctgttcgcacgcttcaacacgctgtttgaaaaatcaactcagcactataccgatagcacccgctcgctgttgcgttgtaccggtcgctacatggtggtctacctgctgatttgcgccgggatggcggtgctgttcctgcgtacaccgacctctttcttaccagaagaggatcagggggtatttatgaccaccgcgcagttaccttccggtgccaccatggttaacaccacgaaagtgctgcaacaggtgacggattattatcttacaaaagagaaagataatgttcagtcggtgtttaccgttggcggctttggcttcagcggccaggggcaaaacaacggcctggcgtttatcagtctcaagccgtggtctgaacgtgtcggtgaggaaaactcggttaccgcgatcattcagcgggcaatgattgcgttaagcagtatcaataaagccgtcgtcttcccgttcaacttacccgcggtggctgaactgggtaccgcgtcaggttttgatatggaactgctggacaacggtaacctggggcacgaaaaactaacccaggcacgaaacgagctgttatcactggcagcgcaatcgcctgaccaggtcaccggggtacgcccgaacggcctggaagatacgccgatgttcaaagtgaacgtcaacgccgcgaaagctgaggcaatgggtgtggcgctgtctgatatcaaccagacaatttccaccgccttcggcagcagctacgtgaacgacttcctcaaccaggggcgggtgaaaaaagtgtatgtccaggcaggcacgccgttccgtatgttgccggataacatcaaccaatggtatgtacgcaacgcctctggcacgatggcaccgctttctgcctactcgtctaccgaatggacctatggttcaccgcgattggaacgctacaacggcatcccgtcaatggagattttaggtgaagcggcggccgggaaaagtaccggtgacgctatgaaatttatggcagacctggtcgctaaacttccggcaggcgtcggctactcatggaccggactgtcgtatcaggaagcgttatcctcaaaccaggctcctgcactgtatgccatttcactggtcgtggtgttcctcgccctcgccgcactctatgagagctggtcaattccgttctcggtgatgttggttgttccgttaggcgtcgttggcgcattactggccaccgatctgcgcggcttaagtaatgacgtctacttccaggttggtttgctgaccaccatcgggctttccgccaagaacgccatcctgattgtcgaatttgccgttgagatgatgcagaaagaagggaaaacgccgatagaggcaatcatcgaagcggcgcggatgcgtttacgcccaatcctgatgacctctctcgcctttattctcggcgtgctgccgctggttatcagtcatggtgccggttctggcgcgcaaaacgcggtaggtaccggcgtgatgggcgggatgtttgccgcaacagtgctggcaatttacttcgttccggtctttttcgttgtagtggaacatctctttgcccgctttaaaaaagcgtaa

SEQ ID NO: 484721 - DNA, 1158 bp, Shigella sonnei
atgaacagaagaagaaagctgttaataccgttgttattctgcggcgcgatgctcaccgcctgcgatgacaaatcggcggaaaacgccgccgccatgacgcctgaggtcggtgtcgtcacactctcccccggttcggtcaatgtgttgagcgaattgcccggtagaaccgttccttatgaagttgccgagatacgtccccaggtgggcggtattatcattaaacgcaactttatcgaaggcgataaagtgaaccagggcgattcgctgtatcagattgatcctgcacctttacaggccgagctaaactccgccaaaggctcgctggcgaaagcgctctctaccgccagcaatgcccgcatcacctttaaccgccaggcatcgttgctgaagaccaactacgttagccgtcaggattacgacaccgcgcgcacccagctgaatgaagcagaagccaatgtcaccgtcgccaaagcggctgttgaacaggcgacgatcaatctgcaatacgcgaatgtcacctcgccgattacgggcgtcagcgggaaatcgtcggtgaccgtcggcgcactcgttaccgctaatcaggcagattcgctggttaccgtacaacgtctggacccgatttatgtcgatctcacgcagtcggtgcaggatttcttgcgcatgaaagaagaggtcgccagtgggcaaatcaaacaggttcagggcagtacgccagtacagctcaatctggaaaatggtaaacgctacagccagaccggcacactgaaattctccgacccgacggtggatgaaaccacgggctccgtgacgttacgggcgattttccccaacccaaatggtgacttgctgcctggcatgtacgtcacggcattagtggatgaaggtagccgccagaatgtattactggtgccgcaggaaggcgtcactcacaacgcccagggtaaagcaacggcgctcattctggataaagacgatgttgtgcagctacgcgaaattgaagccagcaaagccatcggcgaccagtgggttgtcacctctggcttgcaggctggcgatcgggtgatcgtttccggtttgcaacgcattcgtccgggtatcaaagcacgagcaatttcctccagccaggaaaacgccagcaccgaatcgaaacaataa

SEQ ID NO: 484722 - DNA, 279 bp, Shigella sonnei
atgagggatttacagaccagcggcatagtggggttgtcagccagtaaggtgggatacaggcacagtgatcgacatggtgaggtcaacgacaaaaaaaatgttgccgttctgccaacagttcctgccagcattcgggcaacgaagggttctactggtggatacacatacctggggaataaagtcgttttagcctctcctttagtaatcaccgggggtaatgaaatcagcatctgcatccctcgtcatgccagccatcaatttcagttgcttatgtcctga

SEQ ID NO: 484723 - DNA, 528 bp, Shigella sonnei; identical to SEQ ID NO: 474105

SEQ ID NO: 484724 - DNA, 573 bp, Shigella sonnei
atgttatatatagataaggcaacaattttgaagtttgatctggagatgcttaaaaaacatcgcagagcaatccagtttattgccgtgctactgtttatcgtcgggttgctgtgtatcagtttcccgttcgtctctggcgatattttaagcacagtagtgggtgcattattaatctgctcgggcattgcgcttattgtcgggttattcagcaaccgcagtcataatttctggccggtattatccggtttcctcgtcgcagtcgcctatttattgatcggctatttcttcatccgcgcaccggagctgggcatttttgccattgcggcatttattgccggtttgttctgtgttgcaggggttattcgcctgatgagttggtatcgtcagcgttcaatgaaaggcagctggctacagctcgttattggtgtgctggatatcgtcattgcctggatattccttggtgcaacgccgatggtgtctgtaacgctggtttccacactggtgggaattgaactgatatttagcgccgccagcctgttcagcttcgccagtttgttcgttaagcagcaataa

SEQ ID NO: 484725 - DNA, 333 bp, Shigella sonnei; identical to SEQ ID NO: 460165

SEQ ID NO: 484726 - DNA, 339 bp, Shigella sonnei; identical to SEQ ID NO: 460166

SEQ ID NO: 484727 - DNA, 576 bp, Shigella sonnei
atgcgcggcaaaggagcagggttacgcacacatgtattaattggcatgggaagcgccctgtttatgattgtttcgaaatatggttttgctgacgtgctgtctttagatcacgtcggactcgaccccagccgtattgctgctcaggtggtgacgggcgtcgggtttatcggtgcaggtaacattctcgttcgtaaccaaaatattgtaggtctgacgacggcagcggatatctgggtgaccgccgccataggtatggttattggcagcggtatgtacgaactgggtatttatggttcagtgatgaccttgttggtgctggaagtcttccatcaattaaccttccgcctgatgaacaaaaattaccatttacagctgacattagtgaacggtaatatggtatcaatgctcgactggtttaagcagcaaaaaataaaaactgatttagtttcgttgcaggaaaatgaagatcatgaagtggtcgccattgatatccagcttcatgccacaacgtcgatagaagacctgttgcgattattaaaaggtatggcaggggtgaaaggcgtttcaattagctaa

SEQ ID NO: 484728 - DNA, 531 bp, Shigella sonnei; identical to SEQ ID NO: 474099

SEQ ID NO: 484729 - DNA, 741 bp, Shigella sonnei
atggggcgatggatactcatgccacgccccaaaatcaatggaattgaactaaacaaaagggatataaacatcagacaggtttacgttactatcaggcatatcgcctcagaatcagatgaaaactataaagaaatatctattatggttttaatatttgttgataaggatagtaacatgaacatgacaaaaggtgcactcatcctcagcctttcatttttgcttgccgcatgtagttcaattccgcaaaatatcaaaggcaataaccaacctgatattcaaaaaagttttgttgctgttcataaccagccggggttatatgttggtcaacaagcgcgctttggtgggaaggttatcaacgttatcaatggcaaaacggatacgttgttagaaatcgctgtattaccgttggatagctatgcgaaacctgatattgaagccaactatcagggccgactgctcgccagacaaagcggcttccttgacccagtgaactatcgtaatcactttgttaccatcctcggtaccattcagggtgaacaacctggctttatcaataaagtcccgtataacttcctggaagtgaatatgcagggcatccaggtgtggcatttgagagaagtggttaataccacctataacctgtgggattacggctatggtgcattctggccggaaccgggctggggtgcgccttactacaccaatgcggtgagtcaggtaacacctgagctggtcaaataa

SEQ ID NO: 484730 - DNA, 1101 bp, Shigella sonnei
atgagtatgtcatccataccgtcgtcctcccaatccgggaagctctatggctgggtcgaaagaattggtaacaaggttctccatccttttttgctctttatctatttgattatcgtactcatggtgacgacggcaattttgtcggcctttggcgtcagtgcgaaaaacccgaccgatggaacgccggtggtggtgaaaaacctgctcagtgtggaaggattacactggtctttacccaatgttattaaaaactttagcggttttgctccacttggtgcgatcctggcgctggttttaggtgccggtctggcggagcgcgtcggcttactgccagcgctaatggttaaaatggcatcgcatgttaatgcccgctacgccagttatatggtgctgtttattgcttttttcagccacatttcttccgatgcgacgttagtgatcatgctaccgatgggtgcgctgatttttctggcggtgggcaggcatccagttgcaggtttactggctgccattgcaggcgtaggttgcggctttacggctaatttactgattgtcacaaccgacgtgttgctgtcggggatcagcacggaagcggcggctgcgttcaatccgcaaatgcacgtcagtgtaattgataactggtattttatggccagctccgtagtcgtactgacgattgttggcggcctgataaccgacaaaatcatcgagccacggttaggtcaatggcagggaaacagcgatgagaaactgcagacattgaccgaaagtcagcgttttggtttacgcatagcaggtgtcgtatcgctactttttattgctgcgattgcgctgatggtgatcccggaaaacgggatattgcgcgatccgattaatcacaccgtgatgccatcaccctttattaaaggtatcgtgccactgatcattctttttttctttgttgtctcgctggcttatggcatcgctacccgcacaattcgacgtcaggcggatttaccgcagttaatgattgaaccgatgaaagagatggcaggatttatcgtgatggtttttcccctcgcccagtttgtcgccatgtttaactggagcaacatggggtga

SEQ ID NO: 484731 - DNA, 1446 bp, Shigella sonnei
atgcaggaaatctatcgttttatcgacgatgcgattgaagccgatcgccaacgttataccgatattgccgatcaaatctgggatcatccagaaacacgttttgaagagttctggtcagcggagcatctggcttcggctctggaatctgcaggcttcaccgttacccgcaacgtaggcaatatcccaaatgcctttattgcttcgtttggtcaaggcaaaccggttatcgccctgctgggagaatatgacgccctggcaggtttaagtcagcaagctggttgcgcgcaacctacatccgcgacgcccggtgaaaatggtcacggttgcggacacaatttgcggggaaccgccgcctttgccgctgcaatagccgtcaagaaatggctggaacaatatgggcaaggcggcacagtgcgcttttatggttgtcctggcgaagaaggcggctcgggtaaaacgttcatggtccgcgagggggtatttgatgatgtggatgcggcactcacctggcacccggaagcctttgccggtatgttcaatacccgcacgctggcaaacattcaggcatcatggcgctttaaagggatcgcagcacatgccgcgaattcccctcatttgggacgcagcgcccttgatgccgtaacgttgatgaccactggcaccaacttcctcaacgaacatattattgaaaaagcgcgcgtacactatgccatcacaaatagcggcgggatctcgcccaacgtggtccaggcgcaggcagaagtgctttatcttatccgcgcccccgaaatgaccgacgtgcagcatatttatgatcgggtcgccaaaatcgccgaaggtgcggcattgatgaccgaaaccacggttgaatgccgcttcgacaaagcctgttccagttatctcccgaatcgcaccttagaaaatgccatgtaccatgccctatcccattttggtaccccggaatggaactccgaagaactggcttttgcgaaacaaattcaggctacgctcacccccaacgatcggcaaaacagtctgaataatatcgccgcaaccggtggcgaaaacggcaaggcttttgcactacgtcatcgtgaaacggtactggcgaatgaggtcgctccatatgccgccaccgataacgtgcttgcggcatcgactgatgtcggcgacgttagttggaaactgcctgttgcccagtgtttcagcccctgttttgccgtcggtacaccgctacatacgtggcaactggttagccaggggcgaacatctattgctcataaaggaatgctgctggcggcgaaaactatggcagcaaccacagtcaatctcttcattgattcagggctattgcaagaatgccaacaagagcatcagcaagtaacggacacgcaaccgtatcactgccctatcccgaaaaacgtgacaccgtcacctttaaaataa

SEQ ID NO: 484732 - DNA, 1311 bp, Shigella sonnei
atggagtctttgaatcaatttgttaattcgcttgccccaaaattatcgcactggcgacgtgattttcatcactatgcagagtctggctgggtggaattccgcactgccacccttgttgcggaagaattgcagcagctcggctattcactggcgctgggccgcgaagtagttaatgaaagtagccggatgggactacctgatgaactcactctacaacgcgaattcgagcgcgctcgtcaacagggtgcgctagcacaatggattgcggtttttgaaggtggtttcactggtatcgtcgccaccctggataccggtcgccccggtccggtgatggctttccgtgtcgatatggacgcgctggatctcagtgaagagcaggatgtcagccatcgcccctaccgcgacggttttgcgtcatgtaacgccggaatgatgcatgcctgtggtcatgatggacataccgccattgggcttgggctggcgcatacccttaaacaattcgagtccggactacatggcgtcatcaaactgatttttcagcctgcagaggaaggtacgcgtggcgcgcgggcgatggtcgatgcaggtgtcgtagatgatgttgattattttactgccgtgcacattggcactggcgtacctgcgggcaccgtggtgtgcggcagtgataattttatggcaaccaccaaatttgacgcgcacttcaccggtaccgccgctcacgcaggcgcaaaaccagaagacggtcacaatgccttgttggcggcagcacaagccactcttgcactgcatgcaatcgccccgcacagcgaaggagcttccagagtaaacgtgggcgttatgcaggcaggaagcggtcgtaacgttgttcctgcctcggcgttgctgaaagtggaaacacgcggggccagcgacgtcattaatcaatatgtttttgaccgtgcacaacaagcgattcagggcgcagcaaccatgtatggtgtcggcgttgaaactcgtctgatgggtgcagttaccgccagttctccttcgccgcaatgggtcgcatggttgcaaagtcaggcggctcaggtcgcgggggtcaatcaggccattgaacgtgttgaagcgcctgcgggttccgaagatgccacattaatgatggcccgcgtgcagcaacatcaagggcaagcctcctacgtggtgtttggcacacagctggcggcaggtcatcacaacgaaaaattcgattttgacgagcaggttctcgctattgccgtcgaaacgctggcgcgcaccgcgctcaattttccctggacgcgaggtatctga

SEQ ID NO: 484733 - DNA, 909 bp, Shigella sonnei
atggcttttcaggtaaaaattcatcaaattcgggcttttgttgaagtggctcgtcagggcagcattcgcggagcgagccgaatgttgaatatgtcgcaaccggcactgagtaaatctattcaggagctggaagaaggattagcggcgcaactcttttttcgccgtagtaaaggcgtgacgttaactgatgccggtgaaagtttttatcagcacgccagtcttattcttgaagagctgcgcgcagcccaagaggatattcgccaacgacaagggcaactggcagggcagattaatatcggcatgggggccagtatttcccgcagtctgatgccagctgtcatatctcgttttcatcagcagcatccgcaggtaaaagtacgcattatggaagggcaactggtgtcgatgattaatgaattgcgtcagggagaattggatttcaccatcaatacctattatcagggaccgtacgaccacgaatttacttttgataaattactggaaaagcaattcgcgatcttttgccgcccgggacaccccgccattggtgcccgttcgatcaaacagttactggattacagctggacaatgccgacgccacacggcagttactacaaacagttgagtgaattgcttgacgatcaggcgcaaacgccacaggtcggtgtagtctgcgagacgttctcagcctgtatcagtctggtggcaaaaagcgattttctcagcatactgcctgaagaaatgggctgcgatcccttgcacggacaggggctggtgatgttgccggttagcgaaattttaccgaaagcggcctattatttgattcagcggcgtgatagtcgccagacaccactgaccgcgtcattaatcacgcaattccggcgagaatgcggctatctgcaaagttaa

SEQ ID NO: 484734 - DNA, 564 bp, Shigella sonnei
atgaaccttgacgacaaatcgctgtttcttgacgccatggaagatgtccagccgctgaaacgtgctaccgatgtccactggcatccaacgcgtaaccaacgtgcgccgcagcgtatcgacacgctgcagcttgataatttcctcaccaccggatttctcgacatcatcccactaagtcagccgctggagtttcggcgggaagggttgcaacatggggtgctggataagctgcgcagtggtaaatatccgcaacaggcgagcctgaatcttttgcgccagccggtggaagagtgccgcaaaatgatgttcagtttcattcaacaagccatggctgatggtttgcgtaacgtgctgattattcatggcaaaggacgggatgataaatcgcatgccaatattgtccgcagctatgtggcgcgctggctgaccgaatttgatgatgttcaggcatattgcactgcgctaccgcatcatggcggcagcggggcgtgttacgtcgcactacgtaaaacggcgcaggcgaagcaagaaaactgggagcgccacgctaagcgcagtcgttga

SEQ ID NO: 484735 - DNA, 1233 bp, Shigella sonnei
atgattacgcacaacttcaataccctggacttactcaccagtcctgtctggatcgtttcgccctttgaggaacagttaatttatgccaatagcgcggcgcgactgttgatgcaagacctcacgtttagtcagctacgaaccggtccctattccgtctcctcacaaaaagaactgccgaaatacctctccgatctgcaaaaccaacacgatattatcgaaatcctcactgttcagcgtaaagaagaggaaacagcattaaactgtcggcttgttttgcgaaagctgacagaagcagaaccggtgattattttcgaaggtatcgaagcgtcggcaacgctgggtttaaaagccagtcgctcggcaaattatcagcgcaaaaaacaaggtttttatgcgcgcttttttctgactaactctgcaccaatgttgttgattgacccctcacgagatggccaaatcgtcgatgctaacctcgccgcgctcaatttctatggttataaccatgaaacgatgtgccagaaacatacctgggaaataaatatgctcgggcgtcgcgtcatgcctatcatgcatgaaatttcgcatttacccggtggtcataaacctctgaattttattcataagctggcggatggttcgactcgtcatgtgcagacctacgccgggccgattgaaatttatggcgacaagctcatgttatgtattgtacatgatattactgagcaaaaacggctggaggagcagctggaacatgctgcccaccatgacgcgatgaccggattactgaatcggcgacagttttatcacattaccgagccaggccaaatgcagcatctcgccatcgcccaggattacagcttgttgctcatcgacaccgatcgttttaaacacattaacgatctctatgggcattctaaaggtgatgaggtgttatgcgccctcgcccgcaccctcgaaagttgcgctcgcaaaggcgatttggtgtttcgttggggaggcgaagagtttgtcttattgctaccaagaaccccactggataccgcgctttcgctggctgaaactatccgcgtaagcgtggcaaaagtgagtatttcgggcttaccacgctttaccgtcagcattggtgtggcgcatcacgaaggaaatgaaagcatcgatgaactgtttaaacgcgttgatgatgctttgtatcgggcgaaaaatgatggacgcaaccgcgtgctggcggcataa

SEQ ID NO: 484736 - DNA, 984 bp, Shigella sonnei
gtggaagcgattaagggatcggacgttaatgtcccggatgcagtatttgcctggatgctggatggtagaggcggcgttaaaccgctggaaaatacagatgtgattgatgaagcgcatccctgctggctccaccttaattatgtacaccatgatagcgcccaatggctggcgacaacaccgctgcttcccaataacgtacgtgatgcgctggcgggcgagagcacgcggccccgagtcagccgtctcggtgaaggcacgctgattacattgcgctgtataaacggcagcaccgatgaacgccccgatcaactggtcgccatgcgtgtatatatggacgggcggttaattgtttcgacccgacaacgcaaagtgctggcgctggacgatgtggtgagcgatctggaagagggcacgggtccgaccgattgcggagggtggctggtggatgtgtgcgatgcgttgaccgatcattccagcgaatttatcgagcagctgcacgataaaattatcgaccttgaagataatctccttgatcagcaaattccaccgcgtggattcctggctctgctgcgcaaacaattaattgtgatgcgtcgctatatggcaccgcaacgtgatgtttatgctcgtcttgccagtgaacgtttgccgtggatgagcgatgaccaacgccgtcggatgcaggatattgccgatcgccttgggcgcggccttgacgaaatcgacgcctgtatagcacggactggcgtgatggcggatgaaatcgctcaggtgatgcaggaaaatttagctcgtcgtacctatacaatgtcgttgatggcaatggtctttttacccagtacctttctgaccgggttatttggcgtcaaccttggtgggatccctggcggcgggtggcaattcggattttcaattttttgtattctgttagttgttcttattggtggtgttgctttatggttgcaccgtagtaaatggttgtaa

SEQ ID NO: 484737 - DNA, 174 bp, Shigella sonnei; identical to SEQ ID NO: 461099

SEQ ID NO: 484738 - DNA, 1374 bp, Shigella sonnei
gtgaccgctttttctaccctgaatgttttgcctcccgcccaactcacgaaccttaatgagttgggttatttaactatgacgccggtgcaggccgccgcgcttccggcgatccttgccggaaaagatgttcgcgtgcaggcgaaaaccggcagcggcaaaacggcggcttttggcctcggcttgttacagcaaattgatgcgtcgctatttcaaacccaggctttagtgctgtgtcctacgcgtgaactggcggatcaggtggcaggtgaattgcgtcggctggcgcgttttctgccaaataccaaaattttgacgttgtgcggtggtcaaccgttcggtatgcagcgtgattcgttgcaacatgcgccgcatattatcgtggcaacgccgggtcgtttgctggatcacttgcaaaaaggcacggtatcactggatgcgctgaatactttggtgatggatgaggccgaccgcatgctggatatgggatttagcgatgccattgatgatgtcatccgttttgcgcctgcatctcgacagacgcttctgttttcggcaacctggccggaagccattgccgtaatcagcggacgagtgcaacgcgatcctttggcgattgaaattgactcaacagatgctttgccacccattgaacaacaattttatgagacatccagcaaaggcaaaattcctctgttgcaacggttattaagcttgcatcagccatcctcttgcgtggtgttttgcaataccaaaaaagattgccaggctgtctgcgacgcgctgaatgaagtagggcaaagtgcattgtcattacacggcgatttggagcaacgcgatcgcgatcagaccctggtacgttttgctaacggtagcgcccgtgtactggttgcgactgatgttgctgcgcgtggtctggatattaaatcgcttgagctggtggtgaactttgagctggcgtgggaccctgaagttcatgtacatcgcatcggccgtacagctcgtgcaggaaatagcggtctggcgatcagtttctgtgctccggaagaagcacagcgggccaatatcatttctgacatgttgcagataaaacttaactggcaaacgccgccagctaatagttccattgtgccgctggaagcagaaatggcaacgttgtgtatcgatggtgggaaaaaagccaaaatgcgcccgggtgatgtattaggtgcactgacaggagatatcgggcttgatggcgcagatattggcaaaatcgccgtgcatccggcgcatgtctatgtcgcggtccgtcaggctgttgctcataaagcatggaaacagttacagggcgggaagattaaaggaaaaacgagccgggtgcggttattaaaataa

SEQ ID NO: 484739 - DNA, 936 bp, Shigella sonnei
atgcaagaaaatcaacaaattacaaagaaagaacaatacaacctgaacaaattacaaaaacgtctgcgtcgtaacgtgggcgaagccattgctgacttcaatatgattgaagaaggcgatcgcatcatggtttgcctctccgggggtaaagacagctataccatgctggagattctgcgcaatttgcagcaaagcgcgccaatcaatttttcgctggtggctgttaacctcgatcaaaagcaaccgggcttcccggaacacgttctgcccgagtatcttgaaaagctgggcgttgagtacaagattgtcgaagagaacacttacggtatcgtgaaagagaagattccagagggcaaaaccacttgctcactgtgttctcgccttcgtcgcggtatcctttatcgtaccgcaacggaactgggggcgacgaagatcgcgctgggtcaccatcgtgacgatatcctgcagacgctgttcttaaatatgttctacggcggcaagatgaaaggtatgcctccgaaactgatgagcgatgatggcaaacatatcgttattcgtccgctggcctactgccgcgagaaagatattcagcgatttgccgatgcaaaagcgttcccgattattccgtgcaacctgtgcggttcacagcctaacctgcaacgtcaggtgattgctgacatgttgcgtgactgggataaacgttatccagggcgtatcgagacgatgttcagcgcgatgcagaatgtggtgccgtcgcatctgtgcgataccaacctgttcgatttcaaaggcatcacccacggttctgaagtggttaacgggggtgatctggcgtttgatcgcgaagagatcccactacaaccggcgggctggcagccagaagaagatgaaaatcagttggatgagttacggctgaatgtggttgaagtgaaataa

SEQ ID NO: 484740 - DNA, 456 bp, Shigella sonnei
atgttcggtcccccaaaaacaaatgccgggatccggacggtaacattactgcagccggctcttgaagcactgaaggagcaatacaaactgaccgggcatcatcgcaaaagcgaaatcactttttatcatcgggagtacggcagaactgaaaagcaaaaactgcattttgttttcatgcccagggtgtgtaacgaaaaacagaaaccttattactcggtaagcagtttgggtgcaagatggaatgcagcagtaaaacgtgctggtattcgccgccgtaatccgtaccatacgcgacatacttttgcctgctggctgttgacggcaggagcgaacccggcatttatagccagccagatggggcatgaaactgcgcaaatggtgtatgaaatttacggtatgtggattgatgacatgaacgacgaacagatagccatgttgaatgcgcggttatcgtag

SEQ ID NO: 484741 - DNA, 507 bp, Shigella sonnei
gtggcgttcacccttaactggccggagcgcgtcggcaaactggtgctgatgggcggcggtacgggcggcatgagtttgtttacgccgatgccaaccgaaggtattaagcgactgaatcagctttatcgtcagccgactatcgaaaacctgaagctgatgatggatatcttcgttttcgataccagcgatttgaccgacgccctgtttgaagcgcgcctgaataatatgctgtcgcgccgcgatcacctggaaaacttcgttaagagcctggaagctaatccgaaacagttcccggattttggcccacgtctggcggaaatcaaagcgcaaaccctgattgtctgggggcgcaacgaccgctttgtgccgatggatgcgggtctgcgtctgctgtccggcattgccggttctgaactgcatatcttccgcgactgtggtcactgggcgcagtgggaacatgccgacgctttcaatcaattggtgctgaatttcctcgcacgcccttaa

SEQ ID NO: 484742 - DNA, 810 bp, Shigella sonnei
atgacgaagcatactcttgagcaactggcggcggatttacgccgcgccgcagagcagggcgaagcgattgcgccgctgcgcgatctgattggtatcgatcacgctgaagcggcctacgccattcagcacataaatgtgcaatatgacgttgtgcaggggcgtcgcgtggtagggcgtaaagtgggcctgacgcatccgaaagtgcaacaacaactgggcgttgatcaaccggattttgggacgttatttgccgacatgtgttatggcgataacgaaatcattcctttttcccgtgttctgcaaccccgcattgaagcggagatcgcactggtgttgaaccgcgatttacccgcaactgatatcaccttcgacgaactgtataacgccattgaatgggtacttccggcgctggaagtggtggggagccgcattcgcgactggtcgattcagtttgtcgataccgtggcagataacgcttcctgcggggtgtatgtcatcggcggtccggcgcaacgtccggcggggttagacctgaaaaactgcgccatgaagatgacgcgtaataacgaagaggtttccagcgggcgcggcagcgaatgcctgggacatccgcttaatgccgccgtctggctggcacgcaaaatggccagtctgggtgaaccgctgcgcgccggagatatcattcttaccggggcattaggcccgatggtggcggtgaatgcgggcgatcgttttgaagcccatattgaaggcataggttcagttgctgcgacattttcaagcgcagccccaaaaggaagtctgtcatga

SEQ ID NO: 484743 - DNA, 951 bp, Shigella sonnei
atgagtaagcgtaaagtcgccattatcggttctggcaacattggcaccgatctgatgattaaaattttgcgtcacggtcagcatctggagatggcggtgatggtcggcattgatcctcagtccgacggtctggcgcgtgccagacgtatgggcgtcgccaccacccatgaaggggtgatcgggctgatgaacatgcctgaatttgctgatatcgacattgtatttgatgcgaccagcgcgggcgcgcatgtgaaaaacgatgccgctttacgcgaagcgaaaccggatattcgcttaattgacctgacgcctgctgccatcggcccttactgcgtgccggtggttaacctcgaggcgaacgtcgatcaactgaacgtcaacatggtcacctgcggcggccaggccaccattccaatggtggcggcagtttcacgcgtggcgcgtgttcattacgccgaaattatcgcttctatcgccagtaaatctgccggacctggcacgcgtgccaatatcgatgaatttacggaaaccacttcccgagccattgaagtggtgggcggcgcggcaaaagggaaggcgattattgtgcttaacccagcagagccaccgttgatgatgcgtgacacggtgtatgtattgagcgacgaagcttcacaagatgatatcgaagcctcaatcaatgaaatggctgaggcggtgcaggcttacgtaccgggttatcgcctgaaacagcgcgtgcagtttgaagttatcccgcaggataaaccggtcaatttaccgggcgtggggcaattctccggactgaaaacagcggtctggctggaagtcgaaggcgcagcgcattatctgcctgcctatgcgggcaacctcgatattatgacttccagtgcgctggcgacagcggaaaaaatggcccagtcactggcgcgcaaggcaggagaagcggcatga

SEQ ID NO: 484744 - DNA, 1014 bp, Shigella sonnei
atgaacggtaaaaaactttatatctcggacgtcacattgcgtgacggtatgcacgccattcgtcatcagtattcgctggaaaacgttcgccagattgccaaagcactggacgatgcccgcgtggattcgattgaagtggcccacggcgacggtttgcaaggttccagctttaactatggtttcggcgcacatagcgaccttgaatggattgaagcggcggcggatgtggtgaggcacgccaaaatcgcgacgttgttgctgccaggaatcggcactattcacgatctgaaaaatgcctggcaggctggcgcgcgggtggttcgtgtggcaacgcactgtaccgaagctgatgtttccgcccagcatattcagtatgcccgcgagctcggaatggacaccgttggttttctgatgatgagccatatgaccacgccggagaatctcgccaagcaggcaaagctgatggaaggctacggtgcgacctgtatttatgtggtggattctggcggtgcgatgaacatgagcgatatccgtgaccgtttccgcgccctgaaagcagtgttgaaaccagaaacgcaaaccggcatgcacgctcaccataacctgagtcttggcgtggcgaactctatcgcggcggtggaagagggctgcgaccgaatcgacgccagcctcgcgggaatgggcgcgggcgcaggtaacgcaccgctggaagtgtttattgccgccgcggataaactgggctggcagcatgggaccgatctctatgcgttaatggatgccgccgacgacctggtgcgtccgttgcaggatcgtccggtacgagtcgatcgcgaaacgctggcgctgggatacgctggtgtttactcgagcttcctgcgtcactgtgaaacggcggcggcgcgttatggcttaagtgcggtggatattctcgttgagctgggcaaacgccggatggttggcggccaggaggatatgatcgtcgacgtggcgctggatctgcgcaacaacaaataa

SEQ ID NO: 484745 - DNA, 1212 bp, Shigella sonnei
atgtcgactcgtaccccttcatcatcttcatcccgcctgatgctgaccatcgggctttgttttttggtcgctctgatggaagggctggatcttcaggcggctggcattgcggcgggtggcatcgcccaggctttcgcactcgataaaatgcaaatgggctggatatttagcgccggaatactcggtttgctacccggcgcgttggttggcgggatgctggcagaccgttatggtcgtaagcgtattttgattggctcagttgcgctgtttggtttgttctcactggcaacggcgattgcctgggatttcccctcactggtctttgcgcggctgatgaccggtgtcgggctgggggcggcgttgccgaatcttatcgccctgacatctgaagccgcgggtccacgttttcgtgggacggcagtgagcctgatgtattgcggtgttcccattggcgcggcgctggcggcgacactgggtttcgcgggggcaaacttagcatggcaaacggtgttttgggtaggtggtgtggtgccgttgattctggtgccgctattaatgcgctggctgccggagtcagcggttttcgctggcgaaaaacaggctgcgccaccactgcgtgccttatttgcgccagaaacggcaaccgcgacgctgctgctgtggttgtgttatttcttcactctgctggtggtttatatgttgatcaactggctaccgctacttttggtggagcaaggattccagccatcgcaggcggcaggggtgatgtttgccctgcaaatgggggcggcaagcgggacgttaatgttgggcgcattgatggataagctgcgtccagtaaccatgtcgctactgatttatagcggcatgttagcttcgctgctggcgcttggaacggtgtcgtcatttaacggtatgttgctggcgggatttgtcgcggggttgtttgcgacaggtgggcaaagcgttttgtatgccctggcactgttgttttacagttcgcagatccgcgcaacaggtgtgggaacagccgtggcggtagggcgtctgggggctatgagcggtccgttactggccgggaaaatgctggcattaggcactggcacggtcggcgtaatggccgcttctgcaccgggtattcttgttgctgggttggcggtgtttattttgatgagtcggagatcaagaatgcagccgtgtgccgatgcctga

SEQ ID NO: 484746 - DNA, 540 bp, Shigella sonnei
atggcaaaacttaccttacaagagcagttgctcaaagcaggattagtcaccagcaaaaaagcggcgaaggtcgagagaacggcgaaaaaatcgcgcgttcaggcgcgtgaagctcgggctgcggtagaagaaaataaaaaggcacagcttgagcgtgataaacagcttagcgaacagcaaaaacaagcggcgttggcgaaagaatataaagcccaggtgaagcagctcattgaaatgaaccgaatcaccattgccaatggcgatattggttttaacttcactgacggcaatctgattaagaagatttttgtcgataagctcacacaggcgcagttgattaatggtcgtctggcgattgcccgcttgttggtcgataacaatagcgaaggtgaatacaccattattcccgccagtgttgccgataaaattgctcagcgtgatgccagcagtattgtgttgcacagcgcgctcagtgccgaagagcaggatgaagacgatccgtatgccgacttcaaagtgcctgatgatttgatgtggtaa

SEQ ID NO: 484747 - DNA, 834 bp, Shigella sonnei
atggaactcattgaaaaacatgccagctttggcggctggcaaaatgtgtatcggcattattcccaatcactgaaatgtgaaatgaatgtcggcgtctatctcccaccaaaagccgcgaatgaaaaattgccggtgctgtactggctttcaggcctgacctgcaacgagcagaatttcattactaaatcggggatgcagcgttacgcggctgagcacaacattattgttgttgcgccggacaccagtccgcgaggcagtcatgtcgcagatgccgaccgttacgatctcgggcaaggtgccgggttttacctgaacgcaacgcaagcgccgtggaatgaacattacaaaatgtatgactatatccgcaacgagctgccggatttagtgatgcaacattttccggcaacgaccagaaagtctatctctggtcattctatgggcgggctgggcgcgctggtgctggcgttacgtaacccagatgaatatgtcagcgtctcggcgttttcgcccattgtctccccatcgcaagtaccgtggggacagcaagcctttgccgcatatcttggtgaaaataaagatgcctggttggattacgatccggtgagtcttatttcacaaggtcaacgcgttgcggaaatcatggttgatcaggggttgagtgatgatttttacgcggaacagctgcggactccaaatcttgaaaagatctgccaggagatgaatatcaagacgttaatccgttatcacgagggttacgaccacagctattattttgtctccagttttattggcgagcatattgcctaccacgccaataaactgaatatgcgttga

SEQ ID NO: 484748 - DNA, 1110 bp, Shigella sonnei
atgaaatcacgtgctgccgttgcatttgctcccggtaaaccgctggaaatcgttgaaattgacgttgcaccaccgaaaaaaggtgaagtgctgattaaagtcacccataccggcgtttgccataccgacgcatttaccctctccggggatgacccggaaggtgtattcccggtggttctcggtcacgaaggggccggcgttgtggttgaagtcggtgaaggcgtaaccagcgtcaaacctggcgaccatgtgatcccgctttacaccgcggagtgcggcgagtgtgagttctgtcgttctggcaaaactaacctctgtgttgcggttcgcgaaacccagggtaaaggcttgatgccagacggcaccacccgtttttcttacaacgggcagccgctttatcactacatggggtgctctacattcagtgaatacaccgtggtcgcggaagtgtctctggccaaaattaatccagaagcaaaccatgaacacgtctgcctgctgggctgtggcgtgaccaccggtattggcgcggtgcacaacacagctaaagtccagccaggtgattctgttgccgtgtttggtcttggcgcgattggtctggcagtggttcagggcgcgcgtcaggcgaaagcgggacggattatcgctatcgataccaacccgaagaaattcgatctggcgcgtcgcttcggtgctaccgactgcattaacccgaatgactacgacaaaccgattaaagatgtcctgctggatatcaacaaatggggtatcgaccatacctttgaatgcatcggtaacgtcaacgtgatgcgtgcggcgctggaaagtgcgcaccgcggctggggtcagtcggtgatcatcggggtggcaggttctggtcaggaaatctccacccgtccattccagttggtcactggtcgcgtatggaaaggttccgcgtttggcggcgtgaaaggtcgttcccagttaccgggtatggttgaagatgcgatgaaaggtgatatcgatctggaaccgtttgtcacgcataccatgagccttgatgaaattaatgacgccttcgacctgatgcatgaaggcaaatccattcgaaccgtaattcgttactga

SEQ ID NO: 484749 - DNA, 276 bp, Shigella sonnei
atgcccagtactccggaagagaagaaaaaggtccttactcgagttcgtcgtattcgggggcagattgatgctctggaacggtcgctggagggtgatgccgaatgccgtgccatactccaacagatcgctgccgttcggggcgcggctaacgggctgatggcagaagtgcttgaaagccatatccgggaaacgtttgaccgaaatgactgctacagccgcgaagtcagccaatccgttgacgacactattgaactggttcgagcctatcttaaatag

SEQ ID NO: 484750 - DNA, 774 bp, Shigella sonnei
atgataaaacggacgttattagcggcggccatttttagcgcattgcccgcttatgccgggttaacttccattaccgcgggctacgattttaccgattattctggcgatcatggcaaccgtaatttagcgtatgctgaactggtggcgaaagttgaaaacgcaacgctgctttttaatctttcccaggggcgtcgtgattatgaaactgaacatttcaatgccactcgcggtcagggtgcggtctggtataaatggaataactggctgacaacccgaacgggtattgcctttgcggataatacgccggtctttgcccgccaggattttcgtcaggatattaacctggccctgttgccaaaaacgcttttcacgaccggttatcgctacactaaatattacgatgatgtcgaagtcgatgcctggcaaggcggcgtatcactctatactggcccggtgatcaccagctaccgctatacccattatgactccagcgatgcaggtggtagttatagcaatatgatttccgtgcgtctgaatgacccgcgcggcactggttatacgcaactatggctaagccgcggaacaggcgcttacacctatgactggacgccagaaacacgctacggcagcatgaagagcgtcagtttgcaacgtattcaaccgctgactgagcaacttaatctcgggctgacggcaggtaaagtgtggtacgacaccccaaccgatgattataacggtctgcaacttgcagcccatctgacctggaaattctga

SEQ ID NO: 484751 - DNA, 561 bp, Shigella sonnei
atgttaaagagaaaaattattcagattgcagaccaggtaattattgatgaaactgcaggtgaagttgttatcggcgcgaatacccgtatttgtcatggtgccgttattcagggtccggtagtgattggcgcaaactgcctgataggtaattatgcgtttattcgtcctggcacaataatcagcaatggtgtaaaaattggttttgccaccgaaattaaaaatgcggttattgaagcggaagcaacgattggtccgcaatgttatattgccgactcggtagttgcaaaccaggcatatttgggcgcacaagtacgtaccagtaatcatcgtctggatgaacagcctgtgtctgttcgaactccagagggaattatcgctaccggatgcgataaattaggttgttatatcgggcagcgttcacgccttggcgtacaagttattattttgcctgggcgaattatttccccgaacacgcaacttggcccgcgcgtgattgtagaacgtaatttacctaccggaacttattcactccgacaagaacttatccgtacaggagattaa

SEQ ID NO: 484752 - DNA, 894 bp, Shigella sonnei
atgaatggcctcaattatgccacctgcgaccaggtttttttaagtgatgccgacacctatgttccgcccgatcaagacggaatgggctatatgctggcagaaattaagcgcggtgctgatgccgtaggcggcattccctctactgcgttgaaaggcgcggggctgttaccgcacatccgcgcgaccgtaaagttgccgatgattgttatgaagcgcacgctacagcagctcctgggcggcgcaccgtttattatcagcggtgcctgcggaatgttccgtactgatgtattgcgtaagttcggtttctcggatcgtactaaagtcgaagaccttgatctcacctggacattagtggcaaacggctaccgtattcggcaggcgaatcgctgcatcgtatacccacaggaatgcaacagtccgcgtgaggagtggcgtcgctggcggcgttggattgtgggctacgcggtctgtatgcgcctgcataaaaggcttttatttagccgcttcggtatcttcagtatatttcctatgctgttggttgtgatttatggcgttgggatttatctcactacctggtttaatgaattcatcaccaccgggccgcatggtgtggtgttggcaatgtttccgcttatctggatcggcgttgtttgtgttattggtgcttttagcgcctggtttcatcgttgctggttgttggtgcctttagcgccgctttccgttgtgtatgtattattagcttatgccatctggattatctatggacttattgccttttttactggacgcgaacctcagcgcgacaaacccacccgctattccgcactggtggaagcgtcaaccgcttattcccaaccttctgtcacaggaactgaaaaactatctgaagcttaa

SEQ ID NO: 484753 - DNA, 276 bp, Shigella sonnei
atgaaaacctggatatttatctgtatgtccatagcaatgttgctatggtttttaagtacgctaagacgtaaacccagtcaaaagaaaggctgtattgacgccattatacctgcgtataacgaaggcccgtgtctggcgcagtcactggataatctactgcgtaacccttatttttgccgggtaatttgcgttaacgacggctccacggacaataccgaagcggtcatggcggaagtcaaacgcaaatggggcgaccgctttgttgccgtcacgtaa

SEQ ID NO: 484754 - DNA, 672 bp, Shigella sonnei
gtggataaggttttagattcagccctcctttcttcggcaaataaaagaaagggtatccttgctattggcgcacatcctgacgatatagaattaggctgtggcgcatcgcttgctcgtcttgcgcaaaaaggaatttatatcgcagcagtggtgatgactaccggcaactctggtacagatggaataatcgatcgccatgaagaatcgcgcaacgccctaaagatattagggtgcaaccaaactattcatcttaattttgctgacacccgcgctcatttacagctcaatgatatgatttccgccctggaagacatcattaaaaatcaaattccttctgatgttgaaatcatgcgggtatataccatgcatgatgccgaccgccatcaggatcatctcgctgtttatcaagcttcaatggttgcctgccgcactattccacaaattctcggctacgaaaccccaagtacctggctttcatttatgcctcaggtttttgaatccgttaaagaagaatatttcacagtcaaacttgctgcattaaaaaaacataaaagccaggaacgacgtgattatatgcgtcatgatcgcctgcgtgcagttgcacaatttcgcgggcaacaggtcaatagcgatctgggtgaaggctttgtaattcataaaatgattctttga

SEQ ID NO: 484755 - DNA, 315 bp, Shigella sonnei
atgcttccgccgttattcatcatgctggcttacctgaatttacgcgccaaattagatcacctgccacgcgatttccgtatgggctcccgccgcaccggtattatcgttgtttcaatgctgattgcgatatttgccgtagggtttgtcgcttcgacattcccgactggcgcgaatattctgaccatcattttttataacgtcggcggtattgttatcttccttggctttgcgtggtggaaatacagtaaatatataaagggattaacggctgaagagcgccatattgaagcgacgccagccagcaatgttgattaa

SEQ ID NO: 484756 - DNA, 894 bp, Shigella sonnei
atggatttagagggtgagaataaacataaatacagcgacggtacctatattgaaggtggcctggagatgaagtacggctcctggttcggcctgatttacggcgaaggctggaccgtgcaggccgaccacgacggcaatgcctgggtgccagaccatagctggggtggtttcgagggcggaattaaccgtttctatggcggttatcgtaccaatgatggcaccgaaatcatgctcagtctgcgtcaggattcctcgctggatgacctgcaatggtggggcgatttcacccccgatctgggctacgtcattcccaatacccgcgacattatgactgcgctgaaggtacagaacttaagcggcaactttcgttatagcgtcaccgcgactcctgccggacatcatgatgaaagcaaagcctggctacattttggcaaatacgatcgctatgacgacaaatacacctatccggcaatgatgaacggttacatccagtatgaccttgccgaaggcatcacctggatgaacggtctggaaatcaccgacggcacaggacagctctatctcacgggcctgctaactcctaactttgccgctcgcgcctggcaccataccggacgcgccgacgggctggacgtaccgggaagtgaaagtgggatgatggtgagcgccatgtatgaagcgttaaagggcgtttatctctccaccgcttacacctacgccaaacatcgccctgaccacgctgacgatgaaaccacctctttcatgcagtttggtatctggtacgaatacggcggcggacgtttcgccacggcttttgatagccgcttctacatgaaaaatgcctctcacgatcccagcgaccaaatcttcctgatgcaatatttctactggtaa

SEQ ID NO: 484757 - DNA, 2352 bp, Shigella sonnei
atgaaaataaaaactattttaacgccagtaacctgcgctctgctgataagtttttccgcccatgccgctaacgccgacaattataaaaacgtgattaaccgtactggcgcgccgcagtacatgaaggattacgattacgacgatcaccagcgttttaatccgtttttcgatctcggagcctggcatggtcatctgttgccagacggccctaacaccatgggcggctttccgggcgttgcgctgctgacggaagagtacatcaactttatggccagcaatttcgaccgcctgaccgtctggcaggacggcaagaaagtcgactttacgctggaggcatacagtattcccggtgcgctggtgcaaaaactgacagcaaaagatgtgcaagtcgaaatgactctgcgcttcgccacgccgcgcacgtcactactggaaaccaaaatcaccagcaataaaccgctggatctggtgtgggacggcgaactgctggaaaaactggaagcgaaagaagggaaaccgctttccgataaaaccattgctggcgaataccctgactatcagcgcaaaatcagcgccacccgtgatggcctgaaagtcacctttggcaaagtgcgcgccacctgggatctgctgacctccggcgaatcggaatatcaggtgcataaatccctgccggtgcagactgaaatcaacggtaatcgctttaccagtaaggcgcatatcaacggttcgaccacgctctacaccacctattcccatctgctgaccgctcaggaagttagcaaagagcaaatgcagatccgcgatattctggcgcgtccggcgttttatctcaccgcctcgcagcaacgctgggaagaatacctgaagaaagggttaaccaatccggatgcgacgccggaacagacgcgcgtcgcggtgaaagcgatcgaaacgctcaacggtaactggctctcaccgggcggtgcggtgaaatttaacaccgttacaccgtcggtgaccgggcgctggttctccggcaatcagacctggccgtgggatacctggaagcaggcgtttgcgatggcgcatttcaatccggacatcgccaaagagaatatccgcgcggtcttctcctggcagatccagcctggcgatagcgtgcgtccgcaggatgtgggctttgtccccgacctgatagcgtggaaccttagccccgagcgtggtggcgatggcggcaactggaacgaacgtaataccaaacccagccttgccgcctggtcggtgatggaagtgtacaacgtcacccaggataaagcctggttggcagagatgtacccgaaactggtggcctatcacgactggtggttacgtaaccgcgatcacaacggcaacggcgtgccggaatatggcgcgacccgcgacaaagcccacaacactgagagcggcgagatgctgtttacggtgaaaaaaggcgataaagaagagacgcagtctgggctgaacaactacgcccgcgtggtggagaaaggcctgtacgacagtctggaaattccggcacaggttgctgcatcgtgggaatcggggcgtgatgatgccgccgtctttgggtttatcgacaaagaacagctggataaatatgtcgctaatggcggcaaacgtagcgactggacggtgaaattcgccgaaaaccgcagtcaggacggaacgttgctgggctactcgctattgcaggagtcggtggatcaggccagctatatgtacagcgataaccattatctggcggagatggcaaccatcctcggtaagccagaagaggccaaacgctatcgccagttggcacagcagctcgcggactacatcaacacctgtatgttcgacccgactacccagttctactatgacgtacgtattgaagataaaccactggcgaacggctgcgcgggcaaaccgattgttgagcgcggtaaagggccggaaggctggttgccgctgtttaacggtgcggcaacgcaggccaacgccgacgcggtggtgaaggtgatgctcgatcctaaagagttcaacacctttgtcccgctgggaacggcggcgttaaccaatccggcttttggcgctgatatctactggcgtgggcgcgtatgggtggatcagttctggtttggtctgaaagggatggagcgttacggttatcgtgatgatgccctgaagctggcggatacgttcttccggcacgccaaaggattaaccgccgatggcccaattcaggagaattacaacccgctgactggcgcacagcaaggcgcaccaaatttctcctggagtgccgctcatttgtatatgttgtataacgattttttccgtaagcagtaa

SEQ ID NO: 484758 - DNA, 2019 bp, Shigella sonnei
atgagctatccgtcgctgttcgccccgctggatttaggttttaccacgttaaaaaaccgcgtgttgatgggctcaatgcacaccgggctggaggaatacccggacggtgccgagcggctggcagcgttttatgccgaacgcgcccgtcacggcgtggcgctgattgtcagcggcggcattgcaccagatttaacaggcgttggcatggaaggtggcgcaatgctcaacgacgccagccagatcccacaccatcgcaccattaccgaagcggtacatcaggaaggcggcaaaatagccctgcaaattttgcataccgggcgctacagctaccaaccgcatctggtcgctccctccgcattgcaggcccccatcaaccgtttcgttcctcacgaactcacccatgaagagatcctgcaactgatcgacgatttcgcccactgcgcgcaactggcacgggaggcaggatacgacggtgtagaggtaatggggtccgaagggtatttgatcaacgaatttctgacgctgcgcaccaatcagcgtagtgaccagtggggcggcgattaccgcaaccggatgcgatttgccgtagaagtagtgcgtgcggtgcgcgaacgcgtcggcaacgacttcattattatctaccgactgtcgatgctcgacctggtcgaagacggcgggacttttgccgaaacggtagagctggcgcaggccattgaagcggcgggcgcgaccattatcaacaccggcattggctggcatgaagcacgtattccgaccattgccacgcccgtgccgcgcggcgcatttagctgggtcacgcgcaaattgaaaggccacgtctcgctgccgctggtaaccaccaaccggattaacgatccgcaggttgccgacgatattctctcgcgcggcgatgccgatatggtatcgatggcacgaccgtttcttgctgatgcggaactgctgtcaaaagcgcaatcggggcgagccgatgagatcaacacctgcattggctgcaatcaggcctgcctcgatcagatcttcgttggcaaagtcacctcgtgcctggtgaatcctcgcgcctgccacgaaaccaaaatgccaatccttcctgccgtgcagaaaaaaaatctggcggtggtcggtgcgggacctgctgggctggcgtttgccattaacgcggcggcgcgtgggcatcaggtaacattgtttgatgcccacagcgagatcggcgggcagtttaatatcgccaaacagatccccggcaaagaggagttttacgaaacgctgcgctattaccaccggatgatcgaagtgacgggcgtgacgctgaaactcaatcacaccgtgacggcggatcagttacaggcgttcgatgaaacgatcctcgccagtgggatcgtgccgcgcgttccgcctatcgacgggatcgatcatccgaaggtattgagttatctcgatgtactgcgcgacaaagcgccggtaggcaacaaggttgccatcatcggttgtggcgggattggttttgatacggcgatgtatttaagtcagccgggcgaatccaccagccagaatatcgccaggttctgtaatgagtgggggatcgacagcagcctacaacaggctggtggcttaagcccgcagggaatgcagatcccgcgtagcccacggcaaattgtgatgctccagcgcaaagccagcaaaccgggacaggggttaggcaaaaccaccggctggatccatcgcaccaccctgctctcgcggggtgtgaaaatgatcccaggcgtaagttatcagaagattgacgatgacgggctgcatgtggtgatcaacggcgaaacgcaggtattagcagtggacaatgtggtgatctgcgcagggcaagagccaaaccgcgcgctggcgcaaccgctgattgatagcgggaaaactgtgcatttaattggcggctgcgatgtggctatggagctggacgcacgacgggcaattgcccagggaacacggctggcgctggagatttaa

SEQ ID NO: 484759 - DNA, 417 bp, Shigella sonnei
atgattgcgattgccgacatcttgcaagcaggagaaaagctaactgcggtggcaccttttctggcgggtattcagaacgaggaacaatacacccaggcgctggaactggtagatcatctgctgctcaacgatcctgaaaaccccttgctggatctggtgtgtgccaaaataaccgcgtgggaagaatcagcgcccgaatttgcggaatttaatgccatggctcaagccatgcctggcggtatagccgtgattcgtacccttatggatcaatatggtttaacccttgccgatctgccggaaattggcagtaaatctatggtgtcacgcgttttgagcgggaagaggaaattaacgctggaacacgctaaaaaattggcaacgcgattcggcatttctcccgccttgtttattgattaa

SEQ ID NO: 484760 - DNA, 315 bp, Shigella sonnei; identical to SEQ ID NO: 261899

SEQ ID NO: 484761 - DNA, 1137 bp, Shigella sonnei
atgagccacttagacaacggtttccgttcactgacactacaacgttttccggcgacggatgacgttaacccgctacaggcgtgggaagcggcggatgaatatttgctgcaacagttggacgacacagaaatccgcggcccggtgttgatcctgaatgatgcctttggtgcgttaagctgcgcgctggcggaacataagccgtacagcattggcgactcatacatcagtgaactggcgacgcgcgagaatttacgcctcaacgggattgatgagtcgagcgtgaagtttctcgacagcaccgccgactacccgcaacagccgggtgtggtgctgatcaaagtgccgaaaacactggcattgctggaacagcaactgcgtgcgctgcgcaaagtggtcacgtcggatacacgtattattgccggtgccaaagcccgtgacattcacacttccacgctggagctgttcgagaaagtgctcggcccgaccaccactacgctggcatggaaaaaagcgcgcctgattaattgcactttcaatgaaccgccgctggccgatgcgccgcagaccgttagctggaagctggaaggtactgactggactatccacaaccatgcgaatgtcttctcccgcaccgggctggatattggcgcacgcttctttatgcaacatctgccagagaatctcgaaggtgagattgtcgatctcggttgcggtaatggcgttattggtctgacgctgcttgataaaaaccctcaggcgaaagtggtgtttgtcgatgaatcgccgatggcggttgcttccagccgtttgaacgttgaaaccaacatgccagaggcgttagatcgcagcgagtttatgatcaacaacgcgctctccggcgtggagcctttccgctttaatgctgtgctctgcaacccgccgtttcaccaacaacatgcgctgaccgataacgtcgcctgggagatgttccaccatgcccgccgctgcctgaaaatcaacggcgagctgtatattgttgccaaccgtcacctggattacttccataaactgaagaagattttcggcaactgcaccaccatcgccacgaataataaatttgtggtgctgaaagcagtgaagctggggcgtcgtcggtaa

SEQ ID NO: 484762 - DNA, 504 bp, Shigella sonnei
atgagcaatcttacttatcttcagggttatcccgagcagctactttcccaggtgcgaacgctgattaacgaacagcgtctgggcgatgtgctggcaaaacgctatccgggaacacacgactacgccaccgataaagccctctggcaatatacccaggatctaaaaaatcagtttctgcgcaatgccccgccgatcactaaagtgatgtatgacaataagatccacgtactgaaaaacgcgctcggattacataccgctgtttctcgtgtgcagggcggcaagctgaaagcaaaagcagagatccgcgtcgctactgtgtttcgcaacgcgccggaaccgtttttacgcatgatcgtggtgcacgaactggcgcacctgaaggagaaagagcataacaaagcgttttaccagttgtgctgccatatggagccgcagtaccaccagcttgagttcgacacccggctgtggctaacgcagttgtcgcttgggcaggacaaaatctga

SEQ ID NO: 484763 - DNA, 684 bp, Shigella sonnei
atgcagccccgccttcttctccgtatttgtttttctcgccggactctaaagattacctgcttactgttacttgtggcaggagcgaccatttttatcgccgatcgcgtaatggtcaacgccagcaagcagctgacctggagcgatgtcaacgcagttccggcgcgtaacgtgggtttattgctgggggcgaggccgggtaatcgctactttacccgacgtattgataccgcagcagcgttgtaccacgtcggaaaagtgaaatggctgttagtcagtggcgataacggacgtaaaaattacgatgaagcctcaggtatgcagcaggctttgatcgctaaaggcgtaccggcgaaagtgatcttctgcgactatgccggattctcaacgcttgattcagtggtgcgtgccaaaaaggtgtttggggaaaaccatatcaccattatctcgcaagaatttcataaccaacgcgccatctggctggcaaaacagtacggcatcgacgctatcgggtttaacgcgccagaccttaatatgaagcacggtttttatactcaactgcgggagaaactcgctcgtgtcagcgcggtgattgacgccaaaatcctccatcgccagccgaaatatctcgggccatcggtcatgattgggccgtttagtgagcatggctgtccggcgaaagaataa

SEQ ID NO: 484764 - DNA, 987 bp, Shigella sonnei
atgatacgtttcgctgtgattggtacgaactggatcactcgccagttcgtcgaggccgcccatgagagcggtaaatacaagttaaccgccgtatattcccgcagccttgaacaggcccagcacttcgccaatgatttttctgtcgagcatctgtttacctcgctggaagcgatggcggaaagcgatgccattgacgcggtgtatattgccagcccgaatgccctgcacttttcccagacacaacttttccttagccataaaattcatgtgatttgcgagaaaccactggcgtcgaatctggcggaagtggatgccgccattgcctgtgcgcgggaaaatcaggtggtgctgtttgaggcatttaaaaccgccagcctgccgaactttcatttgctgcgccaggcgctgccgaaagtcggcaaattgcgtaaagtctttttcaactattgccagtattcctcgcggtatcaacgttacctggatggtgagaatcccaacacctttaatccggcattctctaacggttcaattatggatatcggcttttactgcctggcgtcggcggtggcattattcggtgaaccgaaaagcgtgcaggcaaccgccagtttgttggcaagcggcgtagatgcccacggcgtggtggtgatggattacggtgatttcagcgttacgttgcagcactcaaaggtcagtgattctgtcctggaaagcgagattcagggcgaagcgggatcgctggtgattgaaaaactgtctgaatgccagaaagtgtgcttcgtgccgcgtggcagccagatgcaggatctcacccagccgcagcatattaataccatgctctacgaagcagagctgtttgctaccctggtggatgagcatctggtggatcatccagggctggcggtcagtcgcatcaccgccaaactgctgactgagatccgccgccagactggggtgatttttccggcagatagcgtaaaactataa

SEQ ID NO: 484765 - DNA, 966 bp, Shigella sonnei
atgaatactgtcggcacgccgttgctatggggcggattcgctgttgttgtcgccattatgctggctatcgacctgttgttgcaggggcgtcgtggggcacatgccatgaccatgaaacaggctgcggcctggtcgctggtctgggtgacgctgtcgttactgtttaacgccgctttctggtggtatctggtgcaaactgaaggtcgcgccgttgccgatccacaggcactggcctttctcacgggttatctgattgagaaatcgctggcggtcgataacgtctttgtctggctgatgttgttcagctatttctctgttccggcggcattacaacgccgcgtgctggtgtatggcgtgctcggggcgattgttctgcgtaccatcatgatcttcactggcagctggctaatttcgcagttcgactggatcctgtatatcttcggtgccttcctgctgtttaccggcgtgaagatggcgctcgcccatgaagatgaatcaggcattggcgacaagccgctggtgcgctggctacgcggtcatttgcgcatgaccgacaccatcgacaacgagcatttctttgtgcgtaagaatggattgctgtacgccacaccgctgatgctggtactgattctggtggaattgagcgacgtgattttcgccgtggatagcattccggctatcttcgccgtgaccactgacccgttcattgtgctgacctcaaacctgtttgcgatcctcggcctgcgtgcgatgtatttcctgctggcgggcgtagcagagcgtttctcgatgctcaaatatggcctggcggtgattctggtgtttatcggtatcaagatgctgattgtcgacttctaccatattccaatcgccgtctcgctgggcgtggtgtttggcattctggtgatgacgtttattatcaacgcctgggtgaattatcggcatgataagcagcggggagaatga

SEQ ID NO: 484766 - DNA, 405 bp, Shigella sonnei
atgtccgtaatgttacaaagtttaaataacattcgcaccctccgtgcgatggctcgcgaattctccattgacgttcttgaagaaatgctcgaaaaattcagggttgtcactaaagaaagacgtgaagaagaagaacagcagcagcgtgaactggctgagcgtcaggaaaaaattagcacctggctggagctgatgaaggctgacggaattaacccggaagagttattgggtaatagctctgctgctgcaccacgcgctggtaaaaaacgccagccgcgtccggcgaaatataaattcaccgatgttaacggtgaaactaaaacctggaccggtcagggccgtacaccgaagccaattgctcaggcgctggcagaaggtaaatctctcgacgatttcctgatctaa

SEQ ID NO: 484767 - DNA, 525 bp, Shigella sonnei; identical to SEQ ID NO: 471060

SEQ ID NO: 484768 - DNA, 300 bp, Shigella sonnei
atgactgaactcgcgcaattacaggccagtgccgaacaggcagcggccttattgaaagcaatgagccatcctaaacgattgctgattctgtgcatgcttagcggttcccccggcaccagcgcgggagagctgacgcgcattaccggactgagtgcctctgcgacatcacagcatctcgctcgtatgcgggacgaagggcttatcgacagccaacgggatgcccaacgcattctatattccattaaaaatgaggcggtaaatgccattatcgccaccctgaaaaatgtctattgtccgtaa

SEQ ID NO: 484769 - DNA, 159 bp, Shigella sonnei
atgggtttctggagaatcgtcatcaccatcattctaccgccgctcggcgtgctgctcggtaaagggttcggttgggcgttcattattaatattctgctgacactgcttgggtatatccccggtttgattcacgcgttctgggtgcaaacccgcgattaa

SEQ ID NO: 484770 - DNA, 450 bp, Shigella sonnei
atgggtctgttcaattttgtgaaagatgccggagaaaaactctgggacgcggttacaggtcagcacgataaagacgatcaggcgaagaaggtgcaggagcatctgagcaaaaccggtatacctgatgctgataaagtgaacattcaaattgccgacggcaaagcgacggtcactggtgacggcctgagtcaggaggcgaaggagaaaatccttgttgcggtggggaatatttccggtattgccagtgttgatgatcaggtgaaaacggcgacaccagccactgccagccagttttataccgttaagtctggcgacactctgagtgccatttccaaacaggtctacggtaacgctaatctgtacaataaaatcttcgaagcgaataaaccgatgctaaaaagcccggataaaatttatccggggcaagtgttgcgtattccggaagagtag

SEQ ID NO: 484771 - DNA, 663 bp, Shigella sonnei
atgaccattacgtctctggatggctatcgctggctgaagaacgatattattcgcggtaattttcaaccggatgaaaaattacggatgagtttgctgacatcgcgttatgcacttggcgttgggccgttgcgggaagcactttctcaactggtggcggaacggctggtcacggtggtgaatcaaaaagggtatcgggtggcgtctatgtcagagcaggagctgctcgatattttcgatgcccgcgccaatatggaagcgatgttagtgagtctggcgattgcccgcggtggcgatgagtgggaggcagacgttctcgcaaaagcgcatctgctcagtaagctggaagcctgtgacgccagcgagaaaatgcttgatgagtgggatctgcgtcatcaggcgtttcatacagcaattgtggcgggctgtggttctcactatttgctgcaaatgcgtgaacggttgtttgatctggcggcgcgctatcgatttatctggctgcggcgaacggtgctttcggtagaaatgctggaggataaacacgatcagcaccagaccctgactgcggcggtactggcgcgagataccgcgcgcgccagtgagttaatgcgccagcatttactgacgccaattcccattatccagcaggcgatggctggcaattaa

SEQ ID NO: 484772 - DNA, 1401 bp, Shigella sonnei
atggggcaatcatcgcaaccacatgagttaggcggcgggctgaaatcacgccacgtcaccatgttgtctattgccggtgttatcggcgcaagtctgtttgtcggttccagcgtcgccatcgccgaagcgggcccggcggtattactggcctatctgttcgccgggctactggtggttatgattatgcggatgttggcggaaatggcggttgccacgcccgataccggttcgttttccacctatgccgataaagccattggtcgctgggcgggctataccatcggctggttgtactggtggttttgggtactggttatcccgctggaagccaatatcgccgctatgatcctgcactcgtgggttccaggcattcccatctggttattttccctcgtcattacccttgccttaactggcagtaatttattaagcgttaaaaactacggcgaatttgagttctggctggcgctgtgcaaagtcatcgctatcctggcctttattttccttggtgcagtcgcaattagcggtttttacccttatgccgaagtgagcgggatctcaagattgtgggatagcggcggctttatgcccaacggtttcggtgcggtattaagcgcgatgttgatcaccatgttctcgtttatgggcgcagaaattgtcaccattgccgccgcggaatccgacacgccggaaaaacatattgtccgcgccaccaactcggttatctggcgtatttctatcttctatttgtgctctatttttgtcgtcgtggcattaataccgtggaatatgccggggctgaaagccgttggatcttatcgctcggttctggaattgctcaatattccccatgcgaaattaatcatggactgtgtgatattactttccgtaaccagttgcctgaactcggccctgtataccgcctcaaggatgctctactccttaagccgtcgcggtgatgctcccgcggtaatgggtaaaatcaaccgcagtaaaaccccgtacgtggcggtgttactctccaccggcgcggcattcttaacggtggtggtgaactattacgcgcctgcgaaggtatttaaatttctgatcgacagctccggcgctatcgccctgctggtttatttagtcatcgccgtttcacagttgcggatgcgcaaaattctgcgagcggaaggaagcgaaattcgcttgcgaatgtggctttatccctggctcacctggctggtcatcggctttattacctttgtgttggtagtgatgctattccgtccggcgcaacagttagaagtgatctccaccggcttattagcgatagggattatctgtaccgtgccaattatggctcgctggaaaaagctggtattgtggcaaaaaacacccgttcataatacgcgctga

SEQ ID NO: 484773 - DNA, 1281 bp, Shigella sonnei
atgaacagcaataaagagttaatgcagcgccgcagtcaggcgattccccgtggcgttgggcaaattcacccgattttcgctgaccgcgcggaaaactgccgggtgtgggacgttgaaggccgtgagtatcttgatttcgcgggcgggattgcggtgctcaataccgggcacctgcatccgaaggtggtggccgcagtggaagcgcagttgaaaaaactgtcgcacacctgcttccaggtgctggcttacgagccgtatctggagctgtgcgagattatgaatcagaaggtgccgggcgatttcgccaagaaaacgctgctggttacgaccggttccgaagcggtggaaaacgcggtaaaaatcgcccgcgccgccaccaaacgtagcggcaccatcgcttttagcggcgcgtatcacgggcgcacgcattacacgctggcgctgaccggcaaggtgaatccgtactctgcgggcatggggctgatgccgggtcatgtttatcgcgcgctttatccttgcccgctgcacggcataagcgaggatgacgctatcgccagcatccaccggatcttcaaaaatgatgccgcgccggaagatatcgccgccatcgtgattgagccggttcagggcgaaggcggtttctacgccgcgtcgccagcctttatgcagcgtttacgcgctctgtgtgacgagcacgggatcatgctgattgccgatgaagtgcagagcggcgcggggcgtaccggcacgctgtttgcgatggagcagatgggcgtggcgccggatcttaccacctttgcgaaatcgatcgcaggcggtttcccgctggcgggcgtcaccgggcgcgcggaagtgatggacgctgttgcaccgggcggtctgggcggcacctatgccggtaacccgattgcctgcgtggctgcgctggaagtgttgaaggtgttcgagcatgaaaatctgctgcaaaaagccaacgatctggggcagaagctaaaagacggattgctggcgatagccgaaaaacacccggagatcggcgacgtacgcgggctgggagcgatgattgccatcgagctgtttgaagatggcgatcacagcaaaccggacgcaaaactcaccgccgagatcgtggcacgcgcccgcgataagggcctgattcttctctcctgcggcccgtattacaacgtgctgcgcatccttgtaccgctcaccattgaagacgctcagatccgtcagggtctggagatcatcagccagtgttttgctgaggcgaagcagtag

SEQ ID NO: 484774 - DNA, 1449 bp, Shigella sonnei
atgaaacttaacgacagtaacttattccgccagcaggcgttgattaacggggaatggctggacgccaacaatggcgggatcatcgacgtcaccaatccggcgaacggcgacaagctgggtagcgtgccgaaaatgggcgctgatgaaacccgcgccgctatcgacgccgccaaccgcgccctgcccgcctggcgtgcgctcaccgccaaagaacgcgccaacattctgcgcaactggttcaatttgatgatggagcatcaggacgatttagcgcgcctgatgaccctcgaacagggcaaaccactggccgaagcgaaaggcgaaatcagctacgctgcctcttttattgagtggtttgccgaagaaggcaaacgtatttatggcgataccattcccggtcatcaggccgataagcgcctgattgttatcaagcagccgattggcgttaccgcagctatcacgccgtggaacttcccggcggcgatgattacccgtaaagccggtccggcgctggcggcaggctgcaccatggtgctgaagcccgccagtcagacaccgttctctgcgctggcgctggcggagctggcgattcgcgcgggcattccggctggcgtgtttaacgtagtcaccggttcggcaggcgcggtcggtaatgaactgaccagcaacccgctggtacgcaaactgtcgtttaccggttcgaccgaaattggccgccagttaatggaacagtgcgcgaaagacatcaaaaaagtgtcgctggagctgggcggcaacgcgccgtttatcgtctttgacgatgccgatctcgataaagccgtggaaggcgcgctggcctcgaaattccgcaacgccgggcaaacctgcgtctgcgccaaccgtttatacgtgcaggacggcgtgtatgaccgctttgccgaaaaattgcagcaggcggtgagcaaactgcacatcggcgacgggctggataaaggcgtcaccatcgggccgctgatcgatgaaaaagcggtagcaaaagtggaagagcatattgccgatgcgctggagaaaggtgcgcgtgtggtttgcggcggtaaagcggatgaacgcggcggcaacttcttccagccgaccattctggtggacgtgccggccaacgccaaagtgtcgaaagaagagacgttcggccccctcgccccgctgttccgctttaaagatgaagccgatgtgattgcgcaagccaatgacaccgagtttggccttgccgcctatttctacgcccgtgatttaagccgcgtcttccgcgtgggcgaagcgctggagtacggcatcgtcggcatcaataccggcattatttccaatgaagtggccccgttcggcggcatcaaagcctcgggtctgggtcgtgaaggttcgaagtatggcatcgaagattacttagaaatcaaatatatgtgcatcggtctttaa

SEQ ID NO: 484775 - DNA, 1269 bp, Shigella sonnei
atgtatgattttgtgattattggcggcggcatcatcggcatgtcgaccgccatgcaactgattgatgtttatccggatgcccgcattgcgttgctggaaaaagagtccggcccggcctgtcaccagacgggccacaacagcggcgtgatccatgccggggtctattacacgcccggcagcctgaaggcgcagttttgcctggcggggaaccgcgccaccaaagccttttgcgatcaaaacggcattcgctatgacaactgcggcaagatgctggtcgccacgtctcagctcgaaatggaacggatgcgcgccttatgggaacgcacagcggcgaacggtatcgagcgcgagtggataaacgccgtggaactgcgcgagcgcgaaccgaatatcaccgggcttggtggcatttttgtgccgtccagcggcattgtcagctaccgcgaagtcacagcggcaatggcaaaaatcttccaggccagaggcggcgagattatttataacgccgaagtcagcgccctcagtaagcataaaaacggcgtggtgatacgcacccgtcagggcggtgaatatgaagcatcgacgctgattagctgttccgggctgatggctgaccggctggtgaaaatgctcggcctcgaaccgggctttatcatctgcccgttccgtggtgagtatttccgccttgcgccggagcataaccagattgttaaccacctgatttaccccattcccgaccccgcgatgccatttttgggcgtgcatctcacccgcatgatcgacggcagcgtgaccgtcgggccaaacgcggtgctggctttcaaacgcgaaggctatcgcaagcgcgacttctcatttagtgacacgctggagattttgagctcgtcggggattcgccgggtgctgcaaaaccatctacgctcaggactgggcgagatgaaaaactcgctgtgcaaaagcggctacctgcggctggtgcaaaagtattgtccccggctttcgttaagcgatctccagccctggcccgccggtgtgcgggcgcaggcagtatcgccggacggcaagctgattgacgattttctgtttgtcaccaccccacgcacgatccacacctgcaatgcgccctccccggcagcgacatcagcaattcctattggtgcgcatattgtcagcaaggtacaaacgctgttggcaagccagagtaaccccggacgcacgctgcgagcggcacgtagtgtggatgccttacacgccgcatttaatcaataa

SEQ ID NO: 484776 - DNA, 978 bp, Shigella sonnei
atgaatgcactgaccgccgtacaaaataacgctgtcgattcaggccaggactatagcggattcactctcatcccgtcggcgcaatccccgcgtctgctggaactcaccttcaccgaacagacgaccaaacagtttctcgagcaggttgccgaatggcccgtacaggcgctggagtacaaatcgtttctgcgttttcgggtaggcaaaattcttgacgatctgtgtgcgaatcagctgcaaccattgctgttgaagaccctgctaaaccgtgctgaaggtgcgctgttgatcaatgcggtgggtatcgatgatgtggcgcaggcagatgagatggtgaagctggcaacggcggtagcgcatctgattggtcgctcaaatttcgatgcgatgagcggtcagtattacgcgcgtttcgtggtgaaaaatgtcgataactcagacagctatctgcgtcagccgcaccgcgtgatggaactgcacaacgacggcacgtatgtcgaagagatcaccgattacgtgctgatgatgaaaatcgatgagcaaaacatgcagggtggaaattcgttgctgctgcatctcgatgactgggaacatctggaccactatttccgccatccactggcgcgtcgcccgatgcgctttgccgcgccgccgagcaaaaacgtcagcaaagatgttttccatccagtgttcgacgttgatcaacagggtcgcccggtgatgcgctatatcgaccagttcgtccagccaaaagattttgaagaaggcgtgtggttgagcgagctttccgatgccattgaaaccagcaaaggcattctttctgtacccgttcccgttggcaaattcctgttgataaacaacctgttctggctgcacggtcgcgaccgctttactccgcacccggatctgcgccgtgaactgatgcgtcagcgtggctatttcgcttacgccactcaccactaccagacgcatcagtaa

SEQ ID NO: 484777 - DNA, 1554 bp, Shigella sonnei
atgtctgagtttgcacgttgccattatgggtatatacaaatccctccagtgacaactttccgcgccgacggaccagaaactcccgaagaagaaaagggttactggtttcatgcttatcaacccgaagatctttgtaccatccataatccaatgggagatttgcaggattttattgcattggttaaagatgctaaaaaatttggtatcgatatcattcctgattatacctttaactttatgggaattgggggtagtggtaaaaatgacctggattatccctctgctgatatacgagcgaagatcagtaaagatatagaaggtggtatccctggctattggcaaggtcaggttttgattccattcattaaagatccagtaacaaaagaacgtaaacaaatccatccagaagatatacatctcactgcaaaagacttcgaagcaagtaaagataacatctctaaggatgaatgggaaaacctccatgcattaaaagaaaagcgtttaaatggaattcctaaaacaacacccaaaagtgaccaggttattatgttgcaaaatcaatacgttcgtgaaatgcgaaaatatggcgtacgaggtttacgttatgatgcggcaaaacactcaaaacatgaacaaatagaaagatcaataaccccaccgcttaaaaattataatgagcggttacacaatactaacttatttaacccaaaatatcataaaaaagccgttatgaattacatggaatatctggtaacttgtcagttggatgaacaacaaatgtcatcactgctttatgaaagagatgatttaagcgccattgatttttcattgctcatgaagacgataaaagccttttcattcgggggagatctcctaacccttgcatcaaaaccgggttccacaatctcaagcatcccatcagaaagacggatattgattaacattaaccacgattttcctaacaatggcaatcttttcaatgactttctatttaaccatcaacaagatgaacaattagcaatggcatatatggccgctctcccgttcagcagacctttagtttactgggatggccaggtattaaaatcaacgactgaaattaaaaattatgatgggtccacgcgtgtcggtggtgaggcgtggcttaataaaggttgctctacctatcagcagctctacaatgaattccacgcattatatatagataaagcaggaatatggagcgcatttgagggtgtatttgcaactaaaaacgttctagcctttagtcgtggggattctgtgaacattaatcactctcctcatgatggactagttataataaataaaggaaacgaagaagttgaaggtacctggcctaacaaattgcaacctggaatatataaaaacatggggagtaatagcgttaacattattattaataatacccgaaaaattatcccccctggtaaagtatttacgcttagaggcggaactctaaatatcaatattcctgggcgtagcgctcttcttttagggaaaacaggagaaccgccgaactatctctatttataa

SEQ ID NO: 484778 - DNA, 903 bp, Shigella sonnei
atgatgaacagcaccaataaacttagtgttattattccgttatataatgcgggcgatgatttccgcacttgtatggaatctttaattacgcaaacctggactgctctggaaatcattattattaacgatggttcaacggataattctgttgaaatagcaaagcattacgcagaaaactatccgcacgttcgtttgttgcatcaggcgaatgctggcgcatcggtggcgcgtaatcgtgggattgaagtggcaacgggcaaatatgtcgcttttgtcgatgctgacgatgaagtctatcccaccatgtacgaaacgctgatgaccatggcgttagaggacgacctcgacgtggcgcagtgcaacgctgactggtgttttcgtgaaacgggagaaacctggaaatccatccccagcgatcgccttcgctcaaccggcgtattaaccggcccggactggctgcggatggggctttcttcgcgccgttggactcacgttgtctggatgggggtttatcgccgcgatgttattgttaaaaataacattaaatttattgccggattacatcatcaggatattgtctggacaacagaatttatgtttaatgcgctgcgtgcgcgatataccgagcaatcgttatataaatattatctgcataatacgtcagtgagtcggttgcatagacaagggaacaaaaaccttaattatcaacgtcactatattaagattactcgtctgctagagaaattaaatcgaaattatgccgacaaaattacgatttatccggaatttcatcagcaaataacttacgaagcattgcgtgtttgccatgcggtgcgcaaagagccggatattattacccgccaacggatgattgccgagatatttacttccggtatgtggtaa

SEQ ID NO: 484779 - DNA, 1026 bp, Shigella sonnei
atgaaagcgttatccaaactgaaagcggaagagggcatctggatgaccgacgttcctgtaccggaactcgggcataacgatctgctgattaaaatccgtaaaacagccatctgcgggactgacgttcacatctataactgggatgagtggtcgcaaaaaaccatcccggtgccgatggtcgtgggccatgaatatgtcggtgaagtggtaggtattggtcaggaagtgaagggcttcaagattggcgatcgcgtttctggcgaaggccatatcacctgcggtcactgtcgcaactgtcgtggcggtcgtacccatctgtgccgcaacacgatcggcgtcggcgttaaccgcccgggctgcttcgccgaatatctggtgattccggcgttcaacgccttcaaaattcccgacaatatctccgacgacctggcttccatttttgatcccttcggtaacgccgtgcataccgcgctgtcgttcgatctggttggcgaggatgtgctggtctctggtgcaggcccgattggtattatggcagcggcggtggcgaaacacgttggtgcacgcaatgtggtgatcactgatgttaacgaatatcgtctcgaactggcgcgcaaaatgggtatcacccgtgcggtcaacgtcgctaaagaaaaccttaatgatgtgatggcagaactgggcatggccgaaggctttgatatcggtctggaaatgtccggtgcgccgccagcgtttcgtaccatgctcgacaccatgaaccacggcggtcgcattgcgatgctgggtattccaccgtccgatatgtctatcgactggaccaaagtaatctttaaaggcttgttcattaaaggtatttacggtcgtgagatgtttgaaacctggtacaagatggcggcgctgattcagtcaggtctggatctctcgccgatcattacccatcgtttctctatcgatgatttccagaagggctttgacgctatgcgttcgggccagtccgggaaagtaattctgagctgggattaa

SEQ ID NO: 484780 - DNA, 1197 bp, Shigella sonnei
atgcgtggagaattttatcagcagttaaccaacgatctggaaaccgcacgggcggaagggttgtttaaagaagagcgcattattacgtctgcgcagcaagcagatatcactgtggctgatggaagccacgtcattaacttttgtgccaataactatctcgggctggcgaattatccggatctgattgcggcggcaaaggcgggaatggattctcacggtttcggcatggcttcggtgcgttttatttgcggcactcaggacagccataaagagcttgaacaaaaactggcggcattcctggggatggaagatgcgattctctactcttcctgctttgatgctaacggtggcctgtttgaaacgctgctgggcgcggaagacgccattatctccgacgcactgaaccacgcgtctattattgatggtgtgcgtctgtgtaaagctaaacgctatcgctatgccaacaacgatatgcaggagctggaagcacgtctgaaagaagcgcgtgaagccggtgcgcgtcatgtgctgattgccaccgatggtgtgttctcgatggacggcgtgattgccaacctgaagggcgtttgcgatctcgcagataaatatgatgccctggtgatggtagacgactcccacgcggtcggttttgtcggtgaaaatggtcgtggttcccatgaatactgcgatgtgatgggccgggtcgatattatcaccggcacgctcggtaaagcgctgggcggggcttctggtggttataccgcggcgcgcaaagaagtggttgagtggctgcgccagcgttctcgtccgtacctgttttccaactcgctggcaccggccattgttgccgcatccatcaaagtactggagatggtcgaagcgggtagcgagctgcgtgaccgtctgtgggcgaacgcgcgtcagttccgtgagcaaatgtcggcggcgggctttaccctggcgggagccgatcacgccattattccggtcatgcttggtgatgcggtagtggcgcagaaatttgcccgtgagctgcaaaaagagggcatttacgtcaccggtttcttctatccggtcgttccgaaaggtcaggcgcgtattcgtacccagatgtctgcggcgcatacccctgagcaaattacgcgtgcagtagaagcattcacgcgtattggtaaacaactgggcgttattgcctga

SEQ ID NO: 484781 - DNA, 933 bp, Shigella sonnei
atgatcatcgttaccggcggcgcgggctttatcggcagcaacatcgttaaggccctgaatgataaaggcatcaccgatattctggtggtggacaacctgaaagacggcaccaagtttgtgaacctggtggatctggatatcgcggactatatggataaggaagacttcctgatccagattatggctggcgaagagttcggcgatgtcgaagcgattttccacgaaggcgcgtgctcttccaccaccgagtgggatggcaagtatatgatggataacaactatcaatactccaaagagctgctgcactactgtctggagcgcgaaatcccgttcctgtatgcctcttccgcagccacctacggcggacgcacctccgactttattgaatcccgcgagtacgaaaaaccgttgaacgtctacggttactcaaaattcctgtttgatgaatatgttcgccaaatcctgcctgaagctaactcgcagattgttggcttccgctatttcaacgtttatggaccgcgtgaaggccataaaggcagcatggcgagcgtcgctttccatctcaacacccagcttaacaacggtgaatcaccgaagctgtttgaaggtagcgagaacttcaaacgcgacttcgtctatgtgggcgacgtggctgatgtgaatctgtggttcctggaaaatggcgtttccggcatcttcaacctcggtactggtcgtgcggaatccttccaggctgtagctgatgctacgctggcttatcacaagaaaggccagatcgaatacattccgttcccggataagctgaaaggccgctaccaggcgttcactcaggcagatctgacaaatctgcgcgcggcgggttacgacaaaccgttcaaaaccgttgctgaaggtgtaacggaatacatggcctggctgaatcgcgacgcataa

SEQ ID NO: 484782 - DNA, 1047 bp, Shigella sonnei
atgaaaatactggtgatcggcccgtcttgggttggcgacatgatgatgtcgcaaagtctctatcgcacgctccaggcgcgctatccccaggcgataatcgatgtgatggcaccggcatggtgccgtccattattatcgcggatgccggaagttaacgaagctattcctatgcctctcggtcacggagcgctggaaatcggcgaacgccgcaaactgggtcatagcctgcgtgaaaagcgctacgaccgcgcctacgtcttacccaactccttcaaatctgcattagtgcctttcttcgcgggtattcctcatcgcaccggctggcgcggcgagatgcgctacggtttactcaacgatttacgcgtgctcgataaagaagcctggccgctaatggtggaacgctatgtcgcgctggcctatgacaaaggcgtgatgcgtaccgcacaagatctaccaaaaccgttgttatggccgcaattgcaggtgagcgaaggtgaaaaatcatatacctgtaatcaattttcgctttcatcagaacgtccgatgattggtttttgcccgggtgcggagtttggtccggcaaaacgctggccacactaccactatgcggaactggcaaagcagctgattgatgaaggttatcaggtggttctgtttggctcggcgaaagatcatgaagcgggcaatgagattcttgccgctttgaataccgagcagcaggcatggtgtcggaacctggcgggggaaacacagcttgatcaagcggttatcctgattgcagcctgtaaagccattgtcactaacgattctggcctgatgcacgttgcggcggcgctcaatcgtccgctggttgccctgtatggtccgagtagcccggacttcacaccgccgctatcccataaagcgcgcgtgatccgcctgattaccggctatcacaaagtgcgtaaaggtgacgctgcggagggttatcaccagagcttaatcgacattactccccagcgcgtactggaagaactcaacgcgctattgttacaagaggaagcctga

SEQ ID NO: 484783 - DNA, 972 bp, Shigella sonnei
atgcgggttttgatcgttaaaacatcgtcgatgggcgatgttctccatacgttgcccgcactcactgatgcccagcaggcaatcccagggattaagtttgactgggtggtggaagaagggttcgcacagattccttcctggcacgccgccgttgagcgagttattcctgtggcaatacgtcgctggcgtaaagcctggttctcggcccccataaaagcggaacgcaaagcgtttcgtgaagcgctacaagcagagaactatgacgcagttatcgacgctcaggggctggtaaaaagcgcggcgctggtgacgcgtctggcgcatggcgtaaagcatggcatggactggcaaaccgctcgcgaacctttagccagtctgttttacaatcgtaagcatcatattgcaaaacagcagcacgccgtagaacgcacccgcgaactgtttgccaaaagtctgggctatagcaaaccgcaaacccagggcgattatgctattgcacagcatttcctgacgaacctgcctacagatgctggcgaatatgccgtatttcttcatgcgacgacccgtgatgataaacactggccggaagaacactggcgagaattgattggtttactggctgattcaggaatacggattaaacttccgtggggcgcgccgcatgaggaagagcgggcgaaacgactggcggaaggatttgcttatgttgaagtattgccgaagatgagtctggaaggcgttgcccgcgtgctggccggggctaaatttgtagtgtcggtggatacggggttaagccatttaacggcggcactggatagacccaatatcacggtttatggaccaaccgatccgggattaattggtggatatgggaagaatcagatggtttgtagggctccggggaatgagttgtctcaattgacagcaaatgctgttaagcgattcattgaagaaaacgttgctatgatttaa

SEQ ID NO: 484784 - DNA, 1254 bp, Shigella sonnei
atgtcattttgttggaatgaaattaattctggtataaagtctttaattctcatattatgtattttttctttgatgactttgtctttatgggatgatgttgcaacaaagtttcttcatgcagctggaattatatctgcattgtattttctaataacaccaaaaaaaacaataactaacaatcctactttgttaattttcatctcattatgtcttttgggaatcataaatatcatctggtattcacattataaagtttcaggctctgtttataccaatgcatatcgtggcccaatggaaactgggaaaattgccttgtgtagtgcttttattttcttggttctttttgctaaaaatgagttgagaacaaaaataaaatttgggaaactaattctgttcgcatccctggcaacgcagttacttttttttgcgcatgccatgtggcaacatttctatttaaacgttgaccgtgttgcattatcagcttcccacgctacaacagcaggctacatcatccttttcccttctttactggcatcaattctcattttaaaatccgactttagacataaaacaacattatatacaattaacttcatgcttagcttatgtgctgtcatagtaactgaaacgcgtgcagccatattagtgtttccattctttgcgttactattaatcgtaatggatagttatattaataagcgaattaattataagttatattgttttattgcgattgcattattagcaggtgtattttcttttaaagatacattgcttatgagaatgaatgacttaaataacgatttagttaattattcgcatgataacaccagaacttcagtcggtgcccgtctggcaatgtatgaagttggcttaaaaacatattctccaataggacaatcactggaaaaacgagcggaaaaaatacatgaactagaagaaaaagagcctagattgagtggcgctttaccctatatagattctcatttgcataacgatctcatagatacgttatcaacgcgtggtattcctggagttgtattaacaattttagccttttcagcaatactcatatatgccttaagaactgctaaagaaccttatattttaatcttgcttttttcactactggtagtaggcctaagtgatgtaatactcttttctaaaccggttccgactgctgtgtttgtcaccataatattgctttgtgcttattttaaagcacaatcagaccaatgtttattagataaataa

SEQ ID NO: 484785 - DNA, 984 bp, Shigella sonnei
atgagcaatgattaccctttagtatccataataataccgacgtataattcatctgattacattactgaaactctaacgaaattagaaaaacaaacttacccaaattttgaaattgttattgttaatgatggttctaaagataacacatcaaacgttttgagagagtatgggttaacccactctcgattaattattatcaataaagaaaatggcggtgtttcgtctgccaggaatacaggtatccgcaaggcgcaaggacagtttatatgttttatggatgatgatgatgagatagatcctaactatctgctgaagatgtataccagacaacatgagacgggaggggatgcgatttattgtgggctttatggccattatataaaagatggtgttacttactcacctataaatacagagtttaatgaaggatctttacttttcgactttttttataaaaaggttagattccatatagggtgcttgtttataagaaaacaacttctggaagagaataatcttttttttgatgaagatttacgactaggagaagatctggattttatctatcgactgctaattacatgcgatatgtatgcggttccatattatatgtataagcataactatagagaaaattccttaatgaactcatgtagaaccatcactcattatcgacatgagtcatttgcgcacgaaagaatctactcttctgtgatgcagttatacaaaggtaacaggaaagaagaaattcatacattattgagtcaaaatagagcttatcataaaactcgttatttatggaatgttctacttaatggtgattttgaactattaaatcaattagttgaaagcaatgaaaaagaattgaatgattgtaatctttctggcaagagagataaaagacgagcaaaaatattagcatcaaaaaattatattctctggaggatggtaagactggtaaataggaaaaagaataaacgttag

SEQ ID NO: 484786 - DNA, 1026 bp, Shigella sonnei
atggatttattagctgagagtattactgaagtcgctgtctctggggaaattgctaacaccgatcgtgtgttaaatatcgcttacggtattgaccgtaactttttatttggtgcggcagtatctatgcaatcagttgttatgcataatccggaccttgcggttaagtttcatctctttaccgactacattgatgaagattatctacaacgtgttaatgcttttaccagcaaaaatgctaacgttgaagtaagaatttataaagtctccagtgcctttattgatatcttccccagcctgaaacagtggtcttatgcaacattcttccgtttagttgcgttccagtatctgagtgaaactattgaaaatctgttatatatcgatgctgatgtcatctgtaaaggctcattagctggattgcttgatattaattttgatggggataagtttgcagctgttattaaagatgtgccttttatgcaggaaaaaccagcgaagcgtctggctatagagggacttccagggaattatttcaacgccggtgtagtatatctgcagcttgaagcatgggcgaaaaatgattttatgaataaagccattgctatgctggcaagtgacccgcagcacacgaagtataaatgccttgatcaggatattttaaatattctgttctttggtcattgtatttttattagcggcgattatgattgcttttatggcatcgattatgagttaaaaaataaaagcgatgaagattataaaaagaccattaccgatgatactaagctgattcattatgttggcgtaacgaagccctggaacgactggacgaattatccctgccagaagtattttaatgaggcttatcaggcttcttgctggaatgatgtggcgtttattccagccacgaatgaaaagcagtatcaagtgaaatatcaacatgcaaagaaaaatggtgatacgtttaacgcttttatttactttattaaatttaaattaaataagtataaaagaaaactatttggataa

SEQ ID NO: 484787 - DNA, 549 bp, Shigella sonnei
ttgattgatacgaaatattgtcgctatgtttttaaagtctttgccccgaaaacgaaaaggaatgaacgttttttaaaatcttttgtaaaaggtgactactatcagaatttgatcgttgaaaccgatcgtgtcagaagtgcaggtcttacttttcctaatgatttttattttctggctgagcgtaaaattttcaactatgccagtgtttttatcatgcttatcgagtatgtcgagggcgtagagctcaatgatatgccgatcattccagaagatgttaaagcagaaattaaggcttcaatggaaaaattgcatgccttaaatatgctatcgggcgacccacaccggggtaactttatcgttagtaaagatggtgtcaggataattgacctatccggtaaaagctgtacggcagagcgtaaagctcgtgatcgtctggccatggaacgtcacctgggtattgccaacgaaataaaagattatggctactattcagtaatctacagaaccaaactacgcaaatttattaaaaaattaaaaggcaaagcgtaa

SEQ ID NO: 484788 - DNA, 813 bp, Shigella sonnei
gtggatgatgattatttaaagtcatttaatgaaacagcaaaacaatttaatacctcaattattgtatatttaattgacccaaaatactttgctgatctgccgacgtcacagttttggtcgtacgcgacatacttcagggtattgtcctttgaatatctgagtgaaagtatttccacactgctgtatctggatgccgatgtcgtttgtaaaggaagtctgaagcctctcacagaaattatatttaaagatgagtttgctgcggtcattcctgacaatgttagtactcaggcggcatgtgcaaaacgcctcaacattcccgagatgaatggacgttatttcaatgcaggcgttatctatgtcaatcttaaaaaatggcatgaagcaaatttgacaccgtatttactcacgcttttacgaggggaaactaaatatggctctcttaaatatttagatcaggatgcgttgaatatcgcatttaatatgaataatatctacctcgcgaaggattttgatactatttataccctgaaaaacgaacttcatgatcgtagtcatcgaaagtatcagcaaaccattaccgataaaacagtattgattcactatacagggataactaaaccatggcatagctgggctggttatccgtctgcatcatactttaatatcgcgcgtgaacaatctccctggaagaaatatcctcttaaagaggcgcggactgttgcagaaatgcagaaacaatataagcatctgtttgcccatggtgagtatattaaaggcataacttcattaattaagtacaagcttaagaaataa

SEQ ID NO: 484789 - DNA, 2199 bp, Shigella sonnei
atgatgcgcaaaaagtatatgccccgggctcttggtccgctgcttcttgtcgtgctgtcaccagctgtcgcccagcaaaacgatgataatgagatcatagtgtctgccagccgcagcaatcgaactgtagcggagatggcgcaaaccacctgggttatcgaaaatgccgaactggagcagcagattcagggcggtaaagagctgaaagacgcactggctcagttaatccccggccttgatgtcagcagccagagtcgaaccaactacggtatgaacatgcgtggccgcccgctggttgtcctgattgacggtgtgcgcctcaactcttcacgttccgacagccgacaactggactctgtcgatccttttaatatcgaccatattgaagtgatctccggcgcgacggccctgtacggtggcgggagtaccggagggttgatcaacatcgtgaccaaaaaaggtcagccggaaaccatgatggagtttgaggctggcacaaaaagtggctttaacagcagtaaagatcacgatgagcgcattgccggtgctgtctccggcggaaatgaccatatctccggacgtctttccgtggcatatcagaaatttggcggctggtttgacggtaacggcgatgccaccctgcttgataacacccagaccggcctgcagcactccaatcggctggacatcatgggaaccggtacgctgaacatcgatgaatcccggcagcttcaactgataacgcagtactataaaagtcagggagacgacaattacgggcttaatctcgggaaaggcttttccgccatcagcgggagcagcacaccatacgtcagtaaggggctgaattctgaccgcattcccggcactgagcggcatttgatcagcctgcagtactctgacagtgatttcctgggacaggaactggtcggtcaggtttactaccgcgatgagtcgttgcggtactacccgttcccgacggtaaatgcgaataaacaggcgacagctttctcctcgtcacagcaggataccgaccagtacggcatgaaactgactctgaacagccaactgatggacggctggcaaatcacctgggggctggatgctgagcatgagcgctttacctccaaccagatgttcttcgatctggctcaggcaagtgcttccggagggctgaacaaccataagatttacaccaccgggcgctatccgtcatatgacatcaccaatctggcggccttcctgcaatccagctatgacattaatgatatttttaccgttagcggtggcgtacgctatcagtatactgagaacagggtagatgatttcatcgactacacgcagcaacagaagattgctgccgggaaggcgatatctgccgacgccattcctggtggttcggtagattacgataactttctgttcaatgctggtctgctgatgcacatcaccgaacgtcagcaggcatggttcaatttttcccagggggtggcattgccggatccggggaaatattatggtcgcggcatctatggtgcagcagtgaacggccatctttccctgacaaagagcgtgaacgtcagcgacagtaagctggaaggcgtgaaagtcgattcttatgaactgggctggcgctttaccggtgacaacctgcggactcaaatcgcggcatattactcgctttccaataagagcgtggaaaggaataaagatctgaccatcagtgtgaaggacgacaggcgccgtatttacggcgtggaaggtgcggtggactacctgatcccggatactgactggagtaccggtgtgaacttcaatgtgctgaaaaccgagtcgaaagtgaacggtcaatggcaaaaatatgacgtgaaggaatcaagtccatcgaaagcgacagcttacattaactgggcgccggaaccgtggagtctgcgtgtacagagcaccacttctttcgacgtaagcgatgcagagggtaacgatattaatggttacactaccgtcgattttatcagtagttggcagcttccggtgggaacactcagcttcagcgttgagaacctcttcgaccgtgactataccactgtctggggacagcgtgcacctctgtactactgcccgggttacggccctgcttcactgtacgactacaaaggccggggccgaacctttggtctgaactactcagtgctgttctga

SEQ ID NO: 484790 - DNA, 1338 bp, Shigella sonnei
atgaaaaaaagtgtcgattttattggtgtcgggacagggccatttaatctcagcattgctgcattgtcacatcagatcgaagaactgaactgtctcttctttgacgaacatcctcatttttcctggcatccgggtatgctggtaccggattgtcatatgcagaccgtctttctgaaagatctggtcagtgcagttgcacctacaaatccctacagctttgttaactatctggtgaagcacaaaaagttctatcgcttccttacaagcaggctacgtacagtatcccgtgaagagttttctgactatctccgctgggctgctgaagatatgaataacctgtatttcagtcataccgttgaaaatattgatttcgacaaaaaaagtcgattgtttctggttcagaccagtcggggagaatattttgcccgcaatatctgccttggtacaggaaaacaaccttatttaccaccctgtgtgaagcatgtgacacaatcctgtttccatgccagtgaaatgaatcttcgtcggccggacctgagtggaaaacggataaccgtggttggtggaggacagagtggtgcagacctgttccttaatgcattacgcggggaatggggagaagcggcggaaataaactgggtctcacggcgtaataattttaacgcactggatgaggctgcttttgctgatgagtattttacacctgaatatatttcaggcttctccggactgaaggaagatattcgccatcagttactggatgagcagaaaatgacatcggatggcatcactgccgattctttactgaccatttatcgtgagttgtaccaccgttttgaagttctgagaaaaccaagaaatatccgtctgctacccagtcgctcggtaacaaccctggaaagtagtggtccgggctggaggttattgatggaacatcatctggatcagggcagagagagcctggaaagtgatgtggtgattttcgccacaggttaccgttctgcattgccacaaatacttccctcactgatgcccttgatcaccatgcacgataagaacacctttaaagtgcgtgatgacttcactctggaatggagtggcccgaaagaaaataacatctttgcggtcaacgccagcatgcaaactcatggcatcgccgaaccccagctcagcctgatggcctggcgatctgcacgtattcttaatcgcgtactggggcgtgatttattcgatctcagtatgccgcccgcactgattcagtggcgcagcggcagccggaaaaaaccgcagccggaggctgcttctttaactcactatacagcaaatattcaggaataa

SEQ ID NO: 484791 - DNA, 1743 bp, Shigella sonnei
atgaatcacaaggactgggattttgttaaccgtcggctggtggcaaaaatgttgtctgagatggagtatgagcaggttttccacgcggaatctcagggcgatgaccactactgcattaacctgccgggagcacaatggcgcttcatcgctgaacgtggtatctggggctggctgtggattgatgcccaaacgttgcgctgcacggacgaaccagtactggcgcagacgctgctgatgcagctaaagccggtgctgtcaatgagtgatgccactgttgcagagcatatgcaggatttgtatgccacgctactgggcgacctgcaactgctgaaggcccgtcgcggactgagtgccagtgacctgattaatcttgatgccgatcgtctgcaatgcctgctgagcggtcatcctaaattcgtttttaataaaggtcgccgtggctggggcaaagaggcgctggaacgatatgcgccagagtataccaacaccttcagactgcactggctggcggtaaaacgtgaacatatgatctggcgctgcgataacgatctggatattcagcagttgttgactgccgcaatggatccgcaggagtttacacgcttcagtcaggtctggcaggaaaacgggctggatcacaactggctaccgctgccggtacatccgtggcagtggcagcaaaaaatcgccacagacttcatcgctgattttgtcgaaggcaggatggtgtctctcggcgagtttggcgaccagtggctcgcccagcagtcgctgcgtaccctgaccaacgccagccgccggggagggctggatatcaagctgccgctgaccatctacaacacctcatgctaccggggaatccctggcagatatatcgctgccggaccactggcttcacgctggctgcaacaggtttttgcgaccgacgccaccctggtgcaaagcggcgcagtgatccttggtgaaccggctgcaggctatgtgtcccatgaaggctatgccgcgcttgcccgggctccctatcgctaccaggaaatgcttggtgttatctggcgggagaatccgtgccgctggctgaaaccggatgaaagtcctgttctgatggcaacactgatggagtgcgacgaaaacaatcagccgctggcaggcgcatatatcgaccgctccggactggacgctgaaacctggcttacgcaattgttccgggtggttgtggttccgctgtatcacctgctttgccgctacggtgtcgcgcttattgcacacggacaaaatataacgctcgccatgaaagagggggtaccacagcgtgttctgctgaaagacttccagggcgatatgcggctggtgaaagaagcgtttcccgaaatggactctttgcctcaggaggtgcgtgatgccacatcccgtctgagtgcggactacttaatccatgatttgcagacgggtcacttcgtgacagtactgcgttttatttcgccactgatggttcgtcttggcgtacctgaaaggcgattttatcaactgctggcagcagtgttgagtgattacatgaacaaacatccacaaatggcagagcgttttgcgcttttctcactcttcaggccacaaatcattcgcgtggtgctgaacccggtaaaactgacctggccggacctggatggcggcagtcgcatgctgccgaattaccttgagaatctgcaaaatccgctgtggctggtaactcaggaatatgaatcatga

SEQ ID NO: 484792 - DNA, 948 bp, Shigella sonnei; identical to SEQ ID NO: 19334

SEQ ID NO: 484793 - DNA, 1725 bp, Shigella sonnei
atgaccctgccctctgaaaaaccagccacagatgtggctgcgcagtgcttcctgaatgcactgattcgtgaaaccacagactggaaactgacagaatacccgccagacgaattgctcatcccgctggatgagcagaaatcgctccatttcagagtggcttatttctccccaacccagcatcaccgctttgcatttcctgcacgtctggtcacggcatcaggcagttatcctgtcgactttaccactctctcccggcttattattgataagctacgccatcaactgtttctgcccgttcccctctgcgaaactttccaccagcgcgtgctggaaagccatgtccatacgcaacaggcaattgatgcccgtcatgactgggccgctctgcgtgaaaaagcgttgaattttggcgaggctgagcaggcgctgctgacaggacacgctttccaccctgcgcctaagtctcatgaaccgtttaaccgacgggaggctgaacgctacctgcctgatatggcaccccacttcccactgcggtggttttcggtggataaaacgcaaatcgccggtgaaagtttgcatctcaaccttcaacagcggctgacgcgatttgccgcagagaatgcgcctcagttactcaacgaattaagtgacaaccaatggctgttcccgttgcacccgtggcagggggaatatcttttgcagcaggggtggtgccaggcacttgttgctaaagggctgattaaagacttaggtgaggccggcacgtcgtggctgccgaccacctcttcccgttccctctactgtgccaccagccgcgatatgatcaagttctccctgagcgtacggctgaccaactccatccgtactctgtccgtgaaagaagtgaagcgtgggatgcgcctggcacgcctggctcaaaccgacggctggcagatgctacaggtccgcttcccgactttccgggtaatgcaggaggatggctgggccgggctgctcgatcttaacggcaacatcatgcaggaaagtctgtttgccctgcgtgaaaatctgctggtggatcagccgaaaagccagactaacgtactggtctccctgactcaggccgcacctgatggcggtgattcgctgctggtttcggcggtaaaacgcctgagcgatcgcctcggtatcactgtgcaacaggccgcccatgcatgggtcgatgcatactgtcagcaagtgctaaagccgctgtttacggctgaagcggattacggcctggtgctgctggcgcatcagcaaaatattcttgtccagatgcttggggatctgccggtcggatttatttaccgtgactgtcagggcagcgcttttatgcctcacgcgacagactggctcgattctattggcgaggcgcaggcggaaaatattttcacccatgagcagttgctgcgctatttcccttattacctgctggttaactccacttttgctgtgaccgctgcgctgggggctgccgggctggacagcgaatcgaatctgatggctcgtgtacgagcatcgctggctgaagtgcgtgatcaggtgactcataaaacctgtctcaactacgtgctggaaagtccgtactggaacgtaaaaggtaactttttctgttatctgaacgatcataacgagaacaccattgttgacccttcggtgatctatttcgatttcgctaacccgctgcaggctcaggaggtctga

SEQ ID NO: 484794 - DNA, 1194 bp, Shigella sonnei
atgtcaccagggatcgaagatacgccccaaaaaacactgtcctgctggccacttgcgttcagtgccgggcttctcggtatcggacagaacggtctgctggttgtgctccctgttctggtcatacagacaaatctgagtctgtctgtatgggctgccctgctgatgcttggctcaatgctgtttctgccatcgtccccgtggtggggaaagcaaatttcccgtactggcagtaaacctgtggtgttgtgggctctgggaggatatggcataagctttaccctgctagggctgggaagcgtgctgatggctaccagcgccataacaacagcggtgggactgggaatattaatcatcgcccggatcgcctacgggctgaccgtgtcggcaatggtgccagcctgtcaggtctgggcattgcagagagctggagaagggaatcgcatggccgctctggcaaccatcagctccggcctgagttgcggcaggctattcgggccgctgtgcgcggcagcaatgctggccattcatcctctggcgccactggggctactgatggcagcaccagtgctggcgctgctgatgctgctgcggttgcccggcacaccaccacagcccacaccggagtgcaagagcgtcagtctgaagcgggattgtctgccttatctgctttgcgcaatattactggctgcggcggtgagcatgatgcagcttggactttcgcctgcccttactcgccagttcgtcacggataccaccgccattagccaacaggtggcctggctgttgggtctgtccgcagtagctgcgcttatcgcgcagttcggggtactccgtccgcagcgcctgactccggtggccctgctcctgagtgccggagtgttgatgagtggtggtctggctatcatgctctccgaacagctatggttgttttacccgggctgtgcagtgctgtcatttggagcagctctggcaacacccgcttatcaacttctactgaatgataagctggctgatggcgcaggcgcgggctggctcgctaccagtcacacacttggctatggactgtgcgctttgctggtgccgctggtatcgaaaacaggtgtcgcaatcgcgctgattatggcagcattatttgcaactatattatttaccattgtgtctgtatttatctggcattaccgtactatcaaataa

SEQ ID NO: 484795 - DNA, 927 bp, Shigella sonnei
atggaaaactgggttattcaggagctaaaatcactggatataggggactcaagacttgataaaagagtaaaacatatcctcaatagcctcagtcgttcaccagaagaaagtattcctgtttcctgccgtacctggagtgaaacaaaggcagcttatcgttgtttttcaaacgataaagtctctgctaataaaattatggctcctcacaaagaaaatatcactgaaagagctcagcagtttaaaagagttttagttttacaggatacaacagaacttaattattctggtcagaaagaaaaacaaggagttggtcacaaaaaacataaagatgaaagaaacttatttcttcatcctcaactcgtcatcagtgagtcaggtgtttgcctcggtgtttatgatgactatcagtggttcagggatgaattaaaaaccagtaaaaatacccgacaagaaatctgcaatgatttacttcataaaaaacatgtcagtgaaaaagaaacctggcgttgggttgaaggatataataaagcaacagaactggctcgccaatgccctgatacccatgtattgtcaatttctgatcgtgaaggcgatttttatgacctgtttgaacgcgcagagcagactcccggaataaaagctgactggcttgtcagaatgaaatttaataacagagcaacgctgaatattaatggtaaacgggatcataggttgttgcacgaaagaatcatggagattacaccgcagcaactggttgaattcactatacctgatgggcgggggcagcaagccagaacactgcctgacatgctttcatcagacgcaggtcctctctcatatcctctgatttactccagtaaggtgatgatcatatctttatttgatagtacggtaatgccagataaatacagacacaatggtaaataa

SEQ ID NO: 484796 - DNA, 138 bp, Shigella sonnei
atgaaatttctggaatgtgctgtccgggatgtgatttatgggatcaatgtccgtattgtcaaaccggtcaacatttatgaatgtgaactcagggacaacgtgtttgtcggccccttcgttgagagtaaggcagtatga

SEQ ID NO: 484797 - DNA, 582 bp, Shigella sonnei
atgtattaccctgtgacagactatatcgctcttgctctcattattagctttctttttctgacattatttatctgcctgttatgccttaaacatgagcgaataaaaaaagaaactatcaggcaaaaaaatgcacatattctggagcatggctggaatgcaactgagttctcatggttccgatacggacagtataacgaaacgggtatttacatctcgatcgagaagaccattatcattacaatcaccgtttctggtgagtgctttaaaaaagaatacagcattgtctcccacatgctggtcactgacaccataacagaggccaccctgtacgaaaacgggctgtatacgcgccacatcagactcagtcgcccagtatctgacagcaaataccccttgccacccggatctcagctcattaaaaatatgaccttacgactgcgcctgcaggatcagcaggaagaaacatccgtgacattatttcagggaaaaatgagtaccgacggaaataactattacatcatcaaaggtaaagtaagctcagtacttctgttattaaaaatgctgcagattaatcacgcctga

SEQ ID NO: 484798 - DNA, 3858 bp, Shigella sonnei
atgaataaaatttattcactgaaatatagtcatattacaggtggattagttgctgtttctgaactgacccggaaagttagtgtcggtacatcaagaaagaaagttatcctcggtattattttatcctcaatatatggaagttatggcgaaacagcatttgcagcaatgctggatataaataatatatggacccgcgattatcttgaccttgctcaaaacagaggagagttcagaccgggtgcaacaaatgttcaattaatgatgaaagatggaaagatatttcattttccagaactacctgtacctgatttttctgctgtttccaacaaaggtgcaacaacatcaattggaggtgcgtacagtgttactgcgactcataacggtacacagcatcatgcaataacaacacagtcatgggatcagacagcatataaagcaagtaacagagtatcatctggcgacttttcggttcatcgtctgaataaattcgtcgtggaaacaacaggggttacggagagtgccgacttctcactttctcccgaagatgcgatgaaaagatatggcgtaaactacaacggtaaggaacaaataattggcttcagagcaggtgccggaacaacctcaacgatattaaacggcaaacaatatctgtttggacaaaactataatcccgacttgttaagcgcaagtctttttaatctggactggaaaaacaagagttacatttataccaacagaaccccttttaaaaactcaccaatttttggcgatagtggttctggttcttatctatatgataaagaacaacaaaaatgggttttccatggtgttaccagtacagttggttttctcagtagtaccaatatagcctggacaaactactcgttatttaataatattctggtaaacaatttaaaaaagaatttcacaaacactatgcagctggatggtaaaaaacaagagttatcatcgattataaaagataaggacctgtctgtctcaggaggaggggaattaacgctcaagcaggataccgatcttggcattggcgggcttatattcgataagaaccagacatataaagtgtacggaaaagataagtcttataaaggtgccgggatagatattgataataataccaccgttgaatggaatgttaagggcgttgccggagataatctgcataaaataggtagtggtactctggatgtaaaaatagcacagggaaataaccttaaaataggtaatgggactgtcatccttagtgctgaaaaagccttcaataaaatttacatggccggaggtaaaggtacggtaaaaataaatgccaaagacgctttaagcgaaagcggtaatggcgaaatctattttaccagaaatggcggaacactggatctaaacggctatgaccagtcatttcagaaaatcgcagcaacagatgcgggaacaaccgtaacgaactcaaacgtgaagcaatcaacattatcacttactaatactgatgcatatatgtaccatgggaatgtatcaggtaatataagcataaatcatattatcaatactacccagcaacataacaataatgccaatctgatctttgatggctcagtcgatatcaaaaacgatatctctgtccggaatgcacagttaacattacaaggacatgcgacagaacatgccatatttaaagaaggcaataacaactgtccaattccttttttatgtcaaaaagactattctgctgccataaaggaccaggaaagcactgtaaataaacgttacaatacggaatataagtccaacaatcagatagcctctttttcccagcccgactgggaaagtcgtaaatttaatttccggaaattaaatttagaaaacgcaaccctgagtataggccgggatgctaatgtaaaaggacacatagaggctaaaaactctcaaattgttctgggaaataaaactgcatacattgacatgttctcaggaagaaacattactggcgaaggttttggattcagacaacagcttcgctccggggattcagcaggcgaaagtagtttcaacggcagtctgagtgctcaaaacagcaaaataactgttggtgataaatcaactgttactatgactggtgcattatccttaattaatacagacctgattatcaacaaaggagctactgttaccgcccagggaaaaatgtatgtagataaagctattgaactggccggaaccctgacattaacaggcacccctacagaaaataataaatacagcccggcaatctatatgtcagatggatataatatgacagaagatggtgccacgttaaaggctcaaaattatgcctgggtcaatggtaatataaaatcagacaaaaaagcatctattctgtttggtgttgaccagtataaagaagataacctggacaaaaccacacacacaccgctggctacaggtttgctgggtggctttgatacttcttataccggaggtattgatgctcctgctgcctcagccagcatgtataacaccttatggagagtaaacggacagtcagccctgcaatcattaaaaacccgcgacagtcttttgttgtttagtaacatagagaattcgggtttccatactgtgacagtaaacacactggatgccactaatactgctgtgattatgcgggctgatctgagccagtctgtaaatcaatcggataaactcattgttaaaaatcagttaaccggaagcaataacagtctgtcggtcgatatacagaaagtgggaaataataactcaggattaaacgttgacctgataacagccccaaaaggaagcaataaagagatatttaaagccagtactcaggccataggtttcagcaacatatctcctgtgatcagcacgaaagaggatcaggaacataccacgtggaccctgaccggatataaggtggctgaaaatacagcatcttccggtgcagcaaaatcgtatatgtccggtaattacaaagccttcctgacagaagtcaacaacctgaataaacgaatgggggatctgcgtgacaccaatggcgaggccggtgcatgggcccgcatcatgagcggagcaggttcagcttctagtggatacagtgacaactacacccatgtgcagattggtgtggataaaaaacatgagctggatggacttgaccttttcactggtctgactatgacgtataccgacagtcatgccagcagtaatgcattcagtggcaagacgaagtccgtcggggcaggtctgtatgcttccgctatatttgactctggtgcctatatcgacctgattagtaagtatgttcaccatgataatgagtactcggcgacctttgctggactcggaacaaaagactacagttctcattccttgtatgtgggtgctgaagcaggctaccgctatcatgtaacagaagactcctggattgagccgcaggcagaactggtttatggggccgtatcaggtaaacggttcgactggcaggatcgcggaatgagcgtgaccatgaaggataaggactttaatccgctgattgggcgtaccggtgttgatgtgggtaaatccttctccggtaaggactggaaagtcacagcccgcgccggccttggctaccagtttgacctgtttgccaacggtgaaaccgtactgcgtgatgcgtccggtgagaaacgtatcaaaggtgaaaaagacggtcgtattctcatgaatgttggtctcaacgccgaaattcgcgataatcttcgcttcggtcttgagtttgagaaatcggcatttggtaaatacaacgtggataacgcgatcaacgccaacttccgttactctttctga

SEQ ID NO: 484799 - DNA, 801 bp, Shigella sonnei; identical to SEQ ID NO: 461020

SEQ ID NO: 484800 - DNA, 3516 bp, Shigella sonnei
atggatgaaaatgctttagggtttacctcatactggcgcaactcgcttgcggatgctgagtcaggaaagggcagttttgaacggaaagacgccaaaaatttcactcactggcatgggatagcggcgggacgtcttgacgaagcgattgtcagtaaattttttaagggagaaaaagacgatgtcgaaacggtcgatgtcatcttgcgcccaaaagtttatttccggttactgcagcatggtaaggaccgttctgcaggtgcgcctgatattgttaccccgatagtgacgccagccttgctaagccgtgagggttttttatatccgacgccagcgacctccattcccagagacctgcttgaacctttgccaaaaggagcattttcgattggtgagattgggcagtatgacaaatacaagacgacccataccacgttctctatcaactttgatgacagcgttgataagactgccgaaacggatgaagaacgggaagcacgatatgccgccttgcagcaggagtggcgtcaatatctgtatgactcagagaggctactgaagagcgttgccggcgactggattgaaaaacctgagcaatatgaactcgctgagcacggttatattgttaaaacggctcaatctggcggtgccagttcccatatcctttctctttatgatcacctgattgtttgcaataaggatgtgccgctcttcaatcgcttcgcctcgcgagaggttcatgctgcagagtctttgctggccccaggagcaaaattcagcgacaggcttggacactccggagataagtttccgctggcaaaggctcagcgcgatgccttaagccattttctggatgcaagacatggcgatatccttgctgttaatggccctccgggaaccggaaaaaccacgctggtgctttctatcatcgccacgcagtgggccagagcggctctcgaaaaatctgagcctccggttattatcgcgacttcaacgaataaccaggctgtaacgaacattattgaggcattcgggaaagacttttcgcaaggttcaggtgcgatggccgggcgatggttgccagagctgaaaagcttcggtgcttattttccctcaagcagtcgtaaagctgaggcagccaaaaaatatcaaactgaagatttcttcaaccaggttgagtcaaaagagtatgtagaggatgcactgctgttttatctggaaaaggctaaggcagcctttcctggaaaagagtgttcatcccctgaaaaggtcattgaactcctgcatggtcagttggcagcaaaatctgagcaactgataagactgaacgcaacatggcaaacgttaagccagattcgggctgcgcgtgagcttattgctaatgatattgagcaatatctcgataatttaaataaattactttccggacaagaacaaaaagtcactctactgaagagtgctaaaacggaatggaaaaaatatcgcgccggtgaatcactgatctattcattattttcctggctcccggcggttcgcaataagcgacagtaccaaatacagctgtttctcgaagataaattaggcgcgctgattgcaggaaatcagtggtctgatcctgaaactatcgaacgtaatattgatgggctgctcaattccgctgagcgcgagcaaacaacataccggcagcagattgactccgcccatgaaatcgttcttaaagaacagcaggcggttcaggagtggcagaggctggcatttgatttagggtatgagggcgacgaggaactgagcttctcacaggccgatgaactggctgatacgcagattcgcttccctgcatttttactgacgactcactactgggaaggtcgttggctgatggatatggccagcattgatgatctgcaggacgagaagaagaaaaaaggtgctaaaggggtaaccgcccgttggcaacgtcgaatgaaactcacgccatgtgtggtaatgacatgctatatgctgcccggtaatatgcagataagtgagcacaaaggacaacgtaaattcgagaaaagttatttgtatgattttgccgatttactcattgtcgatgaagccgggcaggtgcttcctgaagtggctgctgcctcgtttgcattagctaagaaggcattagtgattggcgatacggagcagatcccgccaatatggagtattgctcctgcgattgatgtcggtaacatgctggcggaaaaaattctgtctggcagtacgcaagaagagattaccgagaaatatacggcaatcgcagaccttggtaaaagtgccgcatctggcagcgttatgaaaatagcgcagtttgcttcgcgctatcaatatgatcccgaactggctcgtggtatgtacctatatgaacaccgccggtgctacgacaatattattggatactgtaatacgctctgctatcacggtaagttgttgcctaaaagagggcgtgaagagagcaatttaatgcccgcaatggggtatctccatattgatggtaaaggagagctggcaagtagtggaagtcgatataatttgcttgaggctgaaacgatagcggtctggttggcagagaaccagcaaaatattgaagcgcattacggtaaatcgcttcatgaagttgtcggtattgtgacgccttttagcgctcaggtatccactatcaaacaggtgctgggcaaacaaggtatcagtacaggcacgaatgaaaagtcgctcacagtgggcaccgtgcactctcttcagggagcggaaagagcgattgtgatattctcgccagtctattcaaaacatgaagacggcgggtttattgatagcgataacagcatgctgaatgttgcagtctcccgtgcgaaggacagttttctggtcttcggcgatatggacctgtttgaggtccagccagcctcatcgccacggggattactggcaaaatacctctttgagtcagagaagaatgcgctctcttttgattataaagagcgtaaggatttaaaaaccgccgggaccaaaatctacacacttcatggtgtggagcaacatgataatttcctgaatcagacatttgaaaataccagtaaacacatcacgataatttctccatggctgacctggcaaaggctggagcaaaccggttttcttgattccatgattgcggcgtgttcacgtggaattaacgtcacgatagtcactgacagaagctacaacactgaacataatgattttgagaagcgaaaagagaagcagcagaactttaaagcggcgctggagaaactgaatgcgctgggtattgctacaaagctggtaaaccgtgttcatagcaaaattgttattggtgatgatggtttgctgtgtgtgggatcgttcaactggtttagtgcgacacgggaagcgcgatatgaacgatacgatacatcaatggtttattgcggtgataacctgaagggtgagattgaggctatttataatagtcttgagaggcgtcaggtttag

SEQ ID NO: 484801 - DNA, 276 bp, Shigella sonnei
atggggtatgacacaacccaggatgtctgtggccatggattccgggcgatggcgtgcagtgcattgattgaatcaggtttgtggtcccgcgatgctgtggaacgtcagatgagccatcaggagcgtaatggtgtacgtgctgcgtatatccataaagcagaacatctggaagaacgtcgactgatgctacagtggtgggcagattttctggatgcgaacagagataagggtatcagcccgtttgaatatgcaaagattaacaatccattaaaatag

SEQ ID NO: 484802 - DNA, 621 bp, Shigella sonnei
atgagtcaaaacgatatcattatcagaacccattataagtctcctcatagattgcacatcgatagcgacataccaacgccttcatcagagcctattaatcaatttgcgcgccaactcatcaccctacttgatacctctgacttaagttcgatgctgtcatactgtgttactcaggaatttaccgcaaactgtcgaaaaatttcacaaaattgttattccactgccctttttatcattaactttgccacttcacccatccatgcagaaaatatactcattacattacactataaaaaagaaatcattcccttatttctggaaaccacgcctattaaggctaaccatttgcgaagcatactggattatattgaacaggaacagttaactgccgaagatcgtaaccattgtatgaaactgtctaaaaaaatccatagagaaaaaactatacaaccaacagtaaatctcaatggtagtgcatttttttcgcaatctccttctgacgctattttttgtcgccatctgtcattgcaatacgcccttggtaatgactccaacttattgatagtgttttatgttcagataatgcccgatgactttgtcatgcagctccaccgattttga

SEQ ID NO: 484803 - DNA, 1929 bp, Shigella sonnei
atgcctgttataactcttcctgatggcagccaacgccattacgaccacgctgtaagccccatggatgttgcgctggacattggtccaggtctggcgaaagcctgtatcgcagggcgcgttaatggcgaactggttgatgcttgcgatctgattgaaaacgacgcacaactgtcgatcattaccgccaaagacgaagaaggtctggagatcattcgtcactcctgtgcgcacctgttagggcatgcgattaaacaactttggccgcataccaaaatggcaatcggcccggttattgacaacggtttttattacgacgttgatcttgaccgcacgttaacccaggaagatgtcgaagcactcgagaagcggatgcatgagcttgctgagaaaaactacgacgtcattaagaagaaagtcagctggcacgaagcgcgtgaaactttcgccaaccgtggggagagctacaaagtctccattcttgacgaaaacatcgcccatgatgacaagccaggtctgtacttccatgaagaatatgtcgatatgtgccgcggtccgcacgtaccgaacatgcgtttctgccatcatttcaaactaatgaaaacggcaggggcttactggcgtggcgacagcaacaacaaaatgttgcaacgtatttacggtacggcgtgggcagacaaaaaagcacttaacgcttacctgcagcgcctggaagaagccgcgaaacgcgaccaccgtaaaatcggtaaacagctcgacctgtaccatatgcaggaagaagcgccgggtatggtattctggcacaacgacggctggaccatcttccgtgaactggaagtgtttgttcgttctaaactgaaagagtaccagtatcaggaagttaaaggtccgttcatgatggaccgtgtcctgtgggaaaaaaccggtcactgggacaactacaaagatgcaatgttcaccacatcttctgagaaccgtgaatactgcattaagccgatgaactgcccgggtcacgtacaaattttcaaccaggggctgaagtcttatcgcgatctgccgctgcgtatggccgagtttggtagctgccaccgtaacgagccgtcaggttcgctgcatggcctgatgcgcgtgcgtggatttacccaggatgacgcgcatatcttctgtactgaagaacaaattcgcgatgaagttaacggatgtatccgtttagtctatgatatgtacagcacttttggcttcgagaagatcgtcgtcaaactctccactcgtcctgaaaaacgtattggcagcgacgaaatgtgggatcgtgctgaggcggacctggcggttgcgctggaagaaaacaacatcccgtttgaatatcaactgggtgaaggcgctttctacggtccgaaaattgaatttaccctgtatgactgcctcgatcgtgcatggcagtgcggtacagtacagctggacttctccttgccgtctcgtctgagcgcctcctatgtgggcgaagacaacgagcgtaaggtaccggtaatgattcaccgcgcaattctggggtcgatggaacgtttcatcggtatcctgaccgaagaattcgctggtttcttcccgacctggcttgcgccagttcaggttgttatcatgaatattaccgattcacagtctgaatacgttaacgaattgacgcaaaaactatcaaatgcgggcattcgtgttaaagcagacttgagaaatgagaagattggctttaaaatccgcgagcacactttgcgtcgcgtcccatatatgttggtctgtggtgataaagaggtggaatcaggcaaagttgccgttcgcacccgccgtggtaaagacctgggaagcatggacgtaaatgaagtgatcgagaagctgcaacaagagattcgcagccgcagtcttaaacaattggaggaataa

SEQ ID NO: 484804 - DNA, 435 bp, Shigella sonnei; identical to SEQ ID NO: 1390

SEQ ID NO: 484805 - DNA, 198 bp, Shigella sonnei; identical to SEQ ID NO: 1389

SEQ ID NO: 484806 - DNA, 357 bp, Shigella sonnei
atggctcgcgtaaaacgtggtgttattgcacgcgcacgtcacaagaaaattttgaaacaagctaaaggctactacggtgcgcgttctcgcgtataccgcgttgccttccaggctgttatcaaagctggtcagtatgcttaccgtgaccgtcgtcaacgtaagcgtcagttccgtcaactgtggattgcgcgtatcaacgcagcagcacgtcagaacggtatttcttacagcaaattcatcaatggcctgaaaaaagcctctgttgaaatcgaccgtaagatcctggctgatatcgcagtattcgacaaagtagcgttcaccgctctggttgaaaaagcgaaagcagctctggcataa

SEQ ID NO: 484807 - DNA, 984 bp, Shigella sonnei
atgtcacatctcgcagaactggttgccagtgcgaaggcggccattagccaggcgtcagatgttgccgcgttagataatgtgcgcgtcgaatatttgggtaaaaaagggcacttaacccttcagatgacgaccctgcgtgagctgccgccagaagagcgtccggcagctggtgcggttatcaacgaagcgaaagagcaggttcagcaggcgctgaatgcgcgtaaagcggaactggaaagcgcagcgctgaatgcgcgtctggcggcggaaacgattgatgtctccctgctaggtcgtcgcattgaaaacggcggtctgcatccggttacccgtaccatcgaccgtatcgaaagtttcttcggtgagcttggctttaccgtggcaaccgggccggaaatcgaagacgattatcataacttcgatgctctgaacattcctggtcaccacccggcgcgcgctgaccacgacactttctggtttgacactacccgcctgctgcgtacccagacctctggcgtacagatccgcaccatgaaagcccagcagccaccgattcgtatcatcgcgcctggccgcgtttatcgtaacgactacgaccagactcacacgccgatgttccatcagatggaaggtctgattgttgataccaacatcagctttaccaacctgaaaggcactctgcacgatttcctgcgtaacttctttgaggaagatttgcagattcgcttccgtccttcctacttcccgttcaccgagccttctgcagaagttgacgtcatgggtaaaaacggtaaatggctggaagtgctgggttgcgggatggtgcatccgaacgtgctgcgtaacgttggcatcgacccggaagtttactctggtttcgccttcgggatggggatggagcgtctgactatgttgcgttacggcgtcaccgacctgcgttcattcttcgaaaacgatctgcgtttcctcaaacagtttaaataa

SEQ ID NO: 484808 - DNA, 2388 bp, Shigella sonnei
atgaaattcagtgaactgtggttacgcgaatgggtgaacccggcgattgatagcgatgcgctggcgaatcaaatcactatggcgggcctggaagttgacggtgtagaaccggttgccggtagcttccacggcgtggtcgttggtgaagtggttgagtgtgcgcagcatccgaacgctgacaaactgcgtgtgacaaaagtgaatgtcggcggcgatcgcctgctggacatcgtctgtggtgcgccaaactgccgtcagggcctgcgtgtggcggtagctaccattggtgctgttctgccgggtgatttcaaaattaaagcggcgaaactgcgtggcgaaccgtctgaagggatgctgtgctccttctctgaactgggaatttctgacgatcacagcggcattatcgaactgcctgcagatgcgccgattggcactgacatccgcgaatacctgaaactcgatgacaacaccatcgaaatcagcgtaacgccaaaccgtgccgactgcttaggtatcattggtgttgcgcgtgacgttgccgtgctgaatcagctgccgctggttgaaccggaaatcgttccggttggtgcgaccatcgacgacacgttgccgattacagtcgaagcgcctgaagcctgcccgcgctatcttggccgtgtggtaaaaggcattaacgttaaagcgccaactccgctgtggatgaaagaaaaactgcgtcgttgcgggatccgttctatcgatgcagttgttgacgtcaccaactatgtactgctcgaactgggccagccgatgcacgctttcgataaagatcgcattgaaggcggcattgtggtgcggatggcaaaagagggcgaaacgctggtgctgcttgatggcactgaagcgaagctgaatgctgacactctggtcatcgccgaccacaacaaggcgctggcgatgggcggcatctttggtggcgaacactctggcgtgaatgacgaaacgcaaaacgtcttgctggaatgcgctttcttcagcccgctgtctatcaccggtcgtgctcgtcgtcatggcctgcatactgatgcgtctcaccgttatgagcgtggcgttgatccggcactgcagcacaaagcgatggaacgtgcgacccgtctgctgatcgacatctgcggtggtgaggctggtccggtaattgatatcaccaacgaagcaacgctgccgaagcgtgcaaccatcactttacgtcgtagcaaactggatcgcctgatcggccatcatattgctgatgaacaggtaactgacattctgcgtcgtctcggctgcgaagtgaccgaaggcaaagacgagtggcaggcagttgcgccgagctggcgtttcgatatggagattgaagaagatctggttgaagaagtcgcgcgtgtttacggctacaacaacatcccggatgagccggtacaggcaagcctgattatgggtactcaccgtgaagctgacctgtcgctcaagcgcgtgaaaacgctgctcaacgacaaaggctatcaggaagtgatcacctacagcttcgttgatccgaaagtgcagcagatgatccatccaggcgttgaagccttactgctgccaagcccgatctctgttgaaatgtcagcaatgcgtctttctctgtggaccggcctgctggcaaccgtggtgtacaaccagaaccgtcagcagaaccgtgtgcgcattttcgaaagcggtctgcgtttcgtaccagatactcaggcaccgttgggcattcgtcaggatctgatgttagccggtgtgatttgcggtaaccgttacgaagagcactggaacctggcaaaagagaccgttgatttctatgatttgaaaggcgatcttgaatccgttctcgacctgaccggtaaactgaatgaggttgagttccgtgcagaagcgaatccggcactgcatccggggcaatccgcagcgatttatctgaaaggggaacgtattggttttgttggagttgttcatcctgaactggaacgtaaactggatcttaacggtcgcactctggtgttcgaactggagtggaacaagctcgcagaccgcgtggtgcctcaggcgcgcgagatttctcgcttcccggcgaaccgtcgtgacatcgcggtggtggtcgcagaaaacgttcccgcagcggatattttatccgaatgtaagaaagttggcgtaaatcaggtagttggcgtaaacttatttgacgtgtaccgcggtaagggtgttgcggaggggtataagagcctcgccataagcctgatcctgcaagataccagccgtacactcgaagaagaggagattgccgctaccgtcgccaaatgtgtagaggcattaaaagagcgattccaggcatcattgagggattga

SEQ ID NO: 484809 - DNA, 300 bp, Shigella sonnei; identical to SEQ ID NO: 1385

SEQ ID NO: 484810 - DNA, 981 bp, Shigella sonnei
atgctgacacttgcccgccaacaacagcgacaaaatattcgctggttattatgcctgtcagttttgatgctgctggcgcttctcttaagcctttgcgccggtgaacaatggatttcgccaggtgactggtttactcctcgtggcgaactgttcgtctggcaaattcgcctgccacgtacgctggctgtattgctggttggtgcggcgctggctatatccggcgctgtaatgcaggcgttgtttgaaaatcctctggcagaacctggactacttggcgtctctaacggcgcaggcgtggggcttatcgccgcggtattgcttgggcaagggcaactccccaactgggcgctagggctgtgtgcgattgctggcgcgcttatcatcactttaatactcttacgtttcgcccgtcgtcatctttcgaccagtcggttattgctggctggcgttgcattagggattatctgtagcgcactaatgacgtgggctatctacttttccacctctgttgatttacgtcagctgatgtactggatgatgggcggttttggcggcgtagactggcggcaaagctggctgatgctggcattgatccccgtgttgttgtggatctgttgtcagtccaggccgatgaatatgttagcacttggcgagatctcggcgcggcaactgggtttacccctgtggttctggcgcaatgtgctggtggcagcgaccggctggatggttggcgtcagtgtggcgctggcgggtgctatcggctttattggtctggtgatcccacatattcttcggttgtgtggtttaaccgatcatcgcgtattacttcccggctgcgcgctggcaggggcgagcgcagtgctgctggccgatattgtagcgcgcctggcattagctgccgcagagctgcctattggcgtggtcaccgcaacgttgggtgcgccggtgtttatctggttattgttaaaagcaggacgttag

SEQ ID NO: 484811 - DNA, 552 bp, Shigella sonnei
atgcaagattccattctgacgaccgtagtgaaagatatcgacggtgaagtgaccacgctggagaagtacgccggtaatgtgctgttgattgtcaatgtcgcctcaaagtgtggcttaacgccgcaatatgagcagttggagaatattcagaaagcctgggccgatcgaggttttgtggtgctgggattcccgtgcaaccagtttctggaacaagaaccgggcagcgatgaagagattaaaacttactgtaccaccacatggggggtgacgttcccgatgttcagtaagattgaagttaacggcgaaggacgccatccgctgtatcaaaaattgattgccgcagcgccgaccgcagtcgcgccggaagagagcggattctatgcccgtatggtcagcaaaggtcgtgcaccgctgtaccctgatgatattttatggaattttgagaaatttttagttggcagggacggattggtcatccagcgtttttccccggatatgacgccggaaaaccccattgtgatggaaagcattaaactggcgttggcaaaataa

SEQ ID NO: 484812 - DNA, 750 bp, Shigella sonnei
atgtctattgtgatgcagttacaggatgttgcggaatctacccgcctagggccactttctggcgaggttcgggctggggagatcctgcacctggtggggccgaatggcgcgggtaagagtaccttactggcacgaatggccggaatgaccagcggtaagggaagtattcagttcgcggggcaaccactggaagcatggtccgcaacaaaactcgcgctgcatcgcgcctatctttcacaacagcagacgccgccgtttgcaatgccggtctggcactatctgacactgcatcagcacgataaaacgcgtaccgaactactgaatgatgtcgcaggggcgctggctcttgatgacaaactcggacgtagcaccaatcaactttccggcggtgaatggcaacgcgtacgtcttgctgcggtggtgctgcaaatcacaccacaagccaatcccgcaggccaattgctgcttcttgatgagccgatgaacagtcttgatgttgcgcaacaaagtgcgttagacaaaattctgagcgctctgtgtcagcaaggactggcgattgtgatgagcagtcacgatctcaaccacacattgcgtcatgcgcatcgggcgtggttgctaaaaggtggaaaaatgctggccagtggacgcagagaagaggtgctcacgccgccaaatctggcgcaggcctatgggatgaattttcgccgtctggatatcgaaggtcacagaatgctgatttcgaccatctga

SEQ ID NO: 484813 - DNA, 465 bp, Shigella sonnei
atgcgtttctgccttattttgatcacagcactgtttctggccgggtgtagccaccataaagcaccgccgccaaatgccagactttctgattcgattaccgttattgccggtttgaacgaccagctacaaagctggcatggcacgccgtatcgttatggtggcatgacgcggcgcggtgtggactgttcgggatttgtggttgtaacgatgcgcgatcgtttcgatttgcagctgccccgagaaaccaaagaacaagcctctatcggcacgcaaattgataaagacgagttgctgcctggtgacctggtctttttcaaaacgggttccggacaaaatggtttgcatgtaggtatttacgataccaacaaccaatttatccacgcctctaccagcaagggagtgatgcgttcctcacttgataatgtctattggcagaaaaatttctggcaggcgagacgaatctaa

SEQ ID NO: 484814 - DNA, 321 bp, Shigella sonnei
atgaaagcatttccagaaacatttctttggggtggcgcaacagctgccaatcaggtggaaggtgcctggctggaagatggcaaagggagcacgacctcagatttacagcctcatggcgttatgggaaaaatggaaccgcgcatcctggggaaagagaatatcaaagatgtcgccatcgatttttatcaccgttacccggaagatatcgcgttatttgccgagatgggcttcacctgtctgcgtatttccattgcctgggcgcgaattttccctcagggcgacgaagccgaaccgaatgaagcggggttagcgttgatatga

SEQ ID NO: 484815 - DNA, 1878 bp, Shigella sonnei
atgacggagttagccagaaaaatagtcgcaggagtcgggggcgcagataacattgttagtctgatgcattgcgcaacgcgattacgttttaagttaaaggatgaaagcaaagcgcaagctgaggtactgaaaaacacccccggtattattatggtggtggaaagcggtggccagtttcaggtggtcataggtaaccatgtggccgatgtcttcctggcggtcaacagcgtggcaggccttggcgaaaaagcgcaacaggcaccggaaaatgatgagaaaggtaatctgctaaaccgctttgtttatgttatttcaggtatttttacgcctctgatcggtttgatggcggcaaccgggatcctgaaaggtatgctggctctggcgctcacttttcagtggacgaccgaacaaagtggtacttatttaattttattcagcgccagtgatgccttgttttggttcttcccgataatcctgggatacaccgcggggaaacgctttggcggtaatccatttactgccatggtgattggtggagcgttagtgcatccattaattctgactgctttcgagaacgggcaaaaagcggatgcgctggggctggatttcctgggtattccggtcacattgttgaattactcgtcatcggttattcccattattttttctgcctggttgtgcagcattctggaacgccgacttaatgcgtggttaccgtcggcaatcaaaaatttcttcacaccattgctatgtctgatggttatcacacccgtcacctttctgctggtggggccgctatcaacctggataagcgaactgattgccgccggttatctctggctttatcaggcggttcctgcatttgcgggcgcggtaatgggcggcttctggcaaatcttcgtcatgttcggactgcactggggcctggtgccgctgtgtatcaataacttcaccgtgctgggctacgacaccatgatcccgctgttaatgcccgccattatggcgcaggtcggggcggcgctcggcgtcttcctctgcgaacgcgatgcgcagaaaaaagtggtggcgggatcagcggcgttgacgggcctgtttggtatcaccgaaccagcggtatatggcgttaatctgccgcgtaagtacccctttgttatcgcctgtatcagtggggctttgggggccaccatcattggctacgcgcaaacgaaagtgtactcctttggtttgccaagtattttcaccttcatgcaaaccatcccgtcaacgggaattgatttcaccgtctgggccagcgttattggcggtgtcattgccatcggttgcgcatttgtcggtacggtgatgcttcatttcatcaccgctaaacgtcagccagcgcagggtgccccgcaagagaaaacaccagaggttattacaccacctgagcagggcggtatctgttcaccgatgacgggagagattgtgccgctcattcacgtcgctgataccacgtttgccagtggcctgttgggtaaaggtatcgccattctgccctcggttggtgaagtgcgttctccggttgcgggtcgaattgcttcgttgttcgccacattacacgccattggcattgagtcagatgatggtgtggagatcctgattcatgtcggtatcgacaccgtaaaactggacggcaaattcttttccgctcacgtcaacgtgggtgacaaggtcaatacaggcgatcggctgatttcttttgatatccctgctattcgcgaggccggatttgatgtgacgacgccggtattaatcagtaatagcgatgattttacagacgtattaccccacggcacggcgcagataagcgcaggtgaaccgctgttatccatcattcgctaa

SEQ ID NO: 484816 - DNA, 837 bp, Shigella sonnei
atgaacatgcaaatcaccaaaattctcaacaataatgttgtggtggttattgatgatcaacagcgggaaaaagtcgtcatggggcgaggaattggctttcaaaaatgcgctggcgaaagaattaactcaagtggaatagaaaaagagtatgccttgagcagtcatgaactgaacgggcgattaagcgaactcttaagtcatattcctcttgaggtgatggcaacctgtgatcgtattatctctttagcgcaggagcgcttgggaaaattacaggacagtatttatatctcgctaactgaccattgccagtttgcgattaaacgctttcagcaaaacgtgttgctgcccaacccgttgctgtgggatatccagcggctttacccgaaagagttccagctaggggaagaagcgttaaccattattgataaacggttgggcgtgcagttaccgaaagatgaagtgggctttattgccatgcatctggtcagtgcccaaatgagcggaaatatggaggatgttgcaggtgtcacgcagttaatgcgcgaaatgctgcaattaataaaatttcagttcagccttaattaccaggaagaaagcttgagttatcagcgactggttacacatctgaagtttttatcctggcgtattcttgaacatgcttcaattaacgatagtgatgaatcattacaacaagcagtaaaacaaaattacccgcaagcatggcaatgtgcggaacggatcgccatttttattggtttgcagtatcaacgtaaaatttcacccgcagagattatgtttttagccataaatatagagcgcgtgcgcaaagaacactga

SEQ ID NO: 484817 - DNA, 726 bp, Shigella sonnei
atggacagtctcaatcttaataaacatatttccggccagttcaacgccgaactggaaagtatccgcacgcaggtgatgaccatgggtggcatggtggagcagcagctttctgatgcaatcaccgcgatgcataaccaggacagcgatctggcgaagcgcgtgatcgaaggcgacaagaacgtcaacatgatggaagtggcgatcgatgaagcctgcgtgcgcattatcgccaaacgtcagccgacggcgagcgacctgcgactggttatggtgatcagtaaaaccattgccgagctggagcgtattggcgacgtggcggacaaaatctgccgtactgcgctggagaaattctcccagcagcatcagccgttgctggtaagtctggagtcgctgggccgtcataccatccagatgctgcacgacgtgctggacgcgttcgcgcggatggacattgacgaagcggtacgtatttatcgtgaagataaaaaagtcgatcaggaatacgaaggtattgttcgtcaactgatgacctacatgatggaagattcgcgtaccattccgagcgtacttactgcgctgttctgcgcgcgttctatcgaacgtattggcgaccgctgccagaatatttgtgagtttatcttctactacgtgaaggggcaggatttccgtcatgtaggcggtgatgagctggataaactgctggcgggaaaagatagcgacaaataa

SEQ ID NO: 484818 - DNA, 774 bp, Shigella sonnei
atgagtatggttgaaactgccccgagtaaaattcaggttcgtaatttgaacttctactacggcaaattccatgccctgaaaaacatcaacctggatatcgctaaaaaccaggtaacggcgtttatcgggccgtccggctgcggtaaatcgacgctgctgcgtaccttcaacaaaatgtttgaactgtatccggagcagcgcgcagaaggtgaaattctgcttgatggcgacaacatcctgaccaactctcaggatatcgcactgctgcgtgcgaaagtgggcatggtgttccagaaaccgacgccgttcccgatgtccatctacgacaacatcgcttttggtgttcgtctgtttgagaagctctcccgtgccgacatggacgagcgcgtgcagtgggcattgaccaaagccgcattgtggaacgaaaccaaagataaattgcaccagagcggttactctctctctggtggtcagcaacagcgtctgtgtattgcgcgtggtatcgccattcgcccggaagtgctgctgctcgacgaaccgtgttcggcgctcgaccccatctctaccgggcgtattgaagagctgatcaccgaactgaagcaggattacaccgtggtgatcgttacccacaacatgcagcaggctgcgcgttgttccgaccacacggcgtttatgtacctgggcgaattgattgagttcagcaacacggacgatctgttcaccaagccagcgaagaaacaaacagaagactacatcaccggtcgttacggttaa

SEQ ID NO: 484819 - DNA, 891 bp, Shigella sonnei
atggctatggttgaaatgcaaaccactgcggcgctggctgaatctcgccgcaaaatgcaggcgcgtcgccgcctcaaaaaccgtattgcgctgacgctctcgatggcgacgatggccttcggcctgttctggctgatctggattttaatgtccaccatcactcgcggtatcgacggtatgtcgctggcgctgttcactgaaatgacgccgccgcccaatacggaaggtggtggtctggcgaacgccctggcgggtagcgggctgttaattttgtgggccacggtattcggtacgccgctgggcattatggcggggatttatctggcggaatatggtcgtaaatcctggctggcagaagtgattcgcttcattaacgacattctgctctccgcgccgtcgattgtggttggtctgtttgtctacaccatcgtggtggcacagatggagcacttctccggctgggcgggcgtaattgcgctggcgctgttgcaggtgccgatcgttatccgcaccaccgagaacatgctgaaactggtgccggacagcctgcgtgaagcggcttatgcgctgggtacaccgaagtggaagatgatctccgcgattacgctgaaagcgtcggtgtccgggattatgaccggtatcctgctggcgattgcccgtattgccggtgaaaccgcgccgctgctgtttaccgcgctctccaaccagttctggagcacggacatgatgcagccgatcgccaacctgccggtgacgatctttaagtttgcgatgagcccgtttgcggaatggcaacaactggcctgggccggggtattgatcattaccctgtgcgtcctgctgctgaacattctggcgcgcgttgtttttgcgaagaataaacacggttaa

SEQ ID NO: 484820 - DNA, 960 bp, Shigella sonnei; identical to SEQ ID NO: 460659

SEQ ID NO: 484821 - DNA, 1041 bp, Shigella sonnei
atgaaagttatgcgtaccaccgtcgcaactgttgtcgccgcgaccttatcgatgagcgctttctctgtgtttgcagaagcaagcctgacaggtgcaggtgcaaccttccctgcgccggtgtatgccaaatgggctgacacttaccagaaagaaatcggtaataaagttaactaccagggtatcggttcttccggtggcgtaaaacagattatcgctaataccgttgattttggtgcctctgacgcgccgctgtctgacgaaaaactggctcaggaaggtctgttccagttcccgaccgtgattggcggcgtggtgctggcggttaacattccagggctgaagtctggcgaactggtgctggatggtaaaaccctcggcgacatctacctgggcaaaatcaagaagtgggatgatgaaaccatcgccaaactgaatccgggtctgaaactgccttcacaaaacattgctgtagtacgccgcgcagatggctccgggactaccttcgtcttcaccagctacctggcgaaagtgaacgaagagtggaaaaacaacgttggtactggctctaccgtaaaatggccgatcggtctgggcggtaaaggtaacgacggtatcgccgcgttcgttcagcgtctgccgggtgcaattggttatgttgaatatgcttacgcgaagcagaacaacctggcgtacaccaaactgatctccgctgatggtaaaccggttagtccgaccgaagaaaacttcgctaatgcagcaaaaggtgcagactggagcaaaaccttcgctcaggatctgaccaaccagaaaggcgaagatgcatggcctattacctctaccacgttcattctgatccacaaagatcagaagaaaccagaacaaggcacagaagtgctgaaattcttcgactgggcgtacaaaaccggggctaaacaggcgaacgacctggattacgccagcctgccggatagtgtagttgaacaggttcgcgctgcgtggaagaccaatattaaagacagtagcggtaagccgctgtactaa

SEQ ID NO: 484822 - DNA, 1074 bp, Shigella sonnei
atgaacaagtatatcaaacagtggtgctttgctgtgtttatgctctcgttaagtagtgtagcacttgcagctcctaaaggtatctgtacccctgataatggcgtatttcaccgtacgcttgatttctcgggatatcttattaccgcgaacgaaaataaggttggaacgacatttaataccactgtaactaatggatcctcatatcctggacgctgtcattgtgatactggtaatgtaggagaattcccctatatctattatacgtcaaaaataaaccaggcattaacttatgctggggttcactctaatattaattattatgatcttaatccgaaccttgatgttgggattgctatagatattcttggggttgggtatgtgaatgcaccttttgaatatcatgctaacaacccgtctggtaatacaaagtacaattgcaaccgcattgaacctttaagtatatccagtgggggtaaagcgatagtatatttttatatcaagaagacatttgcaggaaaattgattattcctgaaacaaagatagtgacattgtatggaacaattagccgtgacaccccggtggattactcacagccgatggctgatgtttatattcggggcgatattacagctccgcaaagttgcgaaataaataatttacagccagtttattttgattttaaagaaataccagctgcagatttttcatctgttgttggaagtgcggtaacaacacataaaattactaaaacagtcactattgagtgtgaaaacctggggatactgaataccgatgatatcagtacgtctttttatgctaccgaacccaatacggacaattcaatggtcgtaacttcaaactctaacgtggggataaaaatttacgacaaaaataataaggaaatcaaagtgaacggtggtgagttgccaacagacatgggtaaatcaacagtgtatggtgaaaaatcaggtagtgtaactttttcagctgctcctgcgagccttactggagctcgcccagccccggggcaatttactgcaacagcgacgataactgttgagattgtgcgctaa

SEQ ID NO: 484823 - DNA, 1569 bp, Shigella sonnei
gtgtgccacttcaacgtaaccatcaaagaagaagacggtagcgaacaacgattcacccaaccttatgcttcattagcgattcttaaacgtgaaggtcagacagatgttgatgtcagcgtgggtgaattgcgcgatgaagacggatttacaccggacgtccttcaggcgcaaatacttcatggtttttcccacgggatcactttatatggaggtatgcaggctgctgaaaattatggttctgcagctctgggtgtcggtaaagatcttggcgctttgggcgcaatttctttcgatgtgacacatgctcgtgcgaattttagccatgatgatacagaaacgggtcagtcatatcgctttctctattcaaaacgatttgacgacacagacactagcttgcgcttggttggctatcgttactccaccgagggctactataccctcaatgagtgggcatcgcggcgcaacagccctgaagacttttgggaaacaggtaaccgacgtagttgcgtggaggggacgctaacgcagtcgttggggagagattatggcaatttatacctgacattaagccggcaacaatactggcataccgatgatgtcgaacgattaatgcaatttggctacagcagtagctggaagcgtctctcgtggaacgtctcctggagttattccaatactgccagacaggggacggggaacaaccatgccagtgataacaccagtgagcagatctacatgctctctttatctgttcctttattgggctggtggggtaatagttacgccacctattctgtttcgcaaaacgataattccggtagctcacatcaactcggactcagcggtacggcgctggaaagaaataacctttcatggaatttaatgcagtcctataacagtcatgatgatgaggttggcggtaatatgtccctgacctatgatggctcttatggcacggtgaacggcagctataactacagccaaaattcccagaggctgaattatggtatcagagggggaattctggcacacagcgaaggggtaacgttaagtcaggagttaggtgaaactattgctcttgttaaagcacctggggccgccgggttagaaatagataatatgcgcggtgctgcgacggactggcgcggctatacggtcaagacacagctaaacccttatgatgaaaatcgggtagcaatcagcgataactatttctcgaagtcgaatatagaacttgataataccgtcgttacgatggttcccacgcgtggtgcagtggttaaagcggagtttgtgactcatgtgggttatcgcgttctcttcagagtgttaaatgcaaatggtaaaccggtaccttttggagccattgctgcgatacaagatgcaagtttggcagattcaggaattgtcggtgaccgtggcgaactttatctttctggtctaccagaaaaaggacaggttacgttatcctggggagaaaacgcctcaacaaaatgcatcttcaattattcactttcgacaccagaaagtgagagcggattaattgaacagggtgtgacatgtcattaa

SEQ ID NO: 484824 - DNA, 1050 bp, Shigella sonnei
atgacttacagtctggaagcagctgtcgtttttgccgatggccctgcagcaactgaaacactggcagcgctgggccagcaagggcaattttcaactgcagaagtacgtgataagcagcaaaatattctggcgtcctggcattacacccgtaaggatccaggcgatactttcagcaatttcataagccactggctcttccccgcccccatcattcagccgattcgtcacaatggtgaaaccattggcgaagtacgcttaaccgctcgcgacagttcaatcagccattttatctggttttcgctcgccgtactgaccggttgtattctgctggcatcaggcatcgcaattaccctcacccgccatttgcacaatggcctggtggaagcactgaaaaatatcaccgatgtcgtacatgatgtgcgttccaaccgcaatttttcccgacgagtttcggaagaacgtatcgctgagtttcaccgcttcgctctcgacttcaacagtctgctggatgaaatggaagagtggcagcttcgtttacaggctaaaaatgcgcagcttctacgtaccgcgctacatgacccattaaccgggctggctaaccgcgcagcgtttcgtagcggcatcaacacgttgatgaacaattccgatgcccgaaaaacgtcggcgttactatttcttgatggcgataatttcaaatacatcaatgatacctggggtcatgcgacgggcgatagagtcttgattgaaatcgcaaaacggttagctgaagttggcgggctgcgacataaagcataccgcctgggcggcgatgaattcgctatggtgctctatgatgtacagtcagaatctgaagtgcagcagatatgctcagcactgacacaaatctttaatctcccgtttgatcttcataatggccatcagaccaccatgacattaagcattggttacgcgatgaccattgagcacgcctctgcggaaaaattacaagagcttgccgatcacaatatgtatcaggccaaacaccagcgtgccgaaaagctggtgagataa

SEQ ID NO: 484825 - DNA, 483 bp, Shigella sonnei
atgataaagcacctagtagcacccctgattttcacctcactaatactgactggctgccagtcccctcagggaaagtttactcctgagcaagtcgccgctatgcaatcttatggatttactgaatccgccggcgactggtcgctgggcttatcagatgccattctgttcgcaaaaaatgactacaaattgctcccggaaagccagcaacagatccaaaccatggcagccaaattggcctcgacagggctaacacatgcccgtatggatggacacaccgataactatggtgaagacagttacaacgaaggcttatcattgaaacgggcgaatgtcgtggccgatgcatgggctattggtggacaaattccacgcagcaatctcaccacacagggtttaggaaaaaaatatcccatagccagtaacaagaccgcccagggccgcgccgagaaccgccgcgtcgcagtggtgattacaaccccttaa

SEQ ID NO: 484826 - DNA, 348 bp, Shigella sonnei
atgagcaatattattaagcaacttgaacaagagcagatgaagcaggacgtaccttccttccgtccgggtgataccgtggaagtgaaagtatgggttgttgaaggttccaaaaaacgtctgcaggcattcgagggcgtggttatcgctattcgtaaccgcggtctgcactctgcattcactgttcgtaaaatttccaacggcgaaggcgttgagcgtgtcttccagactcactctccggtagttgacagcatttctgtcaaacgtcgtggtgctgttcgtaaagctaaactgtactacctgcgtgagcgtactggtaaggctgctcgtatcaaagagcgtcttaactaa

SEQ ID NO: 484827 - DNA, 768 bp, Shigella sonnei
atgtggattggcataattagcctgtttcctgaaatgttccgcgcaattaccgattacggggtaactggccgggcagttaaaaatggcctgctgagcatccagagttggagtcctcgcgacttcacgcatgaccggcaccgtaccgtggacgatcgtccttacggtggcggaccggggatgttaatgatggtgcaacccttgcgggacgccattcatgcagcaaaagccgcggcgggtgaaggcgcaaaggtgatttatctgtcaccacagggacgcaagcttgatcaagcgggcgtcagcgaactggcaacgaatcaaaaattgattctggtgtgcggtcgctacgaaggtatagatgagcgcgtgatccaaaccgaaattgacgaagaatggtcaatcggcgattacgttctcagtggtggtgagttaccagcaatgacgctgattgactccgtttcccggtttattccgggagtactgggacatgaagcctcggcaacggaagattcctttgctgaaggattgctggattgcccgcactatacgcggcctgaggtgttagaagggatggaagttccgccagtgttactgtcgggcaaccatgccgagatacgtcgctggcgtttgaaacagtcgctgggccgtacctggcttagaagacctgaacttctggaaaacctggctctgactgaagagcaagcaaggttgctggcggagttcaaaacggaacacgcacaacagcaacataaacatgatgggatggcgtaa

SEQ ID NO: 484828 - DNA, 549 bp, Shigella sonnei
atgagcaaacaactcaccgcgcaagcacctgttgatcccatcgttttgggaaaaatgggttcgtcttacggtattcgtgggtggctcagagtgttttcttccaccgaagacgccgaaagcatttttgactatcagccttggtttatccagaaggcgggtcagtggcagcaagtccagctggaaagctggaagcaccacaatcaggacatgatcatcaagctgaaaggcgttgacgatcgtgatgcggcgaacctgctgacgaattgtgaaattgtcgtggattcatcgcagctgcctcagcttgaagagggggactactactggaaagacctgatgggctgccaggtagtaaccactgaaggctacgatctcggtaaagtcgtcgatatgatggaaaccggatctaatgacgttctcgtcattaaggcaaacctgaaagatgcgtttggtatcaaggaacgtctcgtaccgttcctcgatgggcaggttatcaagaaagtcgatctcactactcgttcaatcgaagtagattgggatcctggtttttaa

SEQ ID NO: 484829 - DNA, 249 bp, Shigella sonnei; identical to SEQ ID NO: 4203

SEQ ID NO: 484830 - DNA, 1362 bp, Shigella sonnei
atgtttgataatttaaccgatcgtttgtcgcgcacgctgcgcaatatcagtggccgtggacgcctcactgaagacaacgtaaaagatacgctgcgcgaagtgcgcatggcgctgctggaggcggatgtcgctctgccggtagtgcgtgagtttatcaatcgcgtaaaagagaaagcggttggtcatgaagttaataagagcctgacgccggggcaggagttcgtcaaaatcgtccgtaacgaactggttgcggcgatgggcgaagagaaccagaccctgaacctggcggcgcaaccgcctgcggtcgtgctgatggcgggcctgcaaggtgccggtaaaacaaccagcgttggtaaactcggtaagttcctgcgcgagaagcacaagaagaaagtgctggtggtttctgccgacgtttatcgcccggcggcaatcaaacagcttgagacgctggcagagcaggtgggcgttgatttcttcccttctgatgttggtcagaagccggtagatatcgttaacgcggcgctgaaagaagccaaactgaaattctacgacgtgctgctggtggataccgctggtcgtctgcacgttgacgaagcgatgatggacgagatcaaacaagtccatgcgtcgattaacccggttgaaaccctgtttgtggttgacgccatgaccggtcaggatgcggccaatacggcaaaagcattcaatgaagcgttaccgcttaccggcgtagtgttgaccaaagtggacggcgatgcccgcggcggtgcggcgctctctattcgtcacatcactggcaaaccgatcaagtttctcggtgttggcgagaaaactgaggcgctggagccgttccatccggaccgcatcgcgtcgcgtattctcggcatgggcgacgtactgtcgctgatcgaagatatcgaaagcaaagttgaccgcgcgcaggcagagaaattagccagcaagctgaaaaaaggcgacggcttcgatctcaacgattttcttgagcagctgcgccagatgaaaaatatgggcggcatggctagcctgatgggcaagctgccgggcatggggcagatcccggataatgttaagtcgcagatggacgataaagtgctggtgcgtatggaagccatcatcaactcgatgacgatgaaagagcgcgctaagccagaaatcatcaaaggttcgcgtaagcgtcgtatcgctgccggttgcggtatgcaggtgcaggacgttaaccgccttctgaagcagttcgacgacatgcagcgcatgatgaagaaaatgaagaagggcggaatggcgaagatgatgagaagcatgaagggtatgatgcccccaggcttccctggtcgctaa

SEQ ID NO: 484831 - DNA, 867 bp, Shigella sonnei
atgcaacggttggagcagcgttcacctgacgctatactgcttctctttcttattgctcaaactgtcgacatcactatgcccgtttttgctctgctcgcgcttgtcgcctactccgtcagtcttgcgctgattgttcccggtctgctgcaaaaaaacggcggctggcggcgcatggctattatttctgcggtcattgcgctggtctgccacgcaatcgctctggaagcccgcatcctgcccgacggtgatagcggacaaaacctcagcctgctgaacgttggttcattggtcagtttgatgatctgtacggtaatgaccattgtggcttctcgcaatcgtggctggttgctgctacccattgtctatgcctttgcgcttatcaacctggcgctggcgaccttcatgcccaatgaatacatcacccatctggaagcaacgcctgggatgctggtgcacattggcttatcgctcttttcctatgccacgctaattatcgccgccctgtacgcgctgcaactggcgtggattgattaccaactgaagaacaagaagctggcatttaaccaggaaatgccgccattgatgagtatcgagcgtaaaatgttccacatcacgcagattggcgtggtgctgctaacgctcacgctttgcactggcctgttctacatgcacaacctatttagcatggaaaatatcgacaaggctgtgctctctatcgtggcgtggtttgtctatattgtgctgctgtggggacattaccatgaaggatggcgtggacgccgcgtcgtctggtttaacgttgcgggcgcggtaattctgacactggcctacttcggcagccgaattgtccagcagttaatcagctaa

SEQ ID NO: 484832 - DNA, 1242 bp, Shigella sonnei
atggtggtcatttcagcctatttttccgggtccgaaaccggaatgatgaccctcaaccgctatcgtctgcgacatatggcgaaacagggtaatcgctcggccaaacgcgtcgaaaaattgctgcgtaagccagaccgcctgataagcctggtgttaatcggcaataacctggtcaatattcttgcctccgcgctcggcactattgttgggatgcgtttgtacggcgatgcgggcgtggcaattgcgactggtgtgctgacttttgtcgtactggtatttgctgaggtattgccgaaaaccattgccgcgctgtacccggaaaaagtcgcttatccgagtagttttctgctggctccgctgcaaattttgatgatgccgctggtctggttgctgaatgctatcacccgtatgctgatgcgcatgatgggtatcaaaaccgatatcgtggttagcggctctttgagcaaagaagagttgcgcactatcgtgcacgaatcacgctcacaaatttcccgtcgcaatcaggatatgctgctgtcggtgctcgatctggaaaaaatgaccgttgatgacatcatggtgccgcgcagtgaaattatcggtattgatatcaacgatgactggaaatcgattctgcgccaactctcccactcacctcacgggcgcatcgtgctctaccgtgattcgctggacgacgccatcagtatgctgcgagtacgtgaagcctggcggttgatgtcggagaaaaaagagttcaccaaagaaaccatgctgcgcgccgcggacgagatctattttgtgccggaaggtacgccgctcagcacgcagttggtaaagtttcagcgcaacaaaaagaaagtcggcctggtcgtcaacgagtatggagacattcaggggctggtgacggttgaagatattctggaagagattgtcggcgatttcactacgtcgatgtcgccaacacttgccgaagaggtcacgccgcaaaacgacggttcggtgattatcgatggcaccgccaacgtgcgggaaatcaacaaagcctttaactggcatctaccggaagatgatgcccgcacggttaatggcgtcattcttgaggcactggaagagatccctgtcgcaggcacccgcgtgcgtattggcgagtacgatatagatattctcgacgtacaggacaatatgattaagcaggtaaaagtttttcctgtgaaaccgctgcgcgagagtgtggcggagtaa

SEQ ID NO: 484833 - DNA, 594 bp, Shigella sonnei; identical to SEQ ID NO: 459739

SEQ ID NO: 484834 - DNA, 879 bp, Shigella sonnei
atgaataatcatttcaagtgtattggcattgtgggacacccacggcaccccactgcactgacaacacatgaaatgctctaccgctggctgtgcacaaaaggttacgaggtcatcgttgagcaacaaatcgctcacgaactgcaactgaagaatgtgaaaactggcacgctcgcggagattgggcaactagctgatctcgcggtagtcgttggtggcgacggtaatatgctgggcgcggcacgcacactcgcccgttacgatattaaagttattggaatcaaccgtggcaacctgggtttcctgactgaccttgaccccgataacgcccagcaacagttagccgatgtgctggaaggccactacatcagcgagaaacgttttttgctggaagcgcaagtctgtcagcaagattgccagaaacgcatcagcaccgcgataaatgaagtggtgcttcatccaggcaaagtggcgcatatgattgagttcgaagtgtatatcgacgagatctttgcgttttctcagcgatctgatggactaattatttcgacgccaacaggctccaccgcctattccctctctgcaggcggtcctattctgaccccctctctggatgcgattaccctggtgcccatgttcccgcatacgttgtcagcacgaccactggtcataaacagcagcagcacgatccgtctgcgtttttcgcatcgccgtaacgacctggaaatcagttgcgacagccagatagcactgccgattcaggaaggtgaagatgtcctgattcgtcgctgtgattaccatctgaatctgattcatccgaaagattacagttatttcaacacattaagcaccaagctcggctggtcaaaaaaattattctaa

SEQ ID NO: 484835 - DNA, 1662 bp, Shigella sonnei
atgttggcacaactgaccatcagcaactttgctatcgttcgtgagcttgagattgattttcatagcggcatgaccgtaataactggcgagaccggcgcgggtaaatctattgcaatagatgccctcggtctttgtctcggtggtcgcgctgaagccgacatggtgcgtaccggcgctgctcgcgctgacctgtgcgcccgtttttctctgaaagatacgccagcggctctgcgctggctggaagaaaaccagcttgaagacgggcatgaatgtttgcttcgtcgcgtgatcagcagcgatggtcgctcccgtggtttcatcaacggtacagctgttcctctgtcacaactgcgcgaactgggtcagttgctgattcagatccatggtcagcacgctcatcaattactcaccaaacctgagcaccaaaaattcctgcttgatggctatgccaatgaaacctctctactgcaggaaatgaccgcacgttatcagttgtggcatcaaagctgccgtgacctcgcgcatcatcaacagttaagtcaggaacgcgccgcccgtgcggaactgctgcaataccaattaaaagaacttaacgaatttaatccgcagcccggagagtttgaacaaatcgacgaagagtacaaacgtctggcgaacagcggtcaattgctgaccaccagccagaatgcattggcattaatggccgacggtgaagacgcaaacctgcaaagtcagctttacacggctaaacaactggtgagcgaattgattggcatggacagcaaactgtccggcgtacttgatatgctggaagaagctaccatccagattgctgaagccagcgatgaactgcgccactactgcgatcgtctggatctcgatcccaaccgactatttgaacttgaacagcgcatctcaaaacagatttcgctggcacgtaaacatcacgtcagccctgaggcattgccacagtattaccagtcgctactggaagaacagcagcaactggacgatcaggccgactcacaagaaacgcttgcgctggcggtaacgaaacatcatcagcaggcactggaaatcgcgcgcgcattacaccaacaacgccagcaatatgcagaagaacttgcacagctgatcaccgacagtatgcatgcgctctcaatgccgcatgggcagtttacgatcgatgttaaatttgacgagcatcacctgggcgctgacggtgccgatcgtattgagtttcgggtaaccaccaacccaggtcagccaatgcagcctattgccaaagtcgcatccggtggtgaattgtcccgcatcgcactggcaatccaggtcatcacggcgcgtaaaatggaaaccccggcactgatttttgatgaagtggatgtagggattagcggtccaacagcggcagttgtcggcaaactgctgcgtcaactcggcgaatcaactcaggtgatgtgtgttacccacctgccacaagtcgcgggatgtggtcatcaacactattttgtcagcaaagaaaccgatggtgcgatgacagaaacgcatatgcaatccctgaataaaaaagcgcggttacaagagctggcgcgcctgcttggtggcagtgaagtcacacgtaatacactagcgaatgcgaaagaactgcttgcagcgtaa

SEQ ID NO: 484836 - DNA, 342 bp, Shigella sonnei
atgcgctgtaaaacgctgactgctgcagcagcagtactattgatgttgaccgcaggctgttccactctggagcgagtggtttaccgtcctgacatcaaccaggggaactatctgaccgctaacgacgtatccaaaatacgtgttggcatgacgcaacaacaagttgcgtacgcattgggtacaccgctgatgtccgatccatttggtacgaatacctggttctatgtcttccgccagcaaccaggtcatgaaggtgtaacgcagcaaacgctgacgctgacctttaacagtagcggtgtgttgaccaatattgataacaaacctgcgctgagtggtaactaa

SEQ ID NO: 484837 - DNA, 282 bp, Shigella sonnei
atggcaaaaacagcagcagcactgcatatccttgtaaaagaagagaaactggctctggatcttctcgagcagattaagaacggtgccgatttcggcaagctggcgaagaaacactccatttgcccatcaggcaaacgcggcggtgatttaggtgaattccgccagggtcagatggttccggcgtttgataaagttgtgttctcttgtccggtactggagccaaccggcccgctgcacacccagttcggttaccacatcattaaggtgctgtaccgtaactaa

SEQ ID NO: 484838 - DNA, 1476 bp, Shigella sonnei
atggctaactacttcaatacactgaacctgcgccagcagctggcacagctgggcaaatgtcgctttatggggcgcgacgaattcgccgacggcgcgagctaccttcagggtaaaaaagtggttatcgtcggctgtggcgcacaggggctgaaccagggcctgaacatgcgtgattctggtctcgatatctcctacgctctgcgtaaagaagcgattgccgagaagcgcgcgtcctggcgtaaagcgaccgaaaacggttttaaagttggtacttacgaagaactgatcccgcaggcggatctggtggttaacctgacgccagacaagcagcactctgatgtagtgcgcaccgtacagccactgatgaaagacggcgcggcgctgggttactcgcacggtttcaacatcgtcgaagtgggcgagcagatccgtaaagacattaccgtagtcatggttgcgccgaaatgccctggcaccgaagtacgtgaagagtacaaacgtggattcggcgtaccgacgctgattgccgttcacccggaaaacgatccgaaaggcgaaggcatggcgatcgctaaagcatgggcggcagcaaccggtggtcaccgtgcgggcgtgctggaatcgtccttcgttgcggaagtgaaatctgacctgatgggtgagcaaaccatcctgtgcggtatgttgcaggctggctctctgctgtgcttcgacaagctggtggaagagggcaccgatccggcatacgcagaaaaactaattcagttcggttgggaaaccatcaccgaagcgctgaagcagggcggcatcaccctgatgatggaccgtctctctaacccggcgaaactgcgtgcttacgcgctgtctgaacagctgaaagagatcatggcacccctgttccagaaacatatggacgacatcatctccggcgaattctcctccggtatgatggcggactgggccaacgatgataagaaactgctgacctggcgtgaagagaccggcaaaaccgccttcgaaaccgcgccgcagtatgaaggcaaaatcggcgagcaggagtacttcgataaaggcgtactgatgatcgcgatggtgaaagcgggcgttgagctggcgtttgaaaccatggttgattccggcatcatcgaagaatctgcttactatgaatcactgcacgaactgccgctgattgccaacaccatcgcccgtaagcgtctgtacgaaatgaacgtggttatctctgataccgccgagtacggtaactatctgttctcttacgcttgtgtgccgctgctgaaaccgtttatggcagagctgcaaccgggcgatctgggtaaagctattccggaaggtgcggtagataacgcgcaactgcgtgatgtgaacgaagcgattcgctgccatgcgattgagcaggtaggtaagaaactgcgcggctatatgacggatatgaaacgtattgcagttgcgggttaa

SEQ ID NO: 484839 - DNA, 894 bp, Shigella sonnei
ttggatttacgcgatctgaaaaccttcctgcatctggcggaaagccgccattttggccgcagcgcgcgggcgatgcacgttagcccatccacgctctcacggcagattcagcgcctggaagaagatcttggtcagccgctatttgtgcgcgataaccgcacggtaacgctgacggaagcgggcgaagagctgcgcgttttcgcccagcaaacgctgttgcagtatcagcaattgcgccacaccatcgatcagcaagggccgtcgctctctggcgaattacatatcttctgctcggtgaccgctgcctacagccatctgccgccgattctggatcgcttccgcgcggaacacccgtcggtggagatcaaactcaccactggtgatgcggcagatgcaatggaaaaagtggtcacgggagaagcggatctggcgattgccgggaaaccggagacgctacccggcgctgtggcgttttcgatgctggagaatctggcagtagtgctgattgcccccgcgctgccctgcccggtgcgtaatcaggtatctgtcgaaaagcccgactggtcaacggtgccgtttattatggccgatcaggggccggtacgccgccgcattgaactgtggtttcgacgcaataaaatcagcaacccgatgatttacgccacggttggcgggcatgaagcgatggtatcgatggtggcgctcggctgtggtgtggcgctgttgccggaagtggtgctggaaaacagcccggagcctgtacgcaaccgggtaatgattttagatcgcagcgatgagaaaacgccgtttgaactgggcgtgtgtgcacaaaaaaagcggctgcatgagccgctgattgaggcgttctggaggattttgccgaaccacaaatga

SEQ ID NO: 484840 - DNA, 1545 bp, Shigella sonnei
atggctgactcgcaacccctgtccggtgctccggaaggtgccgaatatttaagagcagtgctgcgcgcgccggtttacgaggcggcgcaggttacgccgctacaaaaaatggaaaaactgtcgtcgcgtcttgataacgtcattctggtgaagcgcgaagatcgccagccagtgcacagctttaagctgcgcggcgcatacgccatgatggcgggcctgacggaagaacaaaaagcgcacggcgtgatcactgcttctgcgggtaaccacgcgcagggcgtcgcgttttcttctgcgcggttaggcgtgaaggccctgatcgttatgccaaccgccaccgccgacatcaaagtcgatgcggtacgtggattcggcggcgaagtgctgcttcatggcgcgaactttgacgaagcgaaagctaaagcgatcgaactgtcacagcagcaggggttcacctgggtgccgccgttcgaccatccgatggtgattgccgggcaaggcacgctggcgctggaactgctccagcaggacgcccatctcgaccgcgtatttgtgccagtcggcggcggcggtctggcggcgggcgttgcggtgctgatcaaacaactgatgccacaaatcaaagtgatcgccgtagaagcggaagactccgcctgcctgaaagcagcgctggatgcgggtcatccggttgatctgccgcgcgtgggactgttcgccgaaggtgtcgcggtaaaacgcatcggcgacgaaaccttccgtttatgccaggagtatctcgacgacatcatcaccgtcgatagtgatgcgatctgtgcggcgatgaaggatttattcgaagatgtgcgcgcagtggcggaaccctctggcgcgttggcgctggcgggaatgaaaaaatatatcgctcagcacaacattcgcggcgaacgcctggcgcatattctttccggtgccaacgtgaacttccacggcctgcgctacgtctcggaacgctgcgaactgggcgaacagcgtgaagcgttgttggcggtgaccattccggaagaaaaaggcagcttcctcaaattctgccaactgcttggcgggcgatcggtcaccgagttcaactaccgttttgccgatgccaaaaacgcctgcatctttgtcggcgtgcgcctgagccgcggcctcgaagagcgcaaagaaattttgcagatgctcaacgacggcggctacagcgtggtggatctctccgacgacgaaatggcgaagttgcatgtgcgctatatggtcggcgggcgtccgtcacatccgttgcaggaacgcctctacagcttcgaattcccggaatcaccgggcgcgctgctgcgcttcctcaacacgctgggtacgcactggaacatttctttgttccactatcgcagccatggcaccgactacgggcgcgtactggcggcgttcgaactcggcgaccatgaaccggatttcgaaacccggctaaatgagctgggctacgattgccacgacgaaaccaataatccggcgttcaggttctttttggcgggttag

SEQ ID NO: 484841 - DNA, 1851 bp, Shigella sonnei
atgcctaagtaccgttccgccaccaccactcatggtcgtaatatggcgggtgctcgtgcgctgtggcgcgccaccggaatgaccgatgccgattttggcaagccgattatcgcggttgtgaactcgttcacccaatttgtaccgggtcacgtccatctgcgcgatctcggtaaactggtcgccgaacaaattgaagcggctggcggcgttgccaaagagttcaacaccattgcggtggatgatgggattgctatgggccacggggggatgctttattcactgccatctcgcgaactgatcgctgattccgttgagtatatggtcaacgcccactgcgccgacgccatggtctgcatctctaactgcgacaaaatcaccccggggatgctgatggcttccctgcgcctgaatattccggtgatctttgtttccggcggcccgatggaagccgggaaaaccaaactgtccgagcagatcatcaagctcgatctggttgatgcgatgatccagggcgcagacccgaaagtttctgactcccagagcgatcaggttgaacgttccgcctgcccaacctgcggttcctgctccgggatgtttaccgctaactcaatgaactgcctgaccgaagcgctgggtttgtcgcagccaggcaacggctcgctgctggcaacccacgcggaccgtaagcagttgttcctcaatgccggtaaacgcattgttgaattgaccaaacgttactacgagcaaaacgacgaaagtgcactgccgcgcaatattgctagcaaagcggcgtttgaaaatgccatgacgctggatatcgcgatgggcggctctaccaacacggtacttcacctgctggcggcggcgcaggaagcggaaatcgacttcaccatgagtgatatcgacaaactttcgcgtaaagtcccgcagttatgcaaagttgcgccgagcacccaaaaataccatatggaagatgttcaccgtgctggtggtgttatcggtattctcggtgaactggatcgcgcggggttactgaaccgtgatgtgaaaaacgtacttggcctgacgttgccgcaaactctggaacaatacgacgttatgctgacccaggatgacgcggtaaaaaatatgttccgcgcaggccctgcgggcattcgtactacacaggcattctcgcaggattgccgttgggattctctcgatgacgatcgcgcaaacggctgtatccgctcgctggaacacgcctacagcaaagacggcggcctggcggtgctctacggtaattttgctgaaaacggctgcatcgtgaaaacagcgggcgtcgatgacagcatcctcaaattcaccggcccggcgaaagtgtacgaaagccaggacgacgcggtagaagcgatcctcggtggcaaagttgtcgcgggcgatgtggtggtgatccgctatgaaggcccgaaaggcggccctggcatgcaggaaatgctctacccaaccagcttcctgaaatcaatgggtctcggtaaagcctgtgcgctgatcaccgacggtcgtttctctggcggcacctctggtctttccatcggccacgtctcaccggaagcggcaagcggcggcagcattggtctgattgaagatggtgacctgatcgctatcgacatcccgaaccgtggcattcagttacaggtaagcgatgccgaactggcggcgcgtcgtgaagcgcaggaagctcggggtgacaaagcctggacgccgaaaaaccgtgaacgtcaggtttcctttgccctgcgcgcctacgccagcctggcaaccagcgccgacaaaggtgcggtgcgcgataaatcgaaactggggggttaa

SEQ ID NO: 484842 - DNA, 930 bp, Shigella sonnei
atgaccacgaagaaagctgattacatttggttcaatggggagatggttcgctgggaagacgcgaaggtgcatgtgatgtcgcacgcgctgcactatggcacttcggtttttgaaggcatccgttgctacgactcgcacaaaggaccggttgtattccgccatcgtgagcatatgcagcgtctgcatgactccgccaaaatctatcgcttcccggtttcgcagagcattgatgagctgatggaagcttgtcgtgacgtgatccgcaaaaataatctcaccagcgcctatatccgtccgctgatcttcgtcggtgatgttggcatgggagtaaacccgccagcgggatactcaaccgacgtgattatcgctgctttcccgtggggagcgtatctgggcgcagaagcgctggagcaggggatcgatgcgatggtttcctcctggaaccgcgcagcaccaaacaccatcccgacggcggcaaaagccggtggtaactacctctcttccctgctggtgggtagcgaagcgcgccgccacggttatcaggaaggtatcgcgctggatgtgaacggttacatctctgaaggcgcaggtgaaaacctgtttgaagtgaaagacggcgtgctgttcaccccaccgtttacctcatccgcgctgccgggtattacccgtgatgccatcatcaaactggcgaaagagctgggaattgaagtgcgtgagcaggtgctgtcgcgcgaatccctgtacctggcggatgaagtgtttatgtccggtacggcggcagaaatcacgccagtgcgcagtgtagacggtattcaggtgggtgaaggccgttgcggcccggttaccaaatgcattcagcaagccttcttcggcctcttcactggcgaaaccgaagataaatggggctggttagatcaagttaatcaataa

SEQ ID NO: 484843 - DNA, 264 bp, Shigella sonnei
atgatgcaacatcaggtcaatgtatcggctcgcttcaatccagaaaccttagaacgtgttttacgcgtggtgcgtcatcgtggtttccacgtctgctcaatgaatatggccgccgccagcgatgcacaaaatataaatatcgaattgaccgttgccagcccacggtcggtcgacttactgtttagtcagttaaataaactggtggacgtcgcacacgttgccatctgccagagcacaaccacatcacaacaaatccgcgcctga

SEQ ID NO: 484844 - DNA, 1647 bp, Shigella sonnei
atgaatggcgcacagtgggtggtacatgcgttgcgggcacagggtgtgaacaccgttttcggttatccgggtggcgcaattatgccggtttacgatgcattgtatgacggcggcgtggagcacttgctatgccgacatgagcagggtgcggcaatggcggctatcggttatgcccgtgctaccggcaaaactggcgtatgtatcgccacgtctggtccgggcgcaaccaacctgataaccgggcttgcggacgcactgttagattccatccctgttgttgccatcaccggtcaagtgtccgcaccgtttatcggcactgacgcatttcaggaagtggatgtcctaggattgtcgttagcctgtaccaagcacagctttctggtgcagtcgctggaagagttgccgcgcatcatggctgaagcattcgacgttgcctgctcaggtcgtcctggtccggttctggtcgatatcccaaaagatatccagttagccagcggtgacctggaaccgtggttcaccaccgttgaaaacgaagtgactttcccacatgccgaagttgagcaagcgcgccagatgctggcaaaagcgcaaaaaccgatgctgtacgttggcggtggcgtgggtatggcgcaggcagttccggctttgcgtgaatttctcgctgccacaaaaatgcctgccacctgtacgctgaaagggctgggcgcagtagaagcagattatccgtactatctgggcatgctggggatgcacggcatcaaagcggcaaacttcgcggtgcaggagtgtgacctgctgatcgccgtgggcgcacgttttgatgaccgggtgaccggcaaactgaatactttcgcaccacacgccagtgttatccatatggatatcgacccggcagaaatgaacaagctgcgtcaggcacatgtggcattacagggtgatttaaatgctctgttaccagcattacagcagccgttaaatatcaatgactggcagcaatactgcgcgcagctgcgtgatgaacattcctggcgttacgaccatcccggtgacgctatctacgcgccgttgttgttaaaacaactgtcggatcgtaaacctgcggattgcgtcgtgaccacagatgtggggcagcaccagatgtgggctgcgcagcacatcgcccacactcgcccggaaaatttcatcacctccagcggcttaggtaccatgggttttggtttaccggcggcggttggcgcacaagtcgcgcgaccgaacgataccgttgtctgtatctccggtgacggctctttcatgatgaatgtgcaagagctgggcaccgtaaaacgcaagcagttaccgttgaaaatcgtcttactcgataaccaacggttagggatggttcgacaatggcagcaactgttttttcaggaacgatacagcgaaaccacccttactgataaccccgatttcctcatgttagccagcgccttcggcatccctggccaacacatcacccgtaaagaccaggttgaagcggcactcgacaccatgctgaacagtgatgggccatacctgcttcatgtctcaatcgacgaacttgagaacgtctggccgctggtgccgcctggcgccagtaattcagaaatgttggagaaattatcatga

SEQ ID NO: 484845 - DNA, 915 bp, Shigella sonnei
atgtcactgtcaattgttcatacccgcgcagccctgggagtaaatgcgcccccgatcactgttgaggtacatatcagtaaaggtctacccggcttaacgatggtgggcttaccagaaacaactgtaaaagaagctcgcgatcgcgtgcgcagcgccattatcaatagcggatatgaatatccggcgaaaaaaatcaccatcaaccttgctccagccgatctgccaaaagaagggggacgatatgatttacctatcgccattgcgttgctggcggcctcagaacagcttacagccaataagttagatgaatatgaattagtcggagaactggctcttacaggcgctctgcgtggcgttcccggtgcaatctccagtgcaactgaagctattaagtcgggcagaaaaattatcgtcgcgaaagataacgaagatgaagtggggctaattaacggtgaaggatgcctgatagccgatcatctgcaagctgtctgtgcgtttctggaaggtaagcacgctctcgaacgcccgaaaccaactgatgcagtatcccgggcgctacaacatgatctcagtgatgttgtcggtcaggaacaaggaaagcgaggactggaaattaccgccgctggcaggcacaaccttttactgattgggccgccgggaacaggtaaaacaatgctcgccagccgtattaatggcctgttgccagatttaagcaatgaagaggcactggagagcgctgcgatattaagtctggtaaatgctgaatcagtacaaaaacaatggcggcagcgcccgttccgctcacctcatcacagtgcgtcgttaactgcgatggtgggcggtggtgcaattccagggccaggtgaaatttcgttggcgcataacggcgtgctggtaatgactccaacttattga

SEQ ID NO: 484846 - DNA, 714 bp, Shigella sonnei
gtgaaaattgaattaacggtgaatgggctgaacgtgcaagcgcagtaccatgatgaagagatagaacgcgtgcataaaccgttgctgcgtatgctggcggccttacagacggtaaatccgcagcggcgtacggtggtttttctttgcgctccgccggggacgggtaaatctaccctaaccaccttctgggaatatctcgtgcaacaagacccggagctgcccgctattcagacgctcccgatggatggttttcaccattacaatagctggctggacgcgcatcaattgcgccccttcaaaggcgcaccagagacatttgacgttgcgaaactggcggaaaatctgcgccaggtggtggaaggggattgtacgtggccgcagtacgatcgacaaaagcatgatcctgttgaagatgcgttgcacgttaccgcaccactcgtcatcgtcgaaggaaactggttgttgctggacgacgagaagtggtgccagcttgcgcaattttgtgatttctcgatctttatcaacgcgccagctactgcgttgcgggagcgtctggtggggcgcaagctggcgggaggggtatcgctggcagatgcagaagccttttatgaccgtaccgacgggccgaatgttcgccgggtgctggaagagagtctgcctgcaaatttgaccttaatgatgaccgctacgggtgaatatcgtctggtggattaa

SEQ ID NO: 484847 - DNA, 678 bp, Shigella sonnei
atgttaacgttaaatcagatatcttatcgctggcctagcgcagcaacggattgtctttgcgacatttctctgcaactcaaacaaggtgaatggttggcgctgaccggcgacaatggcgcgggaaaatcgacgctgttacgagtaatggcaggtcttcttacgcccacagccggtacggttatgctgcaacaacaggcgatgaaaaacctgaaaaaccgccagcgcgcggcaaaggttggcgtactgtttcaggaagcggaaaaccaactttttcacagcaccgtcgctgacgagatcgcatttggtttgaaactgcaaaaatgcccggcggatgaaatcactcaacgtacccatgctgccctgcaatgttgtcagttagcagacactgccaactcgcacccgttggatctgcatagtgcgcagcgacggatggtcgccgtcgcctgcctggaagcactctctccgccactattactgctggacgagccgagtcgggattttgacgaaaattggttgagcgtgtttgaaagctggctggagaagtgccgccagcgaggcacgagcgtggtagcaatcagtcatgacgccgcatttacccggcgtcatttctctcgtgtggtgcgactggaagatggtgtaatcaggaacgttaatccaccagacgatattcacccgtag

SEQ ID NO: 484848 - DNA, 678 bp, Shigella sonnei
atggttacgttagaacagttccgttattgcccgacacactcaacgcatcctccgttctgttatgactttcactatgtcaaaccggggatggtcgccatctttggtgacaacggcagtggcaaaagtacgctggcacagctgatggcgggctggtatccggactttctgccaggagagataacaggcacggggacgctcctcggtacgcccattgggcatctcccgcttaatgaacaatccgccaccatccagctcgtccagcaatcgccctatttgcagctctccggctgtacctttagcgtggaagaagaagttgcctttgggccagaaaatctgtgtcttgctgaaacagagattatggcgcggattgatgccgccctgactctgaccgagtgccagccgttgcgccatcgtcacccggcaacactctccggtggagagacacaacgcgtggtcatcgcctgcgccatcgcgatgcagccaaagctcttaattcttgatgaagcctttagtcgcctgacgccgcaggccagcgaaatgctgttgcagcgcttacaacactgggcgcttgaacgtggttcgctgattattctttttgaacgtcatcgcacacctttcctgaactactgccagcaagcgtggcaattgcaaaacggagcgctccagccactatgttaa

SEQ ID NO: 484849 - DNA, 708 bp, Shigella sonnei
atgcatccatttacctcattaacactgtgggcattggcggcctgcaccacgcttatcctgcccgcgcagaccattttgccgatctatagcgcggcgacctttttttgtcttattgcgctaaaggccacgcggcggcgggcaaaatatgtcgcctggctgatgttctcgctgggagccgggctgtggctggtacacggtggctggctaacagaatggctaagcggcacgccgcgttcgccggagcgttggacgcatgctattacgctctggttgcggattctggcgattgtttcaacctcacagttgtggatgcagtacgtccccgtgcaatgttttatccgcgctctgtttgcttctcgcctgccgccaggcgtcgcttatctgtttgccggaccgttattggtcgttgagcagttaaaacggcaattagcgattattcatgaagcgcagcgtgcccgcggcgtgccgctggatgagggctggtatcagcgtttacgtgcgatgcccgcgttaattattctgctaacacacaatgcgcttaacgatctggctgtccgtggtgcggcgctggatatgcgggcatttcggatccacaaccgacgaacaacgttgtgggcaccagccgatagcaccctacaacgcgtagcgcgttacaccatgatcttgctgatgctaacagaattcggagcgtggatatggttacgttag

SEQ ID NO: 484850 - DNA, 579 bp, Shigella sonnei; identical to SEQ ID NO: 460200

SEQ ID NO: 484851 - DNA, 432 bp, Shigella sonnei
atgatgacattgccctacccatattcttcccccgcacgcttttatgcactgcgcctcctccccgggcaggaagttttttcccagctacacgcttttgcacagcagcatcaacttcatgccgcctggattgcaggctgtaccggtagcctgactgacgtcgccttgcgctatgccgggcaagaaggcaccacgctccttaacggtacattcgaagtgatctcactaaacggcacgctggaacagagtggtgagcatcttcatctctgcgtttccgatccacacggcacgatgcttggcggtcatatgatgcccggctgtaccgtgcggaccacgcttgaactggtgatcggtagccttgaggaactggcgtttagccgccaaccttgcgcgctttctggttacgacgagttgcatatttcccccgttaaataa

SEQ ID NO: 484852 - DNA, 1020 bp, Shigella sonnei; identical to SEQ ID NO: 460198

SEQ ID NO: 484853 - DNA, 1164 bp, Shigella sonnei
atgtctgtaattaagatgaccgatctggatcttgctgggaaacgtgtatttatccgtgcggatctgaacgtaccagtaaaagacgggaaagtaaccagcgacgcgcgtatccgtgcttctctgccgaccatcgaactggccctgaaacaaggcgcgaaagtgatggtaacttcccacctgggtcgtcctaccgaaggcgagtacaacgaagaattctctctgctgccggttgttaactacctgaaagacaaactgtctaacccggttcgtctggttaaagattacctcgacggcgttgacgttgctgaaggtgaactggttgttctggaaaacgttcgcttcaacaaaggcgagaagaaagacgacgaaaccctgtccaaaaaatacgctgcactgtgtgacgtgttcgtaatggacgcattcggtactgctcaccgcgcgcaggcttctactcacggtatcggtaaattcgctgatgttgcgtgcgcaggcccgctgttggcagctgaactggacgcgctgggtaaagcactgaaagaacctgctcgcccgatggtggctatcgttggtggttctaaagtatctaccaaactgaccgttctggactccctgtctaaaatcgctgaccagctgattgttggtggtggtatcgctaacacctttatcgcggcacaaggccacgatgtgggtaaatccctgtacgaagctgacctggttgacgaagctaaacgtctgctgaccacctgcaacatcccggttccgtctgatgttcgcgtagcaaccgagttctctgaaactgcatcggctaccctgaaatctgttaacgatgtgaaagctgacgagcagatcctggatatcggtgatgcttccgctcaggaactggctgaaatcctgaagaatgcgaaaaccattctgtggaacggtccggttggcgtgttcgaattcccgaacttccgcaaaggtactgaaatcgtggctaacgctatcgcagacagcgaagcgttctccatcgctggcggcggcgacactctggcagcaatcgacctgttcggcattgctgacaaaatctcctacatctccactggcggcggcgcattcctcgaattcgtggaaggtaaagtactgcctgcagtagcgatgctcgaagagcgcgctaagaagtaa

SEQ ID NO: 484854 - DNA, 1080 bp, Shigella sonnei
atgtctaagatttttgatttcgtaaaacctggcgtaatcactggtgatgacgtacagaaagttttccaggtagcaaaagaaaacaacttcgcactgccagcagtaaactgcgtcggtactgactccatcaacgccgtactggaaaccgctgctaaagttaaagcgccggttatcgttcagttctccaacggtggtgcttcctttatcgctggtaaaggcgtgaaatctgacgttccgcagggtgctgctatcctgggcgcgatctctggtgcgcatcacgttcaccagatggctgaacattatggtgttccggttatcctgcacactgaccactgcgcgaagaaactgctgccgtggatcgacggtctgctggacgcgggtgaaaaacacttcgcagctaccggtaagccgctgttctcttctcacatgatcgacctgtctgaagaatctctgcaagagaacatcgaaatctgctctaaatacctggagcgcatgtccaaaatcggcatgactctggaaatcgaactgggttgcaccggtggtgaagaagacggcgtggacaacagccacatggacgcttctgcactgtacacccagccggaagacgttgattacgcatacaccgaactgagcaaaatcagcccgcgtttcaccatcgctgcgtccttcggtaacgtacacggtgtttacaagccgggtaacgtggttctgactccgaccatcctgcgtgattctcaggaatatgtttccaagaaacacaacctgccgcacaacagcctgaacttcgtattccacggtggttccggttctactgctcaggaaatcaaagactccgtaagctacggcgtagtaaaaatgaacatcgataccgatacccaatgggcaacctgggaaggcgttctgaactactacaaagcgaacgaagcttatctgcaggggcagttgggtaacccgaaaggcgaagatcagccgaacaagaaatactacgatccgcgcgtatggctgcgtgccggtcagacttcgatgatcgctcgtctggaaaaagcattccaggaactgaacgcgatcgacgttctgtaa

SEQ ID NO: 484855 - DNA, 861 bp, Shigella sonnei
atggaagatttgaatgttgtcgatagcataaacggcgcgggaagctggctggtagctaaccaggcgctgctgctaagttatgcagtaaacatcgtggcggcactcgcgatcatcatcgttggtttgattatcgcgcggatgatttccaacgcggtgaatcgcctgatgatctcccgtaaaatcgatgccactgttgctgattttctttctgcattagtccgttacggtattatcgcctttacgctaatcgctgccctgggacgcgtgggtgtacaaacagcgtcagtcattgctgtactcggtgccgcaggcttagctgttggtctggctttgcaggggtcactttctaacctggccgctggcgtgttacttgtcatgttccgcccgttccgtgccggagaatatgttgatctcggcggcgtagccggtactgtgctgagtgtgcagattttctccaccaccatgcgtactgcagacggtaaaattatcgttattccgaacggtaaaattattgccggaaatattattaacttctctcgcgagccagttcgccgtaacgaatttattattggcgtggcgtatgattccgatatcgatcaggttaagcagatcctgaccaatattatccagtctgaagatcgcattttgaaagatcgcgaaatgactgtgcgtctgaacgaacttggtgcatcgtcgattaatttcgtggtccgcgtctggagcaacagcggcgatctgcaaaacgtgtactgggatgtgctggagcgtattaaacgtgaatttgatgccgccggtatcagcttcccgtacccgcaaatggatgtgaactttaagcgggtgaaagaagacaaagctgcgtaa

SEQ ID NO: 484856 - DNA, 636 bp, Shigella sonnei
gtgttttcttattactttcaaggtattgctcttggggcagctatgattctgccgctcggtccacaaaatgcttttgtgatgaatcagggcattcgtcgtcagtaccacattatgattgccttactttgtgctatcagcgatttggtcctgatttgcgccgggatttttggtggcagcgcgttattgatgcagtcgccgtggttgctggcgctggtcacctggggcggcgtagccttcttgctgtggtatggttttggcgcttttaaaacagcgatgagtagtaatattgagttagctagtgccgaagtcctgaagcaaggcagatggaaaattatcgccaccatgctggcagtgacctggctgaatccgcatgtttacctggatacttttgttgtactgggcagccttggcgggcagcttgacgtcgaaccaaaacgttggtttgcgctcgggacaattagcgcctctttcctgtggttctttggtctggctattctcgcagcctggctggcaccgcgcctgcgcacggcaaaatcacagcgcattatcaatctggtagtgggatgtgtcatgtggtttatagccttgcagctggcgagagacggtattgctcatgcacaagccttgttcagttag

SEQ ID NO: 484857 - DNA, 741 bp, Shigella sonnei
gtgaagttcaaagttatcgccctggcggcattaatgggtattagcgggatggcagcgcaggctaacgaattgccggatggaccgcatattgtcacctccggtacggcaagtgtggatgcggtgccagacattgccactcttgcgattgaagttaacgtggccgcgaaggatgccgctacagccaagaaacaggcagatgagcgcgtcgcacaatacatttccttccttgaactcaatcagatcgcgaaaaaagatatcagctcagcgaacttacgcacccagccagattatgattatcaggatggtaaaagtatcctgaaaggctaccgcgctgtgagaacggtggaagtcacgctccgtcagttagacaaactgaattccttgctggatggcgcgctgaaggcgggtcttaacgaaattcgttctgtgtcgctgggcgtggcgcagccggatgcctataaagacaaagcgcgtaaggcagcgattgataacgcgattcatcaggcgcaggaactggcgaacggctttcatcgtaaactggggccggtatatagcgtgcgctaccatgtttccaactatcagcccagcccaatggtgcggatgatgaaagccgatgccgcgccggtgtctgcccaggaaacttacgagcaggccgctattcagtttgatgatcaggtcgatgtggtcttccagttagaacctgtggatcaacaacccgctaaaacacctgcagcacaataa

SEQ ID NO: 484858 - DNA, 291 bp, Shigella sonnei
atggacatttttatttcgaaaaagatgcgcaatttcattttattagcgcaaaccaataatattgcccgggcggcagaaaaaatccatatgacggcttcgccatttggtaaaagcattgccgcgctggaagaacaaattggctatacgctatttacccgcaaagataataatatcagcctcaataaagccggtcaggaactgtatcaaaaactgttcccggtttatcaacgactttctgcgattgataatgaaatccataactcagggcgtcgttcacgagaaattgggtga

SEQ ID NO: 484859 - DNA, 1377 bp, Shigella sonnei
gtgatttgttttgatttggcgattgatcagatcgcacaatccgggctaagttccctcaaagtgatctactattccgcgcagctatttagtattaagactatcacttatttaagtgatactggttgtctggagattcagggggccagtctagcagttaccgttaatctcaataaaatcggttttaattttactaccgatcaactctttttattaaccgcattaccctccgtttctggcgcattattgcgtgttccctactcctttatggtgcctatattcggtggacgccgatggacggtttttagtactgcaatcctgattattccttgcgtctggctcggaattgccgtgcaaaatccgaatactccttttgggatatttatcgttatcgctttgctatgcggttttgcaggtgcaaactttgcttcgagcatgggcaatatcagtttcttctttccaaaagccaaacaagggagcgctcttgggattaatggcggattaggaaacttaggtgtaagtgtaatgcagctggttgcaccgctggtcatttttgtacctgtatttgcctttctcggcgtcaatggcgtaccgcaggccgacggttcggtgatgtcgctggcgaatgccgcatggatttgggtaccgctactggcgattgccacgatcgccgcctggtcagggatgaatgatatcgccagttcacgcgcctcaattgacgaccagctccctgtcttacaacgcctgcatctctggctgctgagcctgctttaccttgccaccttcggttcgtttatcggtttttctgcgggttttgccatgctggcaaaaacccagttcccggatgtgaatattctgcgcctggcgttctttggcccatttatcggtgccatcgcgcggtcggttggtggtgctatttccgataaattcggcggcgtgcgggtgacgttgatcaactttatttttatggcgattttcagtgccctgctgttccttaccttaccgggcacaggctccggtaatttcatcgccttttacgccgtatttatggggctgtttctgactgcgggtctgggaagtggttctactttccagatgatcgccgtcatctttcgccagataaccatttatcgggtgaagatgaaaggcggtagtgatgagcaagctcagaaagaagccatcaccgaaacggcggcggctctgggctttatctcagccattggcgcagtgggcggcttttttattccgcaggcgtttggcatgtcgctcaatatgaccggctctccggtcggcgcgatgaaagtgtttttaatcttctacatcgtttgtgtgctgctgacctggctggtttatggtcggcggaagttcagccaaaaataa

SEQ ID NO: 484860 - DNA, 3741 bp, Shigella sonnei
atgagtaaacttttggatcgctttcgctacttcaaacaaaagggcgaaacctttgccgatggtcacggacaggtgatgcatagcaaccgcgactgggaggacagctatcgccagcgttggcagttcgacaaaattgtgcgttccacccacggtgttaactgtacaggctcctgtagctggaaaatctacgttaaaaatggtctggtgacctgggaaatccaacagaccgactacccgcgcactcgccctgaccagcccaatcatgaacctcgcggctgcccgcgtggcgcaagttactcctggtatctctacagcgctaaccgcctgaaatacccgctcattcgtaaacgactgattgaactgtggcgtgaagctctcaagcaacacagcgatccggtactggcgtgggcatcgattatgaacgatccgcaaaagtgcttaagctacaaacaagtgcgtgggcgcggcgggtttatccgctccaactggcaggaacttaaccaactgattgccgccgctaacgtctggaccatcaaaatctatggtccggatcgcgttgccggtttctcgccgatcccggcgatgtcgatggtgtcatacgctgccggaacgcgttatctgtcgctgttaggcggcacctgtttaagcttctacgactggtattgcgacctgccgcccgcctcgccgatgacctggggcgaacaaaccgacgtgccggaatctgccgactggtataactccagttacatcatcgcctgggggtctaacgtaccgcagacacgtacgccggacgcccacttctttaccgaagtacgttacaaaggcaccaaaactatcgccattacccctgactactctgaagtggccaaattgtgcgaccagtggctggcaccgaaacaaggcactgatagcgccctggcgatggcaatgggccatgtgattttaaaagagtttcatctcgataatcccagcgactactttatcaactactgccgccgctatagcgacatgccgatgctggtaatgctggaacctcgcgacgatggtagctacgtacccgggcgcatgatccgcgcgtctgacctggtagatggactaggcgaaagcaataatccgcagtggaaaaccgtggcggttaataccgcaggtgaattggtagtgccgaatggttcgattggtttccgctggggagaaaaaggcaaatggaatctggaatccattgccgccggtaaggaaaccgaattgtcgttaaccctgctcggtcaacatgacgctgttgcaggcgtggccttcccctactttggcggcattgaaaatccgcattttcgcagcgtaaaacacaatccggtgctggtgcgccaattgcccgttaaaaacctgacgttagtcgatggcaacacctgtccggtggtcagcgtttatgatgtggtgctggcgaattacggcctcgatcgcgggctggaagatgaaaacagcgcgaaagattacgctgaaatcaaaccgtacaccccagcctggggtgagcaaattaccggcgtaccgcgccagtatattgaaaccatcgcccgcgaatttgccgataccgcccataaaacgcatggacgctcaatgattatcctcggcgctggcgtcaaccactggtatcacatggatatgaactaccgtgggatgatcaatatgctgatcttctgcggttgtgtcgggcaaagcggcggcggctgggcgcactatgtcggtcaggaaaaactgcgcccacaaaccggctggttgccgctggcctttgcgctcgactggaaccgcccaccgcgccagatgaacagtacctcgtttttctacaatcattccagccaatggcgctatgaaaaagtctctgctcaggagttactttcaccgcttgccgatgccagtaagtacagcggtcatctgattgatttcaacgttcgcgccgaacgcatgggctggctaccttctgcgccgcagctggggcgtaacccgctcgggattaaagctgaagccgacaaggccggattatcccccacagaatttaccgcccaggcgctgaaatcgggcgatttacgtatggcctgcgaacaaccagatagcggcagcaatcatccgcgtaatttgtttgtctggcgctctaacctgcttggctcctccggcaaaggccacgagtatatgcagaagtatctgctggggaccgaaagcgggattcagggcgaggaactcggtgccagcgacgggatcaaaccggaagaagtcgagtggcaaactgcggcgattgaaggcaagctcgacctgctggtgacgctcgacttccgcatgtccagtacctgcctgttctccgatatcgttctgcccaccgccacctggtacgaaaaagacgatatgaacacctcggatatgcatccgtttattcatccgctttctgcggcggtcgatccggcgtgggaatcacgcagcgactgggaaatctacaaaggtatcgccaaagcattttcgcaagtgtgcgtgggtcatcttggcaaagaaaccgacgtggtattacaacccctactgcatgactctccggcagagctctcacagccgtgtgaagtgctcgactggcgcaaaggcgaatgcgatctgattccaggcaaaaccgcgccgaatattgtggcggtggagcgcgactaccctgctacgtatgaacgctttacctcgctcgggccattgatggacaaacttggcaatggtggtaaagggatttcgtggaatacccaggatgaaatcgatttcctcggcaaactcaattacaccaagcgtgatggcccggcacaggggcgtccgctgattgacaccgccattgacgcttcagaagtgattctggcactggcaccggaaaccaacggtcatgttgcagtcaaagcgtggcaggcgctgggcgagatcaccgggcgcgaacatacccatctggcgctgcacaaagaggacgagaagattcgctttcgcgatattcaggcgcagccgcgtaaaattatctccagccccacatggtccggtctggaaagcgatcacgtctcctataatgcgggatacaccaacgttcatgagttaattccgtggcgcacgctgtcgggacgccagcagctctatcaggatcatccgtggatgcgtgcttttggtgaaagcctggtggcttatcgcccgcctatcgacacccgtagcgtcagtgagatgcgccagatcccgccaaacggcttcccggaaaaagcacttaacttcctgacgccgcaccagaaatggggcattcactcaacctacagtgaaaacctgctaatgctgacgctctctcgcggtggaccgattgtctggatcagcgaaaccgatgcccgagaactgaccattgtcgataacgactgggtggaagtctttaacgccaacggcgcgctgacggctcgtgcggtggtcagccaacgtgtaccgccgggtatgaccatgatgtatcacgcccaggaacgcattatgaatattcctggttcggaagtaactggcatgcgcggcggcattcataactcggtcacccgtgtttgcccgaaaccgacgcatatgattggcggttacgcgcagctggcctggggctttaactactacggcaccgtcggctcgaaccgcgacgaattcatcatgatccgcaagatgaagaacgttaactggctggatgatgaaggtcgcgatcaggtacaggaggcgaaaaaatga

SEQ ID NO: 484861 - DNA, 1545 bp, Shigella sonnei
atgaaaatacgttcgcaagtcggcatggtgcttaacctcgacaaatgtatcggttgccatacctgttcggtgacctgtaaaaacgtctggaccggacgcgaaggcatggagtacgcatggtttaacaacgtcgaaaccaaaccgggcattggttatccgaaaaactgggaagatcaggaagagtggcaaggcggctgggtccgcgatgtgaatggcaagatacgcccgcgtctgggcagcaagatgggcgtaataaccaaaatcttcgccaacccggtggtgccgcagattgatgattactacgaacctttcaccttcgactacgaacatttgcatagcgcaccggaaggcaaacatatccctactgctcgcccgcgttcgctgattgacggtaagcggatggacaaagtgatctgggggccaaactgggaagaactgctgggcggcgagtttgaaaaacgtgcccgcgaccgcaacttcgaggccatgcaaaaggagatgtacgggcagtttaaaaacaccttcatgatgtacctgccgcgcctgtgcgaacactgcctcaatcccagttgcgtggcgacctgcccaagcggcgctatctacaaacgcgaagaagacggcattgtgctgattgatcaggataaatgccgtggctggcgtttgtgcattagcggttgtccgtacaaaaaaatctacttcaactggaaaagcggcaagtcagaaaaatgtatcttctgttatccgcgaattgagtcaggccaacccaccgtgtgctcagaaacctgcgtgggtcgcatccggtatctgggcgtgctgctttacgacgccgaccgcattgaggaagcggcgagcaccgagcgcgaagttgacctctatgaacgtcagtgcgaagtgttcctcgatccacacgatccctcagtgatcgaggaagccctgaaacaaggtattccacaaaacgtgattgaagctgcccagcgttcgcctgtctacaaaatggcgatggactggaaactggcgctaccgctgcaccctgaatatcgcaccctgccaatggtctggtacgttcctccgctgtcgccgattcagtcctacgcagatgcgggcggtttgccgaaaagcgaaggcgtgctgcccgccatcgaaagcctgcgtattccggtgcaatatctcgccaatatgttgagtgccggcgataccggtccggtactgcgggcgctgaaacggatgatggcgatgcgccactatatgcgttcacaaaccgtggaaggcgttactgatactcgtgccatcgacgaagtaggcctgagcgtcgcccaggtcgaagaaatgtatcgctatctcgccattgccaactatgaagatcgttttgttatcccgaccagccatcgggaaatggcgggcgatgccttcgcagaacgcaacggctgcggttttacctttggcgacggttgccacggttcggacagtaaattcaacctgttcaacagtagccgtatcgatgccatcaacatcaccgaagtgcgcgacaaagcggagggcgaataa

SEQ ID NO: 484862 - DNA, 696 bp, Shigella sonnei
atgcagatcctcaaagtgatcggcctgttgatggagtatccggatgagctgttgtgggaatgcaaggaggacgcgctggcgttgatccgccgcgacgcgccgatgcttacggatttcacccacaacctgcttaacgcgccgctgctggataaacaggccgaatggtgcgaagtgtttgaccgcgggcgcaccacgtcgctgctgctgttcgaacatgttcatgccgagtcccgcgatcgcggccaggcaatggtggacctgctggcggagtatgaaaaggtcggcctgcagctggattgtcgggaactgcccgattatctaccgctgtatctggagtatttaagcgtactgcctgacgatcaggcgaaagaaggattgctcaatgttgcgccgatcctcgccctgcttggcggtcgcttaaaacaacgcgaggcaccgtggtacgcgttgtttgatgctctgctgcaactggcgggaagtatactttcaagtgacagtgtcacaaaacaagtaaacagcgaagagcgcgatgacacccgccaggcgcttgatgcagtgtgggaagaggaacaggtgaagtttattgaagataacgccacggcgtgtgacagctcgccgcttaatcaatatcagcgacgctttagccaggatgtcgcgccgcagtatgtcgacatcagtgcgggaggtgggaaatga

SEQ ID NO: 484863 - DNA, 681 bp, Shigella sonnei
atgattcagtatctgaacgtctttttttacgatatctacccgtacatttgtgcgacggtgtttttcctcggcagctggctgcgctacgactacgggcagtacacctggcgcgcctcctcaagtcaaatgctcgataaacgcgggatggtgatatggtcgaatctgttccatatcggcattttggggattttcttcgggcacttgttcggcatgttaacgccgcactggatgtacgcgtggtttttgccagtggcagcgaaacaactcatggcgatggtgctcggcggtatttgcggtgtgttgacgttgattggcggcgcaggactgctgtggcgcagtctgacaaatcagcgcgtgcgtgccacttccactacgccggatatcatcatcatgagcattttgctgatccagtgtctgttggggctaagtaccataccgttttcagcacagtatcctgatggtagcgaaatgatgaagctggtgggttgggcgcaaagcattgtcactttccgtggtggatcgtcagagatgctcaacggcgtagcgttcgtcttccgcctgcatctggtgttgggaatgaccatcttcctgctcttcccgttcacccgactggtgcatgtgtggagcgcgccgtttgagtactttactcgtcgatatcaaattgtgcgttcgcggcgataa

SEQ ID NO: 484864 - DNA, 894 bp, Shigella sonnei
atgaaaccgcaggtgtaccacgtcgatgcttttacctctcaaccatttcgcggcaattctgccggtgttgttttccccgccgataatcttagcgaagcacaaatgcagcttatcgcccgcgagttaggccattcggaaactgcttttctgctgcacagcgacgacagcgatgtgcgcatccgctactttacgccaacggttgaagtgccgatttgcggtcacgcgacagtagctgcgcactatgtacgtgcgaaggtgttaggtttaggaaattgcacgatctggcaaacatcgctggcaggaaaacatcgcgtgactatcgaaaagcacaacgatgattatcgtatttcgctggaacaaggtacgccgggctttgaactgccgctggagggtgaagtacgcgcggcgattatcaacgcattgcatcttactgaagacgatattctgccgggtttgccgatccaggtcgcgacgaccgggcattctaaagtgatgatcccattgaagccggaagtggatatcgacgctctttcgcctgaccttaatgcgctgaccgctatcagtaaacagattggctgcaatggtttcttcccgttccagatccgtccaggcaaaaacgaaaccgatggtcgtatgttctcgcctgcgattggtattgtggaagatccggtgactggcaatgccaatggcccgatgggtgcatggttggtacatcacaacgtattgccccacgatggcaacgtgttgtgtgttaaaggccatcaggggcgcgcattggggcgtgacggcatgattgaagtgacggtgacaattcgtgataaccaaccggaaaaagtcaccatttcaggcacagcggtgattttgtttcatgccgaatgggcaattgaaatctga

SEQ ID NO: 484865 - DNA, 846 bp, Shigella sonnei
atgacgcccattctgaatcactattttgcccgtattaactggtcgggagctgctgcggtcaatattgatacgcttcgtgcattgcacctgaaacacaattgcaccattccgtttgaaaaccttgacgttttgctgccgagggaaatacagcttgatgatcaatcgctggaagagaaactggtgatagcccgtcgtggcggttactgttttgagcagaatggcgtgtttgagcgggtgttacgcgagctggggtttaacgttcgcagcttgttagggcgcgtagtgttatcaaatccgccagcattaccgccgcgcacccatcgtttgctgttggtggaactggaaggggaaaaatggattgctgatgtcggtttcggtgggcagacgctaaccgcgccgattcgtttagtttccgatctcgtgcagaccacgccacacggagagtatcggttgttgcaggagggtgatgattgggtgttgcagtttaatcatcatcagcattggcagccgatgtaccgcttcgatctctgcgagcagcaacaaagcgattatgtgatgggcaatttctggtcggcgcactggccgcagtcgcattttcgccatcatttgctgatgtgccgccatttgccggacggcggcaagctgacactgaccaattttcattttacccattatgaaaatgggcacgcggtggagcagcgaaatctaccggatgtggcgtcgttatatgccgtgatgcaggaacagtttggtctgggcgtggatgatgcgaaacatggctttactgtggatgagttagcgctggtgatggcggcgtttgatacgcatccggaggcgggaaaataa

SEQ ID NO: 484866 - DNA, 570 bp, Shigella sonnei
atgagccgattcatccccatagaattacaccatgccagccgtctgttaaatcatggcccaactgtcttgatcaccagtttcgatgagcaatcccagcggcgtaacattatggctgcagcctggtcaatgccggtggagtttgaacctccacgcgtggcaattgtggtagataaatcgacatggaccagggagttgattgaacgtaacggtaagtttggcatcgttatcccgggcgttgcagcaactaactggacgtgggcggtgggaagtgtgtcggtgcgtgaagaagataaatttaattgctatggcattccggtggtgaaaggtccggtgcttggtttgccacttgttgaagagaaatgcctggcgtggatggagtgccgcctgctacctgcgacttctgcgcaacaaaaatacgacacgctgtttggcgaggtggtatcagcagcggcagacgcacgggtatttgtcgaaggccgctggcagtttgatgatgataagctcaatacgttgcatcatttaggtgctggcacgtttgttactagcggcaagcgtgttacggcagggtaa

SEQ ID NO: 484867 - DNA, 228 bp, Shigella sonnei
atgccgcacatcgacattaaatgctttccgcgtgaactggacgaacaacaaaaagcagcacttgctgcagatattaccgacgttattattcgccatctgaacagtaaagatagctcgataagcattgctctacagcagattcaaccagaatcttggcaagctatctgggatgccgaaatcgagccccaaatggaggctttgataaagaaccccggttacagcatgtaa

SEQ ID NO: 484868 - DNA, 510 bp, Shigella sonnei
atgggtttgttcgataaactgaaatctctggtttccgacgacaagaaggataccggaactattgagatcattgctccgctctctggcgagatcgtcaatatcgaagacgtgccggatgtcgtttttgcggaaaaaatcgttggtgatggtattgctatcaaaccaacgggtaacaaaatggtcgcgcctgtagacggtaccattggtaaaatctttgaaaccaatcacgcgttctctatcgaatctgatagcggcgttgaactgttcgtccacttcggtatcgacaccgttgaactgaaaggcgaaggcttcaagcgtattgctgaagaaggtcagcgcgtgaaagttggcgatactgtcattgaatttgatctgccgctgctggaagagaaagccaagtctaccctgactccggttgttatctccaacatggacgaaatcaaagaactgatcaaactgtccggtagcgtaaccgtgggtgaaaccccggttatccgcatcaagaagtaa

SEQ ID NO: 484869 - DNA, 1728 bp, Shigella sonnei; identical to SEQ ID NO: 473568

SEQ ID NO: 484870 - DNA, 258 bp, Shigella sonnei; identical to SEQ ID NO: 2720

SEQ ID NO: 484871 - DNA, 972 bp, Shigella sonnei
atgagtaagatttttgaagataactcgctgactatcggtcacacgccgctggttcgcctgaatcgcatcggtaacggacgcattctggcgaaggtggaatctcgtaaccccagcttcagcgttaagtgccgtatcggtgccaacatgatttgggatgccgaaaagcgcggcgtgctgaaaccaggcgttgaactggttgaaccgaccagcggtaataccgggattgcactggcctatgtagctgccgctcgcggttacaaactcaccctgaccatgccagaaaccatgagtattgaacgccgcaagctgctgaaagcgttaggtgcaaacctggtgctgacggaaggtgctaaaggcatgaaaggcgcaatccaaaaagcagaagaaattgtcgccagcaatccagagaaatacctgctgctgcaacaattcagcaatccggcaaaccctgaaattcacgaaaaaaccaccggtccggagatctgggaagataccgacggtcaggttgatgtatttattgctggcgttgggactggcggtacgctgactggcgtcagccgctacattaaaggcaccaaaggcaagaccgatcttatctctgtcgccgttgagccaaccgattctccagttatcgcccaggcgctggcaggtgaagagattaaacctggcccgcataaaattcagggtattggcgctggttttatcccggctaacctcgatctcaagctggtcgataaagtcattggcatcaccaatgaagaagccatttctaccgcccgtcgtctaatggaagaagaaggtattcttgcaggtatctcttctggagcagctgttgccgcggcgttgaaactacaagaagatgaaagctttaccaataagaatattgtggttattctaccatcatcgggtgagcgttatttaagcaccgcattgtttgccgatctcttcactgagaaagaattgcaacagtaa

SEQ ID NO: 484872 - DNA, 762 bp, Shigella sonnei; identical to SEQ ID NO: 460306

SEQ ID NO: 484873 - DNA, 987 bp, Shigella sonnei
atgatgcaggatttgcgtctgatattaatcattgttggcgcgatcgccataatcgctttactggtacatggtttctggaccagccgtaaagaacgatcttctatgttccgcgatcggccattaaaacgaatgaagtcaaaacgtgacgacgattcttatgacgaggatgtcgaagatgatgagggcgttggtgaggttcgtgttcaccgcgtgaatcatgccccggctaacgctcaggagcatgaggctgctcgtccgtcgccgcaacaccagtaccaaccgccttatgcgtctgcgcagccgcgtcaaccgatccagcagccgcctgaagcgcaggtaccgccgcaacatgctccgcgtccagcgcagccgatgcagcagcctgcctatcagccgcagcctgaacagccgttgcagcagccagtttcgccacaggtcgcgccagcgccgcagcctgtgcattcagcaccgcaaccggcacaacaggctttccagcctgcagaacccgtagcggcaccacagcctgagcctgtagcggaaccggctccagttatggataaaccgaagcgcaaagaagcggtgattatcatgaacgtcgcggcgcatcacggtagcgagctaaacggtgaactgcttcttaacagcattcaacaagcgggcttcatttttggcgatatgaatatttaccatcgtcatcttagcccggatggcagcggcccggcgttattcagcctggcgaatatggtgaaaccgggaacctttgatcctgaaatgaaggatttcactactccgggtgtcactatctttatgcaggtaccgtcttacggtgacgagctgcagaacttcaagctgatgctgcaatctgcgcagcatattgccgatgaagtgggcggtgtcgtgcttgacgatcagcgccgtatgatgactccgcagaaattgcgcgagtaccaggacatcatccgcgaagtcaaagacgccaacgcctga

SEQ ID NO: 484874 - DNA, 2016 bp, Shigella sonnei
atggaatcaatcgaacaacaactgacagaactgcgaacgacgcttcgccatcatgaatatctttatcatgtgatggatgcgccggaaattcccgacgctgaatacgacaggctgatgcgcgaactgcgcgagctggaaaccaaacatccagaactgattacgcctgattcgcctacccaacgtgtaggtgctgcgccgctggcggctttcagccagatacgccatgaagtaccaatgctgtcactggataacgtttttgatgaagaaagctttcttgctttcaacaaacgtgtgcaggaccgtctgaaaaacaacgagaaagtcacctggtgctgtgagctgaagctggatggccttgccgtcagtattctgtatgaaaatggcgttttagtcagtgccgcgacccgtggcgatggcaccaccggggaagatatcacgtctaatgtgcgtactattcgcgccattccgctgaagctgcacggagagaatatcccggcgcgtctggaagtgcgtggtgaagtgttcctgccgcaggcggggttcgaaaagattaacgaagatgcgcgacgcacgggcgggaaagtttttgctaacccacgtaatgcggcagctggttcactgcgtcagcttgatccgcgtattacagcgaagcgaccgctcacttttttctgctatggcgttggtgttctggaaggtggcgagctgccggatactcatcttggccgtttactgcaatttaaaaagtgggggttgccggtcagcgatcgggtaacgctttgtgaatcggcggaagaagtgctggcgttctatcacaaagtggaagaagaccgcccgacgctgggctttgatatcgacggcgtggtgattaaggtcaactcactggaacagcaggagcagcttggctttggcgcgcgtgccccgcgctgggcggtagcgtttaaattcccggcgcaggagcagatgacctttgtgcgtgacgtcgagtttcaggttgggcgtactggcgcgattacgcctgttgcgcgtctggaacctgtccatgttgctggcgtgctggtgagtaacgcaaccttacacaatgcggatgaaatcgaacgtcttggtttacgcattggcgataaagtggtgattcgccgcgctggcgacgtgatcccgcaggtggttaacgtcgtgctttctgaacgcccggaagatacccgtgaggttgtattcccgacgcattgtccggtatgtggttctgacgttgagcgtgtggaaggtgaagcggttgcccgctgtaccggtggcctgatttgcggtgcgcagcgtaaagagtcgctgaaacactttgtttcccgccgtgcgatggatgttgacggaatgggcgacaaaatcatcgatcagctggttgaaaaagaatatgtccacactccggcagatctgttcaaactcaccgcaggcaaactgaccggactggagcgtatggggccaaaatcggcacaaaacgtggttaacgcgctggaaaaagcgaaagaaaccacctttgctcgcttcctctatgcacttggcatccgtgaagtcggcgaggccaccgcagcaggtctggcggcatatttcggcacgctggaagtgctggaagccgcttcgattgaagagctgcaaaaggtgcctgatgttggcattgtcgttgcatcccacgttcacaacttctttgccgaagaaagcaaccgcaatgtcatcagcgagctgttggcggaaggtgttcactggcctgcgccgatcgttatcaacgcggaagagattgacagcccgtttgctggtaaaaccgtggtgcttacgggcagcttaagccagatgtcgcgtgatgacgctaaagctcgactggtcgaactgggcgcgaaagtcgcgggcagcgtgtcgaagaaaaccgatctggtgatagcgggtgaagctgcaggatctaaactggcgaaggcgcaggaactgggcattgaagtcatcgacgaagcggaaatgctgcgtttgctgggtagctga

SEQ ID NO: 484875 - DNA, 219 bp, Shigella sonnei; identical to SEQ ID NO: 460303

SEQ ID NO: 484876 - DNA, 999 bp, Shigella sonnei
atgaaactttttcgtatcctcgatcctttcaccttaaccctgatcacggtggtgttgctggcctctttctttccggccagaggcgatttcgtccccttctttgaaaatctgaccaccgcagctattgccctgctgttctttatgcacggcgcgaagttgtcgcgtgaggcgattattgctggcggtggtcactggcgactgcatttgtgggtaatgtgcagcaccttcgtgctgtttccgattctgggtgtactgtttgcctggtggaaaccggtaaatgtcgacccgatgctctactccggttttctctacttgtgcattctcccggctaccgtgcagtctgcaatcgccttcacgtcaatggcgggcggtaacgtcgcggcggcggtttgttctgcgtcagcatccagcctgctggggattttcctttcaccattgctagttggtctggtgatgaatgttcacggtgcagggggcagccttgagcaggtcggtaaaattatgctgcaactgctgctgccgtttgtgttggggcatctttcccggccgtggattggtgactgggtgtcgcgcaataaaaaatggattgcgaaaactgaccagacgtccattctgttggtggtttatacagcgttcagcgaagccgtcgttaatggtatctggcataaagttggctggggatcattgctgtttatcgtggtggtcagctgcgttcttctggctatcgtgattgtagttaacgtctttatggcacgccgactgggcttcaataaggcagatgaaattactatcgtcttttgtggttcgaaaaagagtctggcaaatggcatcccgatggcaaacattctgttccccacatcggtgatcggtatgatggtgctgcccctgatgattttccatcagatccaattgatggtctgtgcggtgctggcgcgtcgatacaaacgccagaccgaacagttacaggcgcagcaggaaagcagcgccgataaagcttaa

SEQ ID NO: 484877 - DNA, 927 bp, Shigella sonnei
atgaattattctttaaaacaattaaaggttttcgtcacagtagcgcaggagaaaagttttagtcgtgcaggagagcgtatcggcttgagccagtcggcagtaagtcacagtgtgaaggagctggaaaatcatactggtgttcgcctgctggacagaaccacgcgtgaagtggtgcttacagatgcagggcagcagttggctttgcgtcttgagcgactgctggatgaacttaacagcacgttgcgcgataccgggcgtatggggcaacaactgagcggaaaagttcgggtcgctgccagccagaccatttccgcgcatcttattccgcaatgcattgctgaaagccatcgccgctatccagatattcagtttgtcctgcacgatcgtccgcagcagtgggtgatggaaagtattcgccagggagatgtcgatttttgcatcgtcatcgatccaggcccagtgggcgatctgcaatgtgaagcgattctttccgagcctttctttctgctttgccatcgcgatagcgctttggccgtggaagattatgtaccctggcaggcattacagggagcgaaattggtgttgcaggattacgcgtcaggcagccgaccgctgattgacgcagcgctggcgcgcaatggtattcaggcgaatattgtgcaggagattggacatccggcgacgctgttcccgatggtagccgcaggcatcggcatcagtattcttcccgcactggcgctaccattgcctgaaggtagcccactggtggtaaagcgcattacgccggttgttgaacgccagttgatgctggtgcgcaggaagaaccgttcactttccaccgccgctgaagcgttatgggacgtggtacgagaccagggcaatgcgctaatggctggtcgggaaggggctccgttgtatcagatatag

SEQ ID NO: 484878 - DNA, 342 bp, Shigella sonnei
atggccactatctcttcaacttcaattccttccatacaaacacagagtagtaacagggcatcacaaggtagcgatgttgcttcaaaaatcgcgcggataagtcagcaaatcatcaaactcactcaacaaattaaagagattgtagacactagcggcagtgctgaagacaaacaaaaacaggccgaattgattcaacagcaaatcaccctactggaaacacaactggcgcagttgcagagacagcaggcagaaaaggcgcaggagaaagagcagcgtttgtctctgaatgtatcccttctaaatcctgttgaaaatacgactcatatcgatatctatatctga

SEQ ID NO: 484879 - DNA, 1500 bp, Shigella sonnei; identical to SEQ ID NO: 263605

SEQ ID NO: 484880 - DNA, 2370 bp, Shigella sonnei
atgaaatttaaccacaatcttttatttatttcctcacaatatcttgatggcgacaacccttcgcagcaggtactggaagagcttcaaaccgaactcgcggaacgcggttttaaaattcatatcacgcaccagatctctgatggattaaaaatcatcgaaaaaagcccccaatacagcgggattggtttttactgggagccagacaatccgacctttgcagaagagctacagcactttatcagcatattccgcaaaagaaatgccacgacgccgctgataattttctcagaacagaatattaccgatcgtatcccactcgacgtcttaaaagaggtcagcgaatatgtttatctgttctctgaatccgcagccttcactgccaatcgactgtactccttagtccaccgctatgcggataagcttcttcctccctactttaaaacccttaaggactttaccgaggacggtgactattactgggactgcccggggcatatggggggaatggcctatctgaaacatcctgttggcattgagttcattaacttctttggcgaaaacatgatgcgcgctgatattggcgtggctaccgcggagatgggggattatctgatccacgccggaccgcctaaaaaatcggaagaaattgcggcccgactgtttggctctgattggaccttctacggtgtttccggctcatcggggtcgaaccgtattgtggcccaggctgcggttggcgcagatgaaattgccattattgaccgaaattgccacaagtcacttaatcatggcctgaccttgtctcaggcaaggccggtttacctgaaacctacccgcaacgcgtgggggctgattgggcctatcccgaccggacgcctgaagaaggccagtattgatgcgctggtggcaaacagccgactggcatctggtgcggtcagccagtccccgtcctacgccgtggtaaccaactgcacctatgatggcttctgttataacgtgaacgatgtagtcagacacctgggtgaaagcgcaccgcgcatccattttgatgaagcatggtatgcctatgcgcgtttccatccgctataccagagtcgctatgcaatggacgcggaggaaacgccaaatcgtccaaccctattcgccgtacagtccacccataaaatgctgccctcactctccatggcctcaatgattcatgtgaagaaaagcgatcgcgcgccgcttaatttcgatgactttaacgatgcctttatgatgcacggcacgacctcaccctactacccgatcattgcatcaattgatgtggcagtaagcatgatggagggtgaatccggttattcgcttgtgcaggagtcaattgaagaagcgattgccttccgtaaagccgtggtcagcgtcaagcgccagctccaggagcaggaaggtggtgacgcctggttcttcgatgtgcttcagccaaccgaagtgcaggacagcgattctgggcagcgatacagttttgaagaggcacccgtatcgctgctgagccacagcgccgactgctggtcgctgcgctccggtgagcgctggcacggttttgccgatgatgatctggtcgaaaccaacagtatgctcgatccagtaaaagtgaccctgacttgtccagggatcggtccgaagggagaataccagaaaaacggtattccgggatatttgctgacccgttttctcgatgaccgtcgcattgaaattgcccgtactggtgactacaccgtgctgatcctgttctccgtcggcatcaccaaaggcaaatggggaactctgattgaaagcctgctggcctttaaaaagcattacgacaatgacgatctggccacagatgctatcccgtcgctgaaagcgcattctccacactacgacacgctaaccctcaaggagctatgtcagataatgcatgaaaaaatggatgagctggagctgatgtcgcatatcaacgacgcggtaaacaccgatccggaaccagttatgaccccggcagaagcctatcagaaagtcgtacgctacaaaaccgagcatatccggttggatgattttagcggcagaattgccgccagcatgctcgtcccatatcccccaggcattcctgtactgatgccgggcgaacggatgccgcaaggtaacaagggcattattggctatctgcgcgccctgcaggaattcgataagcaattcccaggttttgaacatgagatccagggcgttaacgtcgatgaaaacggggacttctgggtcagagcgattgtggaagaagaacgcgatgggcagtcgctacccggccacataacctttaaacgccaggtctctggtattaaaaagggccgccagtag

SEQ ID NO: 484881 - DNA, 1470 bp, Shigella sonnei
atgcatatcgattcgactgaaaaaaataataaacaaaagttgggcttgcttgcgctaacatccattgtcgtgagctcgatgatcggcagcggcgttgacggactcccccagaatatggcggagaattctgccgtgggcccggtggcgatagcatggatagtctgtggtatcggcatgtttttcatctccagaacttttatcgtgctgtcaaacattagacctgatctccagtcaggagtttatatgtatgcccgggaagggttcggccgatttacggcatttaacgtcgcctggggctactggctgatgactatattcagcaacgtcgcctttgccattatggtgatggatacgctgaattatttcttaccaggtgatttcaagggagggaacaatattccttccgttatcggtgcctctttgctgatatggggattcaactttttagtcctctccggtacccgcattgccgggtcgattaacatcgtcggcacgctggccaaactgatcccgctggtggcctttattattattctcatgctgtttatgaagtacaccacgttcgcagataacgtctgggggcacagcgcgagtaaggccagtcaggacctaggctctattttctcacaggtaacttcaccgcttagcgtggcactctggagcttcatcggcgttgagggggctgtcgctctttccggtcgggccaaaaataaacgcgacgtgggtaaagccacattaattggcttcgttgtatcactgattatctgtctgctggtctccatcctgccgtttggcgtgctgactcaacatgagctcagcgcaattccaaccccatccaccgccggtattctgaagattgttgtcggtgaatgggggaagattatgattatcttgggggtgctgatttcggtgcttaccagctggctggcgtggaccatcatctgcgccgaactgcctatggtggccgcgcagaacggcacattcccgaaaccgttcagcaaaaaaaatgtgaagggttcggcctcggtttcgctttatataagcagtgcgtttatgcaaatcgtcgtacttctggtctacttttctaacgatgcctggcttgcaatgctggctatctctaccctgaccgttttacctgcgtatttaatgaccacggcatacctgtttaaactatgtattagcggcgagtatgccagctataccacgaatcacagccgcagcgccgcgctggtcagcagtattatcggctttgtattctgcctgtttatgttctacgccagtgaaatcaaatatctggcgatggttccagtgctgcttacgctgggcgtgcccctgtttatctgggcaagaaaaaaagacgatcgcgcagataaaatatttacgctacgcgaactggcattttttattttactgctggtcctcgacatcattgtttttattctactgcattataaaacgatacatttttag

SEQ ID NO: 484882 - DNA, 300 bp, Shigella sonnei
atgacaaaaacagtatcaaccagtaaaaaaccccgtaaacagcattcgcctgaatttcgcagtgaagccctgaagcttgctgaacgcatcggtgttactgccgcagcccgtgaactcagcctgtatgaatcacaactctacaactggcgcagtaaacagcaaaatcagcagacgtcttctgaacgtgaactggagatgtctaccgagattgcacgtctcaaacgccagctggcagaacgggatgaagagctggctatcctccaaaaggccgcgacatacttcgcgaagcgcctgaaatga

SEQ ID NO: 484883 - DNA, 867 bp, Shigella sonnei; identical to SEQ ID NO: 464884

SEQ ID NO: 484884 - DNA, 1278 bp, Shigella sonnei
atgatttcacgctggaaatggatgctgaagcagacaattaaaaaactatggttcagggcaacgttattcgcaattgtcgcgataataacggcccttttatcaattctttttaaatcaatgatacctgagtcggtttccgtgaaggttggtgcggaagcagtcgataacattctgaacatactggcatcgagtatgctggcagtgaccacattttcgctgagtatcatggtcacagcctacggttcagccactactaatgtgactcccagagctacgcgtttagttgttgaagacgtcaccacacaaaatgtactggccaccttcatcggttcttttctcttcagtctggtagggattattgccctcaatatgggagcttatggagaaagggggagagtcattttattcattgtcacactggttgtcattgccttaatcctcatcacattgcttcgctggatacagcatttgacctctctggggagggttggtgagacaacggcacaagtagaacaggcggccatcgaaacatttattgcgagagcaagaaatccctgtctcggtggatatccatggcttgagaacaatgaacagccgaaaggaacggttgcagtttatccgaagaagattggctatgttgaatatattgatatggtgaaacttagcaagctgctgaccaatgatccccgtcatgtatacctcgtggcgcagccaggcagtttcatacatccgtccatgccagttttgtacctgagtcagggccaggagtcgtcaatcaacaccgatttacttgagacgattattgtctcggatgcacgttcatttgctcaggatcctcgattttgccttagcgtcatggccgaaatagcctgccgggccctttcccctgcagtgaacgatcctggaaccgccattgatgtcattggcagaggtgttcgtatactttccacttacgcgcagaataaatctgatgaaatagaagtgaaatatccttcagtacatgttgcaccacttcagaataacgatctactggaagactttttctcacctgtcgcgcgcgatggtgccagtatgagggagattcagataagagtccttaaaggactgtcgatgctgagtaacggttggcctgagatatttgctgaagccgcacataccctggcatttgaaacattagagcatgcaactcgtgctgaccatatagattctgatagatatctaataaaatcaacctattataatttatttagtggcgaatattctaataaaaaaacatag

SEQ ID NO: 484885 - DNA, 159 bp, Shigella sonnei; identical to SEQ ID NO: 7652

SEQ ID NO: 484886 - DNA, 1998 bp, Shigella sonnei
atgagtgaaaatgatacaatcccaaagaagtctacaagtcagattaacaaagcggtattctttacatctgctttgctaattttccttcttgtcgcctttgccgccgtattcccggatgtcgccgacaaaaattttaaactacttcagcaacaaatcttcacgaatgccagctggttctacatccttgctgtggccctgattttactgagtgtcacgttccttggactctcacgctacggtgatatcaagctgggcccggaccatgcgcagcctgatttcagctaccactcctggtttgcgatgcttttttcggcagggatggggatcggcctgatgttctttggcgttgccgaacctgtaatgcattatctttcgccacccgttggcactccagaaaccgttgcggcagctaaggaagcaatgcgtctgacctttttccactggggactgcacgcatgggcaatttatgccattgtggcgctgattctggcgttcttcagttaccgtcacggtctgcctttaactctgcgctccgcactctatcccattattggcgatcgcatatacggacctgtaggacatgcggttgatattttcgctgttataggcacggtctttggcgttgcgacatcactgggttacggtgttttgcaggtgaatgccggtttgaaccatcttttcggggtgcccatcaatgaaacggtgcaggtaattctgatcgtggtcatcacggggttagcgacgatttcagtggtgtccggtctggataagggaatacgtatcctgtctgaactcaatctgggtctggctttgttgctcctggcgctggtcctgtgtctgggaccaaccgtgcttctgctgaagtcatttgtggaaaatacgggcggttatctttcggaactggtgagtaaaacgttcaacctttacgcgtatgagcccaagtcgagcaactggctggggggctggacattactgtactggggatggtggctttcatggtcgccgtttgtggggatgttcatcgcacgggtctcccgcgggcgaaccattcgcgagtttgtcaccggcgtgctgtttgttcccgcgggttttacgctaatgtggatgacggtgtttggtaacagcgcgatctatctcattatgaaccagggggccacagacctcgccaatactgttcagcaggatgtggcgctggccctgtttaatttcctggagcatttcccgttctcttctgtgctgtcattcattgcaatggcgatggtcatcgtcttctttgtaacgtctgctgattcgggggcaatggttgtggatactctggcatcaggtggagtggcaaacacacccgtctggcagcgaatattctgggcctcgctcatgggcattgttgcaattgcgcttctccttgccggagggctaagtgcgctgcaaacggtgacaatagcgagtgcattgcccttctcagtgatcttactaatatctatatacggacttttaaaagctttgcgccgggatttgaccaagcgtgaaagcctgagcatggcgacaattgctcctacggctgcacgtaacccaattccttggcagagaaggttacgcaatatcgcgtatctgccgaagcgatctcttgtgaaacgttttatggacgacgttatccagcctgccatgacgctggttcaggaggaactgaacaagcaggggacgataagccacattagtgatgcagtcgacgatcgtattcgtcttgaagtcgatttgggcaacgagctgaattttatatatgaagtgaggcttcgcgggtatatctcaccgaccttcgcgctcgccgcaatggataatgatgagcagcagactgaacaacatcgatattatcgcgctgaggtttatctcaaagaaggcggtcaaaattatgatgtgatgggctggaaccaggaacagctgattaatgacatactggaccagtacgaaaaacacctgcacttcctgcacctggttcgttaa

SEQ ID NO: 484887 - DNA, 672 bp, Shigella sonnei
atgcggatgaatatgtctgactttgccactttctttgctgtggcccgtaatcaaagctttcgtgcagcgggcgatgagttaggcttatcctcgtccgccattagccatagtattaaaacactggaacaacgtcttaaaattcgcttattcaatcggacaacccgaagcgtatcgttaacggaagcgggttctaatctctatgaacgattgcgcccagctttcgacgaaattcagatcatgttagatgagatgaatgattttcgtctgacaccaacaggaacgctcaaaatcaatgccgcccgggtagctgcacgtatatttttaatgcctttactggttggtttcacacgtgaatatcctgatattaaagtcgagctcacaactgacgactctcttgtcgatatcgtccaacagggctttgacgctggcgttcgacttagtggcatcgtcgaaaaagatatgatcagcgtggcgatcggcccaccagtgaaattatgtgtagcagcaacgccagagtactttgcaagatatggcaaaccccgccatcctcatgatctgcttaatcatcaatgtgttgtatttcgttatcccagcggcaaacctttccactggcaatttgcaaaggagcaggaaattgctgtcgcagggaatatcattctggatgatgggtaa

SEQ ID NO: 484888 - DNA, 177 bp, Shigella sonnei
atgcagtctgaacgtatttatttggtatgggcccatcctcgtcatgattcattgaccgcacatattgctgatgcgatccatcagcgggcaatggagcggaaaatacaggtgacggaactcgatttatatcggcgtaatattatcagtcgttattatctcaggtacgggatatggtag

SEQ ID NO: 484889 - DNA, 741 bp, Shigella sonnei
atgtcagttattggtcgcattcactcctttgaatcctgtggaaccgtagacggcccgggtattcgctttatcacctttttccagggctgcctgatgcgctgcctgtattgtcataaccgcgacacctgggatacgcatggcggtaaagaagttaccgttgaagatttaatgaaagaggtggtgacctatcgccactttatgaacgcttccggcggcggcgttaccgcatccggcggtgaggcaatcctacaagctgagtttgttcgtgactggttccgcgcctgcaaaaaagaaggcattcatacctgtctggacaccaacggttttgttcgtcgttacgatccggtgattgatgaactgctggaagtaaccgacctggtaatgctcgatctcaaacagatgaacgacgagatccaccaaaatctggttggagtttccaatcaccgcacgctggagttcgccaaatatctggcgaacaaaaatgtgaaggtgtggatccgctacgttgttgtcccaggctggtctgacgatgacgattcagcgcatcgcctcggtgaatttacccgtgatatgggcaacgttgagaaaatcgagcttctcccctaccacgagctgggcaaacacaaatgggtggcaatgggtgaagagtacaaactcgacggtgttaaaccaccgaagaaagagaccatggaacgcgtgaaaggcattcttgagcagtacggtcataaggtaatgttctaa

SEQ ID NO: 484890 - DNA, 2283 bp, Shigella sonnei
atgtccgagcttaatgaaaagttagccacagcctgggaaggttttaccaaaggtgactggcagaatgaagtaaacgtccgtgacttcattcagaaaaactacactccgtacgagggtgacgagtccttcctggctggcgctactgaagcgaccaccaccctgtgggacaaagtaatggaaggcgttaaactggaaaaccgcactcacgcgccagttgactttgacaccgctgttgcttccaccatcacctctcacgacgctggctacatcaacaagcagcttgagaaaatcgttggtctgcagactgaagctccgctgaaacgtgctcttatcccgttcggtggtatcaaaatgatcgaaggttcctgcaaagcgtacaaccgcgaactggatccgatgatcaaaaaaatcttcactgaataccgtaaaactcacaaccagggcgtgttcgacgtttacactccggacatcctgcgttgccgtaaatctggtgttctgaccggtctgccagatgcatatggccgtggccgtatcatcggtgactaccgtcgcgttgcgctgtacggtatcgactacctgatgaaagacaaactggcacagttcacttctctgcaggctgatctggaaaacggcgtaaacttggaacagactatccgtctgcgcgaagaaatcgctgaacagcaccgcgctctgggtcagatgaaagaaatggctgcgaaatacggctacgacatctctggtccggctaccaacgctcaggaagctatccagtggacttacttcggctacctggctgctgttaagtctcagaacggtgctgcaatgtccttcggtcgtacctccaccttcctggatgtgtacatcgaacgtgacctgaaagctggcaagatcaccgaacaagaagcgcaggaaatggttgaccacctggtcatgaaactgcgtatggttcgcttcctgcgtactccggaatacgatgaactgttctctggcgacccgatctgggcaaccgaatctatcggtggtatgggcctcgacggtcgtaccctggttaccaaaaacagcttccgtttcctgaacaccctgtacaccatgggtccgtctccggaaccgaacatgaccattctgtggtctgaaaaactgccgctgaacttcaagaaattcgccgctaaagtgtccatcgacacctcttctctgcagtatgagaacgatgacctgatgcgtccggacttcaacaacgatgactacgctattgcttgctgcgtaagcccgatgatcgttggtaaacaaatgcagttcttcggtgcgcgtgcaaacctggcgaaaaccatgctgtacgcaatcaacggcggcgttgacgaaaaactgaaaatgcaggttggtccgaagtctgaaccgatcaaaggcgatgtcctgaactatgatgaagtgatggagcgcatggatcacttcatggactggctggctaaacagtacatcactgcactaaacatcatccactacatgcacgacaagtacagctacgaagcctctctgatggcgctgcacgaccgtgacgttatccgcaccatggcgtgtggtatcgctggtctgtccgttgctgctgactccctgtctgcaatcaaatatgcgaaagttaaaccgattcgtgacgaagacggtctggctatcgacttcgaaatcgaaggcgaatacccgcagtttggtaacaacgatccgcgtgtagatgacctggctgttgacctggtagaacgtttcatgaagaaaattcagaaactgcacacctaccgtgacgctatcccgactcagtctgttctgaccatcacttctaacgttgtgtatggtaagaaaacgggtaacaccccagacggtcgtcgtgctggcgcgccgttcggaccgggtgctaacccgatgcacggtcgtgaccagaaaggtgcagtagcctctctgacttccgttgctaaactgccgtttgcttacgctaaagatggtatctcctacaccttctctatcgttccgaacgcactgggtaaagacgacgaagttcgtaagaccaacctggctggtctgatggatggttacttccaccacgaagcatccatcgaaggtggtcagcacctgaacgttaacgtgatgaaccgtgaaatgctgctcgacgcgatggaaaacccggaaaaatatccgcagctgaccatccgtgtatctggctacgcagtacgtttcaactcgctgactaaagaacagcagcaggacgttattactcgtaccttcactcaatctatgtaa

SEQ ID NO: 484891 - DNA, 993 bp, Shigella sonnei
atgtttactccgtatctgcataaaaaccatgcgagttacgggcctataagccaggcgagatatgatctatatcaatttctcatctataatgctttgttagtatctcgtcgccgacttaataaagagagagttagtgtgaaagctgacaacccttttgatcttttacttcctgctgcaatggccaaagtggccgaagaggcgggtgtctataaagcaacgaaacatccgcttaagactttctatctggcgattaccgccggtgttttcatctcaatcgcattcgtcttctatatcacagcaaccactggcacaggcacaatgcccttcggcatggcaaaactggttggcggcatttgcttctctctggggctgattctttgtgttgtctgcggagccgatctctttacttccaccgtgttgattgttgttgctaaggcgagtgggcgcatcacctggggtcagttggcgaaaaactggctaaatgtctattttggcaacctggtcggcgcactgctgtttgtacttttaatgtggctttccggcgagtatatgaccgcaaatggtcaatggggactaaacgtcctacaaaccgccgaccacaaagtgcaccatacttttattgaggccgtctgtcttggtatcctggcaaacctgatggtatgtctggcagtatggatgagttattctggccgcagcctgatggacaaagcgttcattatggtgctgccggtcgcgatgtttgttgccagcggttttgagcacagtatcgcaaacatgtttatgatcccgatgggtattgtaatccgcgacttcgcatccccggaattttggaccgcagtcggttctgcaccggaaaatttttctcacctgaccgtgatgaatttcatcactgataacctgattccggttacgatcggcaacattatcggtggtggtttgttggttgggttgacatactgggtcatttacctgcgtgaaaacgaccaccattaa

SEQ ID NO: 484892 - DNA, 1761 bp, Shigella sonnei
atgacgcaaacatttatccccggcaaagatgccgctctggaagattccatcgctcgcttccagcaaaaactttcagacctcggctttcagattgaagaggcctcctggctgaatcctgtgcctaacgtctggtctgtacatattcgcgacaaagagtgcgcactgtgttttaccaacggtaaaggcgcaaccaaaaaagcggcgctggcttctgcacttggtgaatatttcgagcgtctctcaaccaactacttttttgctgatttctggctgggcgaaaccatcgccaacggtccgttcgtgcattatcccaacgaaaaatggttcccactgaccgaaaatgacgatgtgccagaaggactactcgatgaccgtctgcgcgcgttttatgatccggagaatgaactgaccggcagcatgctgattgacctacaatccggtaacgaagatcgtggtatttgcggcctgccgtttacgcgtcagtccgacaatcagaccgtttatattccgatgaatatcattggtaacctgtacgtctccaacggtatgtccgcaggtaatacccgcaacgaagcacgcgttcagggattgtctgaagttttcgaacgctacgtgaaaaaccgcattattgctgaaagcatcagcctgccagagatcccggcagacgtgctggcgcgttacccagcagtagttgaagccatcgaaacgctggaagcggagggtttcccaatcttcgcttatgacggttcgcttggcggccagtatccggtgatttgcgtggtactgttcaatcctgctaacggtacctgctttgcctctttcggtgcgcatcctgattttggcgtagcactggaacgtaccgtgaccgagctgctgcaaggtcgtggcctgaaagatttggatgtgtttactccgccaaccttcgatgatgaagaagtcgctgaacataccaacctcgaaacgcactttatcgattccagcggtttaatctcctgggacctgttcaagcaggatgccgattatccgtttgtggactggaatttctccggcaccacggaagaagagtttgctacgctgatggctatcttcaacaaagaagataaagaagtttatattgccgattacgagcatctgggcgtttatgcttgccgtattatcgtgcctggcatgtccgatatttatccggctgaagatctgtggctcgcgaataacagtatgggcagccatttacgtgaaacgattctttcgctaccaggcagcgagtgggaaaaagaagattacctgaacctcatcgagcaactggatgaagaaggttttgatgactttacccgcgtgcgtgagctgttgggtctggcgaccgggtcggataacggttggtacaccctgcgtatcggtgaattaaaagccatgctggcgctggctggtggcgatctggaacaggctctggtctggaccgaatggacgatggagtttaactcatcagtatttagtccggaacgcgccaactattatcgctgcctgcaaacgttgttattactggcacaggaagaagatcgccagccgctgcaatatctgaatgcgtttgttcgcatgtacggcgcagatgccgtagaagccgccagtgcggcaatgagcggcgaagcggcgttttacggcctgcaaccggtagatagcgatctgcacgcgtttgctgcacatcagtcgttgttgaaggcctacgaaaagctgcagcgcgccaaagcagcattctgggcaaaataa

SEQ ID NO: 484893 - DNA, 693 bp, Shigella sonnei; identical to SEQ ID NO: 459708

SEQ ID NO: 484894 - DNA, 1089 bp, Shigella sonnei
atggctcaaatcttcaattttagttctggtccggcaatgctaccggcagaggtgcttaaacaggctcaacaggaactgcgcgactggaacggtcttggtacgtcggtgatggaagtgagtcaccgtggcaaagagttcattcaggttgcagaggaagccgagaaggattttcgcgatcttcttaatgtcccctccaactacaaggtattattctgccatggcggtggtcgcggtcagtttgctgcggtaccgctgaatattctcggtgataaaaccaccgcagattatgttgatgccggttactgggcggcaagtgccattaaagaagcgaaaaaatactgcacgcctaatgtctttgacgccaaagtgactgttgatggtctgcgcgcggttaagccaatgcgtgaatggcaactctctgataatgctgcttatatgcattactgcccgaatgaaaccatcgacggtatcgccatcgacgaaacgccagacttcggcaaagatgtggtggtcgccgccgacttctcttcaaccattctttcccgtccgattgacgtcagccgttatggcgtgatttacgctggcgcgcagaaaaatatcggcccggctggcctgacaatcgtcatcgttcgtgaagatttgctgggcaaagcgaatatcgcgtgtccgtcgattctggattattccatcctcaacgataacggctccatgtttaacacgccgccgacatttgcctggtatctatctggtctggtctttaaatggctgaaagcgaacggcggtgtagctgaaatggataaaatcaatcagcaaaaagcagaactgctatatggggtgattgataacagcgatttctaccgcaatgacgtggcgaaagctaaccgttcgcggatgaacgtgccgttccagttggcggacagtgcgcttgacaaattgttccttgaagagtcttttgctgctggccttcatgcactgaaaggtcaccgtgtggtcggcggaatgcgcgcttctatttataacgccatgccgctggaaggcgttaaagcgctgacagacttcatggttgagttcgaacgccgtcacggttaa

SEQ ID NO: 484895 - DNA, 1284 bp, Shigella sonnei
atggaatccctgacgttacaacccatcgctcgtgtcgatggcactattaatctgcccggttccaagagcgtttctaaccgcgctttattgctggcggcattagcacacggcaaaacagtattaaccaatctgctggatagcgatgacgtgcgccatatgctgaatgcattaacagcgttaggggtaagctatacgctttcagccgatcgtacgcgttgcgaaattatcggtaacggcggtccattacacgcagaaggtgccctggagttgttcctcggtaacgccggaacggcaatgcgtccgctggcggcagctctttgtctgggtagcaatgatattgtgctgaccggtgagccgcgtatgaaagaacgcccgattggtcatctggtggatgcgctgcgcctgggcggggcgaagatcacttacctggaacaagaaaattatccgccgttgcgtttacagggcggctttactggcggcaacgttgacgttgatggctccgtttccagccaattcctcaccgcactgttaatgactgcgcctcttgcgccggaagatacggtgattcgtattaaaggcgatctggtttctaaaccttatatcgacatcacactcaatctgatgaagacgtttggtgttgaaattgaaaatcagcactatcaacaatttgtcgtaaaaggcgggcagtcttatcagtctccgggtacttatttggtcgaaggcgatgcatcttcggcttcttactttctggcagcagcagcaatcaaaggcggcactgtaaaagtgaccggtattggacgtaacagtatgcagggtgatattcgctttgctgatgtgctggaaaaaatgggcgcgaccatttgctggggcgatgattatatttcctgcacgcgtggtgaactgaacgctattgatatggatatgaaccatattcccgatgcggcgatgaccattgccacggcggcgttatttgcaaaaggcaccaccacgctgcgcaatatctataactggcgtgttaaagagaccgatcgcctgtttgcgatggcaacagaactgcgtaaagtcggtgcggaagtagaagaggggcacgattacattcgtatcactccaccggaaaaactgaactttgccgagatcgcgacatacaatgatcaccggatggcgatgtgtttctcgctggtggcgttgtcagatacaccagtgacgattcttgatcccaaatgtacggccaaaacatttccggattatttcgagcagttggcgcggattagccaggcagcctga

SEQ ID NO: 484896 - DNA, 804 bp, Shigella sonnei
atgaccagaattgcatgcgtgggtatcacagttcaggacagaatttattctttgcccactctgccggagggcggcgggaaatatcaggcaaatcattatcttgagattggtggcggcccggcagcaacagccgctgttgcaatcgcaaagcttggcgtggaggttgatttcatcggtcgcgtcggcgatgacagttgtggaaataccttacttgcagaacttgagggttggggcgtcaataccgcattttgccgccgatatcctaacgcccgttcgtcgcaatcagcgatcctcgttgatcagcatggcgaacggattatcgttaattatccaagtcctgatctcggtactgatgccgaatggttagaagcgatcgatttctctcgttatgatctgattctggccgatgttcgctggcatagcggtactgaaaaagcattctcgctagcgcgccttgcgggtgtgacaacgcttttagacgccgatatgacaccgcaggatatttctccacttgtcgcgcttgccgatcacgccgtgttctcaacaccagggctgaaacgcatgactggcctgcagtcacctgaagaaggtttgttccaggcaacgacacaaacagcaggtaaagtgtatgttacgctgggttctgaaggatcgttgtggattgaagatggtcatttgtgtcaacaggaggcattttctgtcaatgtggttgataccactggagcaggcgatgtttttcacggcgcactcgcggtagcgttggcagaaaaaatgccaacaaaagaggtaatgccgatcagttaa

SEQ ID NO: 484897 - DNA, 879 bp, Shigella sonnei
atggcaaccattgcatttctcgggctggggcagatgggtagcccaatggctaacaatctattgcaaaaagggcattcattgcaggtatttgatgtcaatgcacaggccgtcgatgcgctagttacgcagggggccactgcggcacaaaccccagcggaagcagcagcaggcgctgaatttatcatcactatgcttcccaatggtgacattgttcgacaggttctgttgggggaaaaaggcgtctgtgaggctgtttcatctgacgcgttattgattgatatgtcgactattcatcccttacagaccgatgcattaatacgggagttacaagaaaaaggcatcagtatgatggacgctcccgtgggcagaacgtccgtgaatgcgattgatggcacattgctgattttagcgggtggcactgatgagcagattgcacgtgcacgcccgattctcatgtgcatgggtaatgagctggtcgaggctggcggcccaggaatggggatccgcgtgaagctaattaacaactatatgagcattgcgcttaatgcgctgtcctccgaggccgctgtgttatgtgagtcactgggattaaatcttgatgtcgcaattaaggtgatgagtggtacggcagcagggaaaggacattttacgaccacctggcctggcaaagtgctgaaaggcgatctttcacccgccttcatggtggatctggcgttgaaagatctgcgtattgcagttgacgtcgctcgggagacgggggcaccgctcaatatggggattgcagcagaaagttattacgctgcagcaagtcaagacggcaaagggcggcaggactggagtgccctgctaaatcaggttcgccagcaggctggtctttaa

SEQ ID NO: 484898 - DNA, 888 bp, Shigella sonnei
atgtcatcccacttcaccccatttacgctgaaagatatctcccgcccaggtggtggatttgccatgttagctgtcgatcagcgtgaggccatgcgcttgatgtttgcggcagcagggcagccaaaacccatcgctgacagtgtactcaccgattttaaagttgccgcgacccgaatcctttctccttatgcttctgccgttctggcggataaacaattttgtcttgagcaaatagtcgagcagggcgctgttgctaattcttgcggcctgattgtcgctgccgatctttttatcccaggtaatggcatcccggttgatagcgttgaaatagatatgtccgtcgacccgcataaagcccgtgaaatgggggctaaggcaatgaaattacttgtactctggcgtgaagatgaacccgcagaggaacgtctggcaatggttgataaatttgttcgtcgctgccgtagtgccgggctggtgagcattattgaacctgtggtgcgtccacctcgtcgcggttgggactttgatcgtgaaagcaccattgttgccgccgccgcagagcttggtggaacagaggctgatctttacaaagccgagatgccattagggggcaaaggcgatgaaaaaaccttacttgccgcctgtcagcaacttaacgatcagatgaagatgccgtgggtaattctttcttctggcgttgatgccgatatttttggccgtgcagtaagtattgccatgaaaggtggtgcgtcgggcttcctggctggacgagcggtttgggcgtcggttgttggtgcacaagatccacaaactatgctgcgcgatgtctctgttcctcgtttacaacggttggcagaaattgtcgatgaaggtatcgcgcaacgctaa

SEQ ID NO: 484899 - DNA, 1011 bp, Shigella sonnei
atggataaaattacccaggttttattttcagatattgggaaagtcaccactcaatatgttgaagtaccacaccaggaacttaaaccgcacgaagtgcggattgcgcctgtgttctatgggatatgcggttcggatctgcatgttctgaaaggcggtcatccgtttgccaaaccacctgtcgtccccggtcatgaaattgcagcgcgcgttacggaagttggcagcgacgttaaaaatgtacagccgggcgatcatgttgtggtcgatcccatcatggcttgcatggaatgccgagcctgcaaagcaggacgttttaatctttgtgaaccaccgcaggttgctggttttcgcgcaccgggctttgctcgctcacaacacattgttcctgcgcgtaattgccatgtcgcaccagcctctttaccgctaaaaatgttggcctttgccgaaccggcggcttgtgcccgtcactgcgttaaccgaatgccgaaagcttctctggaaagcgtactggtaattggtgccggaacgataggcttatccatcgtgcaggcactgcgcattatgggggcaggtaagattaccgtgattgaacctgacgctgccaaacgcgcgctggcgttaaagctgggcgcagcagaagtttgggcaccaggtgagctggccgcagatgtgcgatttacgggggcgattgatgtcgttgcagcgcaggccacgcttaacgatgcatgtacccgtgtatatgccggaggcaccgtcgtgtgcatgggcgtaccaagtgggccgcgtgaaataccattaccgatgatgcaacgtttcgagcgtgacttgctcaactctggcatgtacatccctgaagatttcgatgctgttatcgaatggctggcggatgggcggtttgataccagtgaactggttaccgatttatttgccattgaggatgcagcggcggcatttgaacgcgcgcagcaaaatgactccataaaggtcatgctgcaatttgcgccggaatga

SEQ ID NO: 484900 - DNA, 1434 bp, Shigella sonnei
atgagtcaaatcaccagtcctgcaacttattcaattagtcggccacaggacgtaattgatattgttaataagaactctgcaatcaacaccagtatcggcgttatttttattgctttgggcggcatattgattgatgcctaccaggcggcgatggtggggtttggtaataaatacattgccgctcaattcggcatttcgccgggtcttgctgcaaccgtcaatgcatcagtattaatcgccgcgttaattggcggtttattagcgaaccgagtaataaaccgctttgggcaaaagcgggcatttattattggcatggggctgtgcaccatcggtgctgcagcggtagctattgctcccagtatctggtgggtgctggtgtgccgcgtcatcatgggctttggtttaggcatcgacttccctttggcaaccaatgccgtggcagagcttcgtggttcaacgtcgaagaaaaccggaacgtcggtcaacctctggcaaatggcctggtatgtttcgacaaccgttgtttatttggtacttttgccgctgcttctgtcgggtatcgctgaagaacaattgtggcgttacggaatattcatcggagctatttttgcagtcatcttcatgattttgcgttacttctttattggtgaatccgcaatgtgggccgcacgcgtcgggcgttaccaggaagcgtgcgacattctgggaaaacgttatggtgttcaggctcgcgttgcggcatcgggtacaacagaagcgaaattctcggaaaaagcagagaataaatacagtggtggatatggcatcttatttaatgatcgttaccgcaaacgcaccattcttggctgtgtcgtggcaaccatgcaggcgtggcaatataacgccgtaggtgtttatcttcctcttacgttggcgggaataataagtggcgggcttactggcgcgttgaccggttctgccgtcgtgaatgccctttgtggggtgacaggcgggatgatcggctcgtttattctccaacgactgggtactcgccgacagtcgatgtatggatttgctgttgtgaccttagcattgctgtcgttaggcgcactggcaacgactaatccctggctgtctttagggttattgggatcaattattttcttccattcagcgggtcctggtgggctgggcatgaccattgccacactctcttatcctcccgctattcgccctactggggtcggatttgcccgcgctattatgcgcacaggggcaattgcaggactcattttctggccgatgctgtggggtgcgttgaaaactgaagcgttttactggttggcaatcgtgccattcctggggttcctgacctgcgtattgattaattgggaaccactgggtgcaaatgttgatgctgaggatgcagaggttctggctgaattgaagaaataa

SEQ ID NO: 484901 - DNA, 1350 bp, Shigella sonnei
atgtctgaaaagttacccgcaccgcgtgaagggctttccggtaaagccatgagacgtgtcgttatgggcagtttcgcaggcgcgttaatggaatggtatgacttctttatttttggcacggcagcaggactggtatttgcaccgctgttttatccagacagcgatccttttataggtcttatagccgcctttgcgacctttggtgtcggttttctgactcgtcctttaggtggcatcgtctttggtcattttggcgataaaatcgggcgaaaaataacacttatctggacgctggctattgtcggttgctccacatttttgattggttttattccgacgtatcaggaaattggcatttgggcaccgcttgtattaatggtgctgcgtttgattcagggctttggtcttggtggcgagtacggcggagcggcattgatgaccatagaatcagcgcccgaatcccgacgcggatttttaggttcactcccgcaaacggctgcgtctgtgggtattatgctggcaaccggtatttttgctctctgtaaccattttcttacttcggagcagtttctctcctggggatggcgcattccgttttggctttctgcggtgatgttgatcgttgggctgtttatccgcctgcataccgaagaaacactggattttcaaaagcaaaaaacgacgaataataaagaaaagtccgttcctccgttgattgaattattcaaaaaacatccacgaaatattttattggcactgggtgcgaggctggcggaaagtgtctcctctaatattattaacgcctttggtattgtctatatttccagccaattagcattgtcgcgagatattcccctgacgggtatgttgattgcctcggcgatcggtattttcagttgtccattggttggatggttatcagatcgtataggtcaaaaaagtctgtatttgtcgggagcaggattttgtgtcctgttcgcgtttcctttcttcttattactggatagcaaaagtacgctcatcatctggtgcagtatgatcctcggctacaacttaggtccgacgatgatgtttgccgtgcagccaacacttttcacccgcatgttcggtaccaaagtacgatataccggcctttcttttgcttatcaattttccgcgattcttggcggactaagcccccttatcgcctcaagtttgctggcgctagggggaggaaaaccgtggtatgtcgctctgtttttatttgctgtctcagttctttcctttgtttgcgtctggctgattgagccgaccgatgaacaagaaaccgcttcttaccgctacatcagggaacaatctcatgaaaactga

SEQ ID NO: 484902 - DNA, 888 bp, Shigella sonnei
atgaaaactgaacgaaaaaacgagcattacctggcgctacaacaggcgtttgacgcgccatggcctgggcctgtaggagagttagtgacgctggaaaaaggcaatattcacctgcagatttatccgcatgatggtgccaggataacctcgttaaaggcatttggttctgaagtattacgccaatggcagccgcagcgcagagcttttcagtatggctgtttcccaatggtgccgtgggcagggcgactggggaatgcgacgctgaatgctggtgggcaatgttattctttacccgccaataaaccaccacatgcgttgcatggtatggcttgttactcaacgtgggaaatcatcgacaaaacagcagattccctgactttacgtatgcccctggcttcaccgtggccctggcaaggggaagtgattcagacttttttgctggagaacgatgcgctggttttgcaactggaagtccattcatatgccgatacattcccggcctccgcaggctggcatccgtggtttgcgaaaaagctgactccgcaaaatacagaatcgttgcaggtgctttttgatgcggactggcaagaagaagcgggtagtgatgaactgccaactggaaatcgtatctttcctcaagccggtccctgggatgactgttttggtttttataacggggtgaaggttaagttactgtggcctggtaaactcgcgatgaccatgatctcttctgcaaacagtctggtggtatttgataaacagcccgatgccacctgtattaacccgctgactcaggcacctaacgcaataaatctaacgccggaattggtgacaccagataggccgctggtcatcgaaactcgttggcaatttacacctgaatcttaa

SEQ ID NO: 484903 - DNA, 600 bp, Shigella sonnei
atgctctatatctttgatttaggtaatgtgattgtcgatatcgactttaaccgtgtgctgggagcctggagcgatttaacgcgtattccgctggcatcgcttaagaagagttttcatatgggggaggcgtttcatcagcatgagcgtggggaaattagcgacgaagcgttcgcagaggcgctgtgtcatgagatggctctaccgctaagctacgagcagttctctcacggctggcaggcggtgtttgttgcgctgcgcccggaagtgatcgccatcatgcataaactgcgtgagcaggggcatcgcgtggtggtgctttccaataccaaccgcctgcataccaccttctggccggaagaatacccggaaattcgtgatgctgctgaccatatctatctgtcgcaagatctggggatgcgcaaacctgaagcacgaatttaccagcatgttttgcaggcggaaggtttttcacccagcgatacggtctttttcgacgataacgccgataatatagaaggagccaatcagctgggcattaccagcattctggtgaaagataaaaccaccatcccggactatttcgcgaaggtgttatgctaa

SEQ ID NO: 484904 - DNA, 873 bp, Shigella sonnei
atgctaaaaaccattcaggacaaagccaggcaccgtacccgtccactatgggcctggctaaaactactctggcaacgtattgatgaggacaacatgacaaccctggcaggtaaccttgcctatgtgtctttgctctcattagtgccgctggttgccgttgtttttgcgcttttcgccgcttttcccatgttttccgacgtcagcattcagttacgtcactttatttttgccaactttctgcctgctactggcgatgttattcagcggtatatcgaacaatttgttgccaattccaacaagatgaccgccgttggggcgtgcgggctgatcgtcaccgcgttattgttgatgtactccatcgatagcgcgttgaataccatctggcgcagtaaacgagcgcgaccaaaaatttactcgtttgccgtgtactggatgatcttaacgctggggccgctgctggcaggggccagtctggcgatcagttcctatttgttctccctgcgctgggcgagcgatctcaatactgtcatcgataacgtgctgcgtatttttccgctgctgttgtcgtggatctccttctggttgctgtacagcattgttcctaccatccgcgtacctaaccgcgacgcgattgtcggcgcgtttgtcgctgcactcctgttcgaagcaggaaagaaaggtttcgcgctttatatcaccatgttcccgtcatatcagctcatttacggcgtgctggcggtgatccccattctcttcgtttgggtctactggacatggtgtatcgtcttgcttggcgcggaaattactgtcactctcggggaataccgcaaactaaaacaagcagctgaacaagaagaagacgacgaaccatga

SEQ ID NO: 484905 - DNA, 438 bp, Shigella sonnei; identical to SEQ ID NO: 461086

SEQ ID NO: 484906 - DNA, 942 bp, Shigella sonnei
atgtatcaccttcgggttccacaaacagaagaagagttagagcgttactatcagtttcgctgggaaatgttgcgtaagcccctgcatcaaccaaaaggttcggaacgcgacgcgtgggatgcgatggcgcatcaccagatggtcgtcgacgagcagggtaatctggtggcggtaggccgattgtatattaatgccgacaatgaagcgtccattcgctttatggccgttcacccggacgtgcaggacaaagggttaggaacgctgatggcgatgaccctggagtcggtggcgcgtcaggaaggcgttaagcgcgtgacctgtagcgcccgtgaagacgcggtggagtttttcgccaagctgggattcattaatcagggggagatcaccaccccaactaccacgccgattcgccattttttgatgattaaacccgttgccactctggatgacattctgcatcgcggtgactggtgcgcgcagctgcaacaggcgtggtacgaacatatcccgttaagcgaaaaaatgggcgtgcgcattcagcaatataccgggcaaaaatttatcaccaccatgccagaaaccggtaatcagaatccgcaccatacgttgtttgccgggagtttattctcgctggcgacgctcaccggttggggacttatctggctgatgctgcgtgaacgccacctcggcggaacgattattctggcggatgcgcatatccgctacagcaagccgattagcggtaaacctcatgcggtagccgaccttggtgccttaagcggcgatctcgaccgtctggcgcgcggacgaaaagcacgggtgcagatgcaagttgaaatctttggcgacgagacgccgggtgcagtgtttgaaggcacgtatatcgttctgcccgcgaagccatttggcccgtatgaagagggcgggaacgaagaagagtag

SEQ ID NO: 484907 - DNA, 1005 bp, Shigella sonnei
gtgaaactggatgaaatcgctcggctggcgggagtgtcgcggaccactgcaagctatgttattaacggcaaagcgaagcaataccgtgtgagcgacaaaaccgttgaaaaagtcatggctgtggtgcgtgagcacaattaccacccgaacgccgtggcagctgggcttcgtgctggacgcacacgttctattggtcttgtgatccccgatctggagaacaccagctatacccgcatcgctaactatcttgaacgccaggcgcggcaacggggttatcaactgctaattgcctgctcagaagatcagccagacaacgaaatgcgctgtattgagcaccttttacagcgtcaggtcgatgccattattgtttcgacgtcgttgcctcctgagcatcctttttatcaacgctgggctaacgacccgttcccgattgtcgcgctggaccgcgccctcgatcgtgaacacttcaccagcgtggttggtgccgatcaggatgatgccgaaatgctggcggaagagttacgtaagtttcccgccgagacggtgctttatcttggcgcgctgccggagctttctgtcagcttcctgcgtgaacaaggtttccgtactgcctggaaagatgatccgcgcgaagtgcatttcctgtatgccaacagctatgagcgggaggtggctgcccagttattcgaaaaatggctggaaacgcatccgatgccgcaggcgctgttcacaacgtcgtttgcgttgttgcaaggggtgatggatgtcacgctacgtcgcgatggtaaactgccttctgacctggcaattgccacctttggcgataacgaactgctcgacttcttacagtgcccggtgctggcagtggctcaacgtcaccgcgatgtcgcagagcgtgtgctggagattgtcctggcaagcctggacgaaccgcgtaagccaaaacctggtttaacgcgcattaaacgtaatctctatcgccgcggtgtgctcagccgtagctaa

SEQ ID NO: 484908 - DNA, 492 bp, Shigella sonnei
atgcgccggatattatcagtcttactcgaaaatgaatcaggcgcgttatcccgcgtgattggccttttttcccagcgtggctacaacattgaaagcctgaccgttgcgtcaaccgatgatccgacattatcgcgtatgaccatccagaccgtgggcgatgaaaaagtacttgagcagatcgaaaagcaattacacaagctggtcgatgtcttgcgcgtgagtgagttggggcagggcgcgcatgttgagcgggaaatcatgctggtgaaaattcaggccagcggttacgggcgtgacgaagtgaaacgtaatacggaaatattccgtgggcaaattatcgatgtcacaccctcgctttataccgttcaattagcaggcaccagcgataagcttgatgcatttttagcatcgattcgcgaggtggcgaaaattgtggaagttgctcgttctggtgtggtcggactttcgcgcggcgataaaataatgcgttga

SEQ ID NO: 484909 - DNA, 1725 bp, Shigella sonnei
atggagatgttgtctggagccgagatggtcgtccgatcgcttatcgatcagggcgttaaacaagtattcggttatcccggaggcgcagtccttgatatttacgatgcattgcataccgtgggtggtatcgatcatgttttagttcgtcatgagcaggcggcagtgcatatggccgatggtctggcgcgcgcgaccggggaagtcggcgtcgtgctggtaacgtcgggtccaggggcgaccaatgcgattactggcatcgccaccgcttatatggattccattccattagttgtcctttccgggcaggtagcgacctcgttgataggttacgatgcctttcaggagtgcgacatggtggggatttcgcgaccagtggttaaacacagttttctggttaagcaaacggaagacattccgcaggtgctgaaaaaggctttctggctggcggcaagtggtcgtcctggaccagtagtcgttgatttaccgaaagatattcttaatccggcgaacaaattaccctatgtctggccggagtcggtcagtatgcgttcttacaatcccactactaccggacataaagggcaaattaagcgcgctctgcaaacgctggtagcggcaaaaaaaccggttgtctacgtaggcggtggggcaatcacggcgggctgccatcagcagttgaaagaaacggtggaggcgttgaatctgcccgttgtttcctcattgatggggctgggagcgtttccggcaacgcatcgtcaggcactgggcatgctgggaatgcacggtacctacgaagccaatatgacgatgcataacgcggatgtgattttcgccgtcggggtacgatttgatgaccgaacgacgaacaatctggcaaagtactgcccaaatgccactgttctgcatatcgatattgatcctacttccatttctaaaaccgtgactgcggatatcccgattgtgggggatgctcgccaggtcctcgaacaaatgcttgaactcttgtcgcaagaatccgcccatcaaccactggatgagatccgcgactggtggcagcaaattgaacagtggcgcgctcgtcagtgcctgaaatatgacactcacagtgaaaagattaaaccgcaggcggtgatcgagactctttggcggttgacgaagggagacgcttacgtgacgtccgatgtcgggcagcaccagatgtttgctgcactttattatccattcgacaaaccgcgtcgctggatcaattccggtggcctcggcacgatgggttttggtttacctgcggcactgggcgtcaaaatggcgttgccagaagaaaccgtggtttgcgtcactggcgacggcagtattcagatgaacatccaggaactgtctaccgcgttgcaatacgagttgcccgtactggtggtgaatctcaataaccgctatctggggatggtgaagcagtggcaggacatgatctattccggccgtcattcacaatcttatatgcaatcgctacccgatttcgtccgtctggcggaagcctatggtcacgtcgggatccagatttctcatccgcatgagctggaaagcaaacttagcgaggcgctggaacaggtgcacaataatcgcctggtgtttgttgatgttaccgtcgatggcagcgagcacgtctacccgatgcagattcgcgggggcggaatggatgaaatgtggttaagcaaaacggagagaacctga

SEQ ID NO: 484910 - DNA, 945 bp, Shigella sonnei
atgccagaggtacaaacagatcattcagagacggcggagttaagcaagccacagctacgcatggtcgatctcaacttattaaccgttttcgatgccgtgatgcaggagcaaaacattacccgtgccgctcatgttctgggtatgtcgcaacctgcggtcagtaacgctgttgcacgcctgaaggtgatgtttaatgacgagctttttgttcgttatggccgtggtattcaaccgactgctcgcgcatttcaactttttggctcagttcgtcaggcattgcaactagtacaaaatgaattgcctggttcaggttttgaacccgcgagcagtgaacgtgtatttcatctttgtgtttgcagcccgttagacagcattctgacctcgcagatttataatcacattgagcagattgcgccaaatatacatgttatgttcaagtcttcattaaatcagaacactgaacatcagctgcgttatcaggaaacggagtttgtgattagttatgaagacttccatcgtcctgaatttaccagcgtgccattatttaaagatgaaatggtgctggtagccagcaaaaatcatccaacaattaagggcccgttactgaaacatgatgtttataacgaacaacatgcggcggtttcgctcgatcgtttcgcgtcatttagtcaaccttggtatgacacggtagataagcaagccagtatcgcgtatcagggcatggcaatgatgagcgtacttagcgtggtgtcgcaaacgcatttggtcgctattgcgccgcgttggctggctgaagagttcgctgaatccttagaattacaggtattaccgctgccgttaaaacaaaatagcagaacctgttatctctcctggcatgaagctgccgggcgcgataaaggccatcagtggatggaagagcaattagtctcaatttgcaaacgctaa

SEQ ID NO: 484911 - DNA, 1572 bp, Shigella sonnei
atgagccagcaagtcattattttcgataccacattgcgcgacggtgaacaggcgttacaggcaagcttgagtgtgaaagaaaaactgcaaattgcgctggcccttgagcgtatgggtgttgacgtgatggaagtcggtttccccgtctcttcgccgggcgattttgaatcggtgcaaaccatcgcccgccaggttaaaaacagccgcgtatgtgcgttagctcgctgcgtggaaaaagatatcgacgtggcggccgaatccctgaaagtcgccgaagccttccgtattcatacctttattgctacctccccaatgcacatcgccaccaagctgcgcagcaccctggacgaggtgatcgaacgcgctatctatatggtgaaacgcgcccgtaattacaccgatgatgttgaattttcttgcgaagatgccgggcgtacacccattgccgatctggcgcgagtggtcgaagcggcgattaatgccggtgccaccaccatcaacattccggacaccgtgggctacaccatgccgtttgagttcgccggaatcatcagcggcctgtatgaacgcgtacctaacatcgacaaagccattatttccgtacatacccacgacgatttaggcctggcggtcggcaactcactggcggcggtacatgccggtgcacgccaggtggaaggtgcaatgaacgggatcggcgagcgtgccggtaactgttcgctggaagaagtcatcatggcgattaaagttcgtaaggatattctcaacgtccacaccgccattaatcaccaggagatatggcgcaccagccagttagttagccagatttgtaatatgccgatcccggcaaacaaagccattgttggcagcagcgcattcgctcactcctccggtatccaccaggatggcgtgctgaaaaaccgcgaaaactacgaaatcatgacaccagaatctattggtctgaaccaaatccagctgaatctgacctctcgttcggggcgtgcggcggtgaaacatcgcatggatgagatggggtataaagaaagtgaatataatttagacaatttgtacgatgctttcctgaagctggcggacaaaaaaggtcaggtgtttgattacgatctggaggcgctggccttcatcggtaagcagcaagaagagccggagcatttccgtctggattacttcagcgtgcagtctggctctaacgatatcgccaccgccgccgtcaaactggcctgtggcgaagaagtcaaagcagaagccgccaacggtaacggtccggtcgatgccgtctatcaggcaattaaccgcatcactgactataacgtcgaactggtgaaatacagcctgaccgccaaaggtcacggtaaagatgcgctgggtcaggtggatattgtcgccaactacaacggtcgccgcttccacggcgtcggcctggccaccgatattgtcgagtcctccgccaaagccatggtgcacgtactgaacaatatctggcgtgccgcagaagtcgaaaaagagttgcaacgcaaagctcaacacaacgaaaacaacaaggaaaccgtgtga

SEQ ID NO: 484912 - DNA, 1092 bp, Shigella sonnei
atgtcgaagaattaccatattgccgtattgccgggggacggtattggtccggaagtgatgacccaggcgctgaaagtgctgaatgccgtgcgcaaccgctttgcgatgcgcatcaccaccagccattacgatgtaggcggcgcagccattgataaccacgggcaaccactgccgcctgcgacggttgaaggttgtgagcaagccgatgccgtgctgtttggctcggtaggcggcccgaagtgggaacatttaccaccagaccagcaaccagaacgcggcgcgctgctgcctctgcgtaagcgcttcaaattattcagcaacctgcgcccggcaaaactgtatcaggggctggaagcattctgtccgctgcgtgcagacattgccgctaacggcttcgacatcctgtgcgtgcgcgaactgaccggcggcatctatttcggtcagccaaaaggccgcgaaggtagcggacaatatgaaaaagcgtttgataccgaggtgtatcaccgttttgagatcgagcgtattgcccgcatcgcgtttgaatctgctcgtaaacgtcgccacaaagtcacctcaatcgacaaagctaacgtgctgcaatcctctattttatggcgtgaaatcgtcaacgagatcgccacggaatacccggatgtcgaactggcgcatatgtacatcgacaacgccaccatgcagctgattaaagatccatcacagtttgacgttctgctgtgctccaacctgtttggcgacattctgtctgacgagtgcgcaatgatcactggctcgatggggatgttgccttccgccagcctgaacgagcaaggttttggtctgtatgaaccggcaggcggctcagcaccagatatcgcaggcaaaaacatcgccaacccgattgcgcaaattctgtcgctggcactgctgctgcgctacagcctggatgccgatgatgcggcttgcgccattgaacgcgccattaaccgcgcattagaagaaggcattcgcaccggggatttagcccgtggcgctgccgccgttagtaccgatgaaatgggcgatatcattgcccgctatgtggcagaaggggtgtaa

SEQ ID NO: 484913 - DNA, 1401 bp, Shigella sonnei
atggctaaaacgttatacgaaaaattattcgacgctcacgtagtgtacgaagccgaaaacgaaaccccgctgttatatatcgaccgccacctggtgcatgaagtgacctcaccgcaggcgttcaatggtctgcgcgcccacggtcgcccggtacgtcagccgggcaaaaccttcgccactatggatcacaacgtctctacccagacgaaagacattaatgcctgtggtgaaatggcgcgcatccagatgcaggagctgattaaaaactgcaaagaatttggcgtcgaactgtatgacctgaatcacccgtatcaggggatcgtccacgtaatggggccggaacagggcgtcaccttgccggggatgaccattgtctgcggcgactcgcataccgccacccacggcgcgtttggcgcactggcctttggtatcggcacttccgaagttgaacacgtactggcaacgcaaaccctgaaacagggccgcgcaaaaaccatgaaaattgaagtccagggcaaagccgcgccgggcattaccgcaaaagatatcgtgctggcaattatcggtaaaaccggtagcgcaggcggcaccgggcatgtggtggagttttgcggcgaagcaatccgtgatttaagcatggaaggtcgtatgaccctgtgcaatatggcaatcgaaatgggcgcaaaaaccggtctggttgcaccggacgaaaccacctttaactatgtcaaaggccgtttgcatgcgccgaaaggcaaagatttcgacgacgccgttgcctactggaaaaccctgcaaaccgacgaaggcgcaactttcgataccgttgtcactctgcaagcagaagaaatttcaccgcaggtcacctggggcaccaatccaggccaggtgatttccgtgaacgacaatattcccgatccggcttcgtttgccgatccggttaaacgcgcgtcggcagaaaaagcgctggcctatatggggctgaaaccgggcattccgctgaccgaagtggctatcgacaaagtgtttatcggttcctgtaccaactcgcgcattgaagatttacgcgcggcagcggagatcgccaaagggcgaaaagtcgcgccaggcgtgcaggcactggtggttcccggctctggcccggtaaaagcccaggcggaagcggaaggtctggataaaatctttattgaagccggttttgaatggcgcttgcctggctgctcaatgtgtctggcgatgaacaacgaccgtctgaatccgggcgaacgttgtgcatccaccagcaaccgtaactttgaaggccgccaggggcgcggcgggcgcacgcatctggtcagcccggcaatggctgccgctgctgctgtgaccggacatttcgccgacattcgcaacattaaataa

SEQ ID NO: 484914 - DNA, 606 bp, Shigella sonnei
atggcagagaaatttatcaaacacacaggcctggtggttccgctggatgccgccaatgtcgataccgatgcaatcatcccgaaacagtttttgcagaaagtgacccgtacgggttttggcgcgcatctgtttaacgactggcgttttctcgatgaaaaaggccaacagccaaacccggacttcgtgctgaacttcccgcagtatcagggcgcttccattttgctggcacgagaaaacttcggctgtggctcctcgcgtgagcacgcgccctgggcattgaccgactacggctttaaagtggtgattgcgccgagttttgctgacatcttctacggcaatagctttaacaaccagctgctgccggtgaaattaagcgatgcagaagtggacgaactgtttgcgctggtgaaagccaatccggggatccatttcgacgtggatctggaagcgcaagaggtgaaagcgggagagaaaacctatcgctttaccatcgatgccttccgccgccactgcatgatgaacggtctggacagtattgggcttaccttgcagcacgacgacgccattgccgcttatgaagcaaaacaacctgcgtttatgaattaa

SEQ ID NO: 484915 - DNA, 1869 bp, Shigella sonnei
atgagcactgataataagcaatcattgcccgcgattaccctcgcggcgattggagttgtctacggcgatattggtaccagcccgttatatacacttcgtgaatgtttgtccggccagtttggttttggcgttgaacgcgatgccgtgtttggctttttatcgctgatcttctggctgctaatctttgtggtttccattaaatatctcaccttcgtgatgcgggcagataacgccggtgagggggggatcctgacgttgatgtcgcttgccgggcgtaatacgtcggcgcgaaccacatcaatgctggtgattatggggctaatcggcggcagctttttctatggtgaagtcgtcataacacccgctatttcggtgatgtcagccattgaaggtctggaaatcgtcgccccgcagctggatacctggatagttcccctctcaattatcgttctcactttattatttatgattcaaaagcatggcacggctatggtcggtaagctgtttgcgccgatcatgctgacctggtttttgattctggcaggactggggttacgtagcattattgctaacccggaagtgctgcatgcgctgaatccgatgtgggcgatgcatttcttccttgaatacaaaacggtttcttttattgcattaggggcagtggtgttgtcgattacgggggtcgaggcgctgtatgctgatatggggcactttggtaagttccctattcgcctggcgtggttcaccgtcgtattaccttccttgacccttaattacttcggtcagggagcgctgttgttaaagaacccggaagcgattaagaacccgttcttcctgttggcaccggactgggcgctgatcccgctgctgatcatcgccgcactggcgacggtaattgcctcgcaggcggttatctctggcgtcttctcattgacgcgtcaggcggtacgtctgggatatttgtcgccgatgcgcattattcacacctccgaaatggagtcagggcaaatctatattccgtttgtgaactggatgctctatgtcgcggtcgtgattgtgattgtcagctttgagcactccagcaacctggcggcggcgtacgggattgcggtgaccggaaccatggtgctgacgtctattctctcgactaccgtggcacgtcagaactggcactggaataagtattttgttgcgctgatcctgattgctttcctttgtgtcgatattccattgttcaccgctaacctcgataaactgctctccggcggctggttgccattgagcctcggtactgtgatgtttatcgtgatgaccacctggaagagcgagcgtttccgcttgctgcggcggatgcatgaacatggtaactctctggaagcgatgattgcttcgctggagaaatcaccgcctgttcgcgtgcccgggaccgcggtgtatatgtcgcgtgcaatcaacgtcattccctttgcgctgatgcataaccttaaacataacaaggtattgcatgagagggtgattctgttaactctgcgcaccgaagacgcgccatatgtccataacgtccgtcgggtacagattgaacaactgtcgcccactttctggcgcgtggtggcaagttatggttggcgagaaacgccaaacgtggaagaagttttccaccgctgcggtctggaaggattaagttgccggatgatggaaacctccttctttatgtcgcatgagtcgttgatcctcggcaaacgcccgtggtatttgcgtctgcgcggcaagctgtacttgctgctgcaacgtaatgcgctgcgtgcaccagatcaatttgaaatcccgccaaacagggttatcgaactgggtactcaggtcgaaatctaa

SEQ ID NO: 484916 - DNA, 420 bp, Shigella sonnei
atgaaaaaaggcaccgttcttaattctgatatttcatcggtgatctcccgtctgggacataccgatacgctggtggtgtgtgatgctggtttacccatccccaaaagtacaacgcgtatcgatatggcattaacccagggtgtaccttcttttatgcaggtgctgggcgtcgtcacaaatgaaatgcaggtcgaggctgccattatcgcggaagagatcaaacaacataatccgcaactccacgaaacgttgctcactcaccttgagcagctgcaaaaacaccagggaaataccattgaaattcgttacaccacgcatgaacaattcaaacaacaaaccgcagaaagtcaggcggtaattcgcagcggagaatgttctccgtatgcgaatatcattctctgtgctggcgtgacgttctga

SEQ ID NO: 484917 - DNA, 1506 bp, Shigella sonnei
atggaagcattacttcagcttaaaggcatcgataaagccttcccgggcgtaaaagccctctcgggcgctgcgttaaatgtctatccgggccgcgtgatagcgctggtgggcgaaaacggcgcgggtaaatccaccatgatgaaagtgcttactggtatctatactcgcgatgccggcacgcttttatggctggggaaagaaacgacatttaccgggccgaaatcttcccaggaagccgggattgggattatccatcaggaactgaacctgatcccgcagttgaccattgccgaaaacattttcctcggtcgtgagtttgttaatcgctttggcaaaattgactggaaaaccatgtatgccgaagcggataaattgctggctaaacttaacctgtgctttaaaagcgacaagctggtgggcgatctttccatcggtgaccagcaaatggttgaaatcgccaaagtgctgagctttgagtcgaaagtcatcattatggatgaaccgaccgatgcgctgaccgataccgaaaccgaatccctgttccgcgtcatccgcgagctgaaatcgcaaggccgcggtattgtctatatctcccaccgcatgaaagaaatcttcgagatttgcgatgacgttaccgtttttcgtgacgggcaatttattgctgagcgcgaagtggcatcactgaccgaagattcgctgattgagatgatggtgggccgcaagctggaagatcaatatccacacctggacaaagcgccgggagatatccgcctgaaagtcgataatctctgcggacctggcgttaacgatgtctcttttactttacgcaaaggcgaaattcttggcgtctctggtttgatgggcgcaggtcgtaccgaactgatgaaagtgctctacggcgcacagccgcgcaccagcggttacgtcaccctggatgggcatgaagtcgttacccgttcaccgcaggatggcctggcaaacggcattgtgtatatctccgaagaccgtaaacgtgacggtttagtgttgggcatgtcagtaaaagagaacatgtcgctgacagcgctgcgctacttcagccgcgctggcggcagtttgaagcatgccgatgaacagcaggcagtgagtgatttcattcgtctgtttaatgtgaaaacaccgtcgatggaacaggcaattggtctgctttccggtggcaatcagcaaaaagtggcgattgcccgcggtctgatgacacgccccaaagtgttgatccttgatgaacctacccgtggcgtagatgtcggcgcgaaaaaagagatctatcaactgattaaccagttcaaagccgatggcttgagcatcattctggtgtcatcggagatgccagaagtattaggcatgagcgatcgcatcatcgtcatgcatgaagggcatctcagcggggaatttactcgtgagcaggccacccaggaagtgttaatggctgccgctgtgggcaagcttaatcgcgtgaatcaggagtaa

SEQ ID NO: 484918 - DNA, 966 bp, Shigella sonnei
atgacaacccagactgtctctggtcgccgttatttcacgaaagcgtggctgatggagcagaaatcgcttatcgctctgctggtgctgatcgcgattgtctcgacgttaagcccgaactttttcaccatcaataacttattcaatattctccagcaaacctcggtgaacgccattatggcggtcgggatgacgctggtgatcctgacgtcgggcatcgacttgtctgtaggttctctgttggcgctaaccggcgcagttgctgcatctatcgtcggcattgaagtcaatgcgctggtggctgtcgctgctgctctcgcgttaggtgccgcaattggtgcggtaaccggggtgattgtagcgaaaggtcgcgttcaggcgtttatcgctacgctggttatgatgcttttactgcgcggcgtgaccatggtttataccaacggtagcccagtgaataccggctttactgagaacgccgatctgtttggctggtttggtattggtcgtccgctgggcgtgccgacgccagtctggatcatggggattgtcttcctcgcggcctggtacatgctgcatcacacgcgtctggggcgttacatctacgcgctgggcggcaacgaagcggcaacgcgtctttctggtatcaacgtcaataaaatcaaaatcatcgtctattctctttgtggtctgctggcatcgctggccgggatcattgaagtggcgcgtctctcctccgcacaacccacggcggggactggctatgagctggatgctattgctgcggtggttctgggcggtacgagtctggcgggcggaaaaggtcgcattgttgggacgttgatcggcgcattaattcttggcttccttaataatggattgaatttgttaggtgtttcctcctattaccagatgatcgtcaaagcggtggtgattttgctggcggtgctggtagacaacaaaaagcagtaa

SEQ ID NO: 484919 - DNA, 582 bp, Shigella sonnei
atgaacatgaaaaaactggctaccctggtttccgctgttgcgctaagcgccaccgtcagtgcgaatgcgatggcaaaagacaccatcgcgctggtggtctccacgcttaacaacccgttctttgtatcgctgaaagatggcgcgcagaaagaggcggataagcttggctataacctggtggtgctggactcccagaacaacccggcgaaagagctggcgaacgtgcaggacttaaccgttcgcggcaccaaaattctgctgattaacccgaccgactccgacgcagtaggtaatgctgtgaagatggctaaccaggcgaacatcccggttatcactcttgaccgccaggcaacgaaaagtgaagtggtgagccacattgcttctgataacgtactgggtggcaaaatcgccggtgattacatcgcgaagaaagcgggtgaaggtgccaaagttatcgagctgcaaggcattgctggtacatccgcagcccgtgaacgtggcgaaggcttccagcaggccgttgctgctcacaagtttaatgttcttgccagccagcagattttgatcgcactaaaggtttga

SEQ ID NO: 484920 - DNA, 300 bp, Shigella sonnei; identical to SEQ ID NO: 460403

SEQ ID NO: 484921 - DNA, 930 bp, Shigella sonnei
atgcaaaacgcaggcagcctcgttgttcttggcagcattaatgctgaccacattcttaatcttcaatcttttcctactccaggcgaaaccgtaaccggtaaccactatcaggttgcatttggcggcaaaggcgcgaatcaggctgtggctgctgggcgtagcggtgcgaatatcgcgtttattgcctgtacgggtgatgacagcattggtgagagcgttcgccagcagctcgccactgataacattgatattactccggtcagcgtgatcaaaggcgaatcaacaggtgtggcgctgatttttgttaatggtgaaggtgagaatgtcatcggtattcatgccggcgctaatgctgccctttccccggcgctggtggaagcgcaacgtgagcgtattgccaacgcgtcagcattattaatgcagctggaatcaccactcgaaagtgtgatggcagcggcgaaaatcgcccatcaaaataagactatcgttgcgcttaacccggctccggctcgcgaacttcctgacgaactgctggcgctggtggacattattacgccaaacgaaacggaagcagaaaagctcaccggtattcgtgttgaaaatgatgaagatgcagcgaaggcggcgcaggtactgcatgaaaaaggtatccgtactgtactgattactttaggaagtcgtggtgtatgggctagcgtgaatggtgaaggtcagcgcgttcctggattccgggtgcaggctgtcgataccattgctgccggagatacctttaacggcgcgttaatcacggcgttgctggaagaaaaaccattgccagaggcgattcggtttgcccatgctgccgctgcgattgccgtaacacgtaaaggcgcacaaccttccgtaccgtggcgtgaagagatcgacgcatttttagacaggcagaggtga

SEQ ID NO: 484922 - DNA, 993 bp, Shigella sonnei
ttggctacaatgaaagatgttgcccgcctggcgggcgtttctacctcaacagtttctcacgttatcaataaagatcgcttcgtcagtgaagcgattaccgccaaagttgaagcggcgattaaagaactcaattacgcgccatcagccctggcgcgtagcctcaaactcaatcaaacacataccattggcatgttgatcactgccagtaccaatcctttctattcagaactggtgcgtggcgttgaacgcagctgcttcgaacgcggttatagtctcgtcctttgcaataccgaaggcgatgaacagcggatgaatcgcaatctggaaacgctgatgcaaaaacgcgttgatggcttgctgttactgtgcaccgaaacgcatcaaccttcgcgtgaaatcatgcaacgttatccgacagtgcctactgtgatgatggactgggctccgttcgatggcgacagcgatcttattcaggataactcgttgttgggcggagacttagcaacgcaatatctgatcgataaaggtcatacccgtatcgcctgtattaccggtccgctggataaaactccggcgcgcctgcggttggaaggttatcgggcggcgatgaaacgtgcgggtctcaacattcctgatggctatgaagtcactggtgattttgaatttaacggcgggtttgacgccatgcgccaactgttatcacatccgctgcgtcctcaggccgtctttaccggaaatgacgctatggctgttggcgtttaccaggcgttatatcaggcagagttacaggttccgcaggatatcgcggtgattggctatgacgatatcgaactggcaagctttatgacgccaccattaaccactatccaccaaccgaaagatgaactgggggagctggcgattgatgtactcatccatcggataacccagccgacccttcagcaacaacgattacaacttactccgattctgatggaacgcggttcggcttag

SEQ ID NO: 484923 - DNA, 1404 bp, Shigella sonnei
atggcgggtttgccgtggatcgcggcgatggccttcttcatgcaggcacttgatgccactattctgaataccgccttacccgcaatcgctcatagccttaatcgttctcctctcgcgatgcaatcagccatcatcagttatacgctgacggtggcgatgcttattccggtaagcggatggctagccgatcgcttcggtacgcgtcgcatttttacccttgccgtgagtctgttcacattgggttctctggcctgcgcactttctaattcgctaccacagctggttgtcttccgggttattcaggggataggcggcgcaatgatgatgcctgttgctcggctggccttactgcgcgcttatcctcgtaatgaacttcttccagtattgaattttgtcgccatgccgggtctggtggggccaattttaggccccgttcttggcggcgtgctggtcacctgggcaacctggcactggatatttttaatcaatatccccataggtattgcgggccttctttacgcgcgcaaacatatgcccaatttcaccaccgcacgacgcagattcgatatcactggctttttgctgtttggcctcagccttgttctcttctcaagcggaatagagctattcggggaaaagattgtcgccagctggattgccttgacggtaattgtcaccagcatcgggttactgcttctctatattctccatgcgcgacacacgccaaacccattaatttcattagatttatttaaaacccgcactttctcaatcggtatcgtaggcaatattgcaacccgtctggggaccggttgtgtatcgttccttatgccattgatgttacaggtaggatttggttatcaggcgtttattgccggctgtatgatggcaccgacagcgttaggttccattattgcaaaatcgatggttacccaagtcttacgtcgtctgggctatcgccatacgttagtggggatcacggtgattattgggctaatgatcgctcagttctctttgcaatcaccggcaatggcgatatggatgctgatcttgccgttgtttatattagggatggctatgtcgacgcaatttaccgcgatgaataccatcacacttgccgatctgaccgatgacaacgccagcagcggtaacagtgttctggcggtcacgcagcaactgtcgattagtttaggcgttgctgtaagtgcggccgtccttcgcgtttatgaagggatggaaggcacaacgactgtcgaacaattccactatacgtttatcacgatgggcattattactgttgcttcagcagcaatgttcatgcttctgaaaacaaccgatggtaataatttgatcaaaagacagcgtaaatctaagccgaaccgcgttccatcagaatcggagtaa

SEQ ID NO: 484924 - DNA, 693 bp, Shigella sonnei
atgcctttaagcgcacaacagttagctgcacagaaaaacctttcgtatgttctggctgagaagctggcgcaacggatcttaaaaggtgaatatgaacccggcaccattttgcctggtgagattgagctgggcgagcaatttggagtgagtcgtacagcggtacgcgaagcggtcaaaacgttaacggcaaaagggatggttttaccgcgaccgcgaattggtactcgggtcatgccacaatcgaactggaattttcttgatcaggaattgcttacctggtggatgacagaagagaactttcatcaggtcatcgatcactttctggttatgcgtatctgtctggagccgcaagcctgcctactggcagcaacggttggcaccgcggaacagaaggcgcatctcaatacgttaatggccgaaatggcggcattaaaagagaactttcgccgtgaacgctggatcgaagtcgatatggcctggcatgagcatatctatgaaatgagcgccaatccgtttttgacctcattcgcctcgctattccattcggtttatcacacttacttcacgtcaattaccagcgacacagtgataaagctaaatctgcaccaggcgattgtcgatgcgattgtccaaagcgatggcgacgcggcatttaaagcttgtcaggcgctgctacgctcacctgataagtga

SEQ ID NO: 484925 - DNA, 303 bp, Shigella sonnei; identical to SEQ ID NO: 21213

SEQ ID NO: 484926 - DNA, 681 bp, Shigella sonnei
atgaacattaccccgtttccgacgctttcgccggcaactatagatgccataaatgttatcggacagtggctggcgcaggatgatttctccggtgaggtgccgtatcaggccgattgcgtgatccttgcaggcaatgcggttatgccgactatcgacgcggcatgtaagattgctcgcgatcagcaaattcctttactgattagtggtggtatcggtcactcgacaacttttttgtatagcgccatcgcacagcatccgcactacaacactatccgcaccactggcagagcagaagcgaccatccaggcggatatcgctcatcagttctggcacattccgcatgaaaaaatctggattgaagaccagtcaacaaactgcggtgaaaacgcacgctttagcatcgcgctattgaatcaggccgtagaacgagttcatacggctatcgttgttcaggaccccaccatgcagcggcgcacgatggcgacgttccgccgtatgactggggacaatcccgatgcaccacgctggttaagttatcccggattcgttcctcagttaggaaataacgcagacagtgtaatctttattaatcagttacaaggattatggccggttgagcgttatctctcactactcactggcgagctgccgcgtttacgcgatgatagcgatgtgaggtag

SEQ ID NO: 484927 - DNA, 3903 bp, Shigella sonnei
atgacagaacaacaaaaattgacctttacggccttgcagcagcggctggattcgctgatgctgcgtgacagactgcgtttttctcgccgtctgcacggcgtgaagaaggttaaaaatcctgatgcacaacaggccattttccaggagatggcgaaagagattgaccaggcggcagggaaagtcctgctgcgtgaagcggcacgaccggaaattacttatcctgacaatttaccggttagtcagaaaaaacaggacattctcgaagcgattcgtgatcaccaggtggtgatcgtcgccggggaaacgggttctggtaaaacgactcagttaccgaaaatctgtatggagctggggcgcgggattaaagggctgatcggccatacccagccgcgtcgcctggcggcaagaacggtggcgaaccgtattgcggaagagctgaaaacggagccgggcggttgcatcggttacaaagtgcgtttcagcgatcacgtaagtgataacacgatggtcaagctgatgaccgacggtatcctgctggcggagatccagcaagaccgcctgctgatgcagtacgacaccatcattattgacgaagcgcacgaacgcagcctgaatatcgattttctgctcggctatttgaaagagttgctgccgcggcgtcctgacctaaaaatcattatcacttccgcgactatcgacccggaacgcttttcgcgccactttaataatgcgccgattatcgaagtctccggtcggacctatccggtggaagtgcgctatcgaccgattgttgaagaagccgatgacaccgagcgcgatcagttgcaggcgatttttgacgccgtagacgaactgagtcaggaaagccctggcgacattctgatctttatgagtggtgagcgggaaattcgcgataccgccgatgcgctgaacaagctgaacttacgccataccgaaatcttgccgctttatgcgcggctttcgaacagcgaacagaaccgcgtgttccagtcgcacagcggacggcgcattgtgctggcgaccaacgtcgcggaaacctcgctgaccgtaccggggattaaatacgtcatcgaccccggtacagcgcgtatcagccgctacagctatcgcaccaaagtgcagcgtttgccgattgaacccatttcgcaggcgtctgccaatcagcgtaaaggccgctgtggtcgtgtgtccgaagggatctgtattcgtctctattccgaagacgatttcctctcgcgcccggagtttaccgatccggagattctgcgtaccaacctggcctcggttattttgcagatgaccgcgctggggctgggcgatatcgctgcgttcccgtttgtcgaagcaccggataaacgcaatatccaggatggcgtgcgtctgctcgaagaactgggcgcgatcaccacggatgaacaggccagcgcctataaactgacgccgctcggtcgccagctctcgcagttgcctgtcgacccacgtctggcgcgtatggtgctggaagcgcaaaaacatggctgcgtgcgtgaggcgatgattatcacgtccgcgctctccattcaggatccgcgcgaacgtccgatggacaaacagcaggcatcggacgaaaaacatcgtcgcttccacgacaaagaatccgacttcctcgcgtttgtaaatctgtggaattatcttggcgagcagcaaaaggcgctttcttccaacgccttccgtcgcctgtgtcgtaccgattacctcaactatctgcgcgtgcgcgaatggcaggatatctacacccagttgcgccaggtggtgaaagaacttggcattccggtcaacagcgaaccggcggagtatcgtgaaattcacatcgccttactgaccggtttgctttcccatatcggcatgaaagatgccgataaacaggaatataccggtgcacgtaacgcgcgtttctccatcttccccggttctggtttattcaaaaagccgccgaaatgggtaatggtggcggaactggtagaaaccagccgcctgtgggggcgcattgctgcgcgtatcgacccggaatgggtagaacccgttgctcagcatttgattaaacgcacctacagcgaaccgcactgggaacgggcgcagggcgcggtgatggcaacggaaaaagtcactgtttatggtttgccgattgttgctgcgcgcaaggtcaactacagccagatcgattcggcgttatgtcgtgaactctttattcgccacgctctggtggaaggtgactggcagacgcgtcacgcattcttccgtgaaaacctgaaactgcgggccgaagtggaagagctggaacacaaatcacgtcgccgcgatattctggttgatgacgaaacgctgtttgagttctacgaccagcgcatcagccacgatgtaatctccgctcgtcacttcgatagctggtggaaaaaagtcagccgcgaaacgcctgatttgctcaactttgaaaagagcatgttgatcaaagaaggggcggaaaaaatcagaaagctggattacccgaacttctggcatcagggcaatctcaagctgcgtttgagctatcagtttgagccaggcgcggacgcggacggtgtgaccgtacatattccgctgccgttacttaaccaggttgaggaaagcgggtttgaatggcagatccccggtctgcgccgcgaattggtgattgctctgattaaatcgttgccgaaaccggtacgccgtaattttgtgcctgcaccaaactacgccgaagcgtttttaggccgcgtcacaccgctggagttaccgttgctcgacagccttgagcgcgagttacggcggatgaccggcgttaccgttgaccgcgaagactggcactgggatcaggtgcccgatcacctgaaaatcaccttccgcgtggtggatgacaaaaacaagaagctaaaagaagggcgctcgctacaagatctgaaagatgcgctgaaaggcaaagtgcaggaaacgctgtctgcggtggcggatgacggtatcgagcagagcggactgcatatctggagttttggtcagctgccggaaagctacgaacagaagcgtggcaactacaaagtgaaggcgtggccagcgctagtggatgaacgcgacagtgtggcgatcaaactgtttgataatccgctggagcaaaaacaggtaatgtggaacggtcttcgccgtctactgctgctgaatattccctcgccgatcaagtatttacatgagaagttaccaaacaaagccaagctggggctgtactttaacccgtatggcaaagtgctggagctgatcgacgactgtatctcctgcggtgtggataaattgatcgacgccaatggtggcccggtctggacggaagaaggctttgctgcgctgcatgaaaaagtgcgtgccgaactgaacgacacggtggtggatattgcgaagcaggtcgagcaaatccttacggcagtgttcaatatcaacaaacgtctgaaggggcgggtggatatgacgatggcgctggggctttctgacattaaagcgcagatgggcgggctggtatatcgcggttttgtcactggtaacggcttcaaacggctgggcgacacgctgcgatatttgcaggcgattgaaaaacggctggaaaaactggcggttgatccacatcgcgaccgtgctcagatgctgaaagtcgaaaacgtccagcaggcgtggcagcaatggatcaacaaactgccgcctgcacgtcgtgaggatgaagacgtgaaagagatccgttggatgatagaagagttgcgtgttagttacttcgctcaacaacttggtacgccttatccgatttcagataagcgtattttgcaggcgatggagcagattagcggttaa

SEQ ID NO: 484928 - DNA, 606 bp, Shigella sonnei
atgagcaaggtattagttcttaaatccagcatcctggcagggtactctcagtctaatcagttgtccgattattttgttgaacaatggcgcgaaaagcactccgctgatgaaatcaccgttcgcgacctggctgcaaatccgattccggtactggatggcgaactggttggtgcactgcgtccgagcgatgcgccgctgactccgcgtcagcaggaagctctggcgctttccgatgagctgattgccgagctgaaagcccacgacgttatcgttattgcggcaccgatgtataacttcaacatctcaactcagttgaaaaactattttgacctggttgcacgcgcaggcgttactttccgctataccgagaacggtccggaaggtctggtaacgggtaaaaaagccatcgttattaccagccgcggtgggatccacaaagatggaccaacggacctggtgacgccgtatctgtccacgttcctcggctttatcggcattactgatgtgaaatttgtcttcgccgaagggatcgcatacggtccggaaatggcagcgaaagcgcagtctgacgcgaaagcagccatcgacagcattgttgctgcataa

SEQ ID NO: 484929 - DNA, 1269 bp, Shigella sonnei
ttgttgctggccccgtttttcttcttcacctatggatctcttaatcagttcaccgcggttcaggacagtaatagccatgatattcccagtcaggtattcggttgggaaacggcgatcccttttcttccctggactattgttccttactggagtctggatcttttatatggattttcgctgttcgtttgtagcacgacattcgaacagcgccgacttgtccaccggcttattctggcaacggtaatggcctgctgcggttttttgctctatccgctgaagtttagttttatccgtcctgaagtgagtggggtgacgggatggctattttcgcaacttgaactgtttgatctgccttataaccagtctccttcgctgcatattattctctgctggctactttggcgtcactttcgtcagcatctggctgtgaggtggcgtaaagtctgcggcggatggtttttactcatcgccatttcgacgctgacgacatggcagcatcattttattgatgtcatcacagggctggcggtaggtatgttgattgactggatggtgcccgtcgaccgtcgttggaattatcagaaacctgatcaacgtcgaatcaaaatagcactgccatatgtcgtaggcgcgtgcgcgtgcattgtgttgatggagctaatgatgatggttcagttatggtggtcagtctggttatgttggccagtattatcgctactcattattggccgtgggtacggtgggcttggcgcgataacaacagggaaagatagtcaggggaaactcccgcccgccgtttactggctgacattgccctggcgcatcgggatgtggctatctatgcgttggttttgtcgtcgcctggagccggtgagcaaaatgactgctggtgtttatttaggggcgtttccacgacatattccggcacagaatgcggttctggacgtcacctttgaattccctcgtggacgagcgacaaaagatcgactctatttctgtgtaccgatgctagatctggtggttccggaagagggggagctccgacaggccgtggcgatgctggaaacattacgcgaagagcaaggcagcgttctggtccattgcgcactgggattatcgcgcagtgcgctggtagtggcggcatggctgttatgttacggatactgtaaaaccgttgatgaagcgattagctttattcgagccagacgctcgcatattgtgcttaaggaagatcacaaagcgatgctgaaattatgggaaaacaggtaa

SEQ ID NO: 484930 - DNA, 1758 bp, Shigella sonnei
atggaaaattcacgcatctctggggaacatttttttaccaccagtgataatacagcgttgttttatcggcactggcccgctttacagccaggggcgaaaaaggtcatcgtcttatttcatcgtggccatgaacattctggtcgtctacaacatatcgttgatgaactggcgatgccagatactgctttttatgcatgggatgcccgggggcatggaaaaacttcggggccgcgtggttatagcccatctcttgcgcgttcagtgcaggatgtcgatgaatttgtccgttttgctgccagcgacagccaggttggactggaagaggtggttgtgatcgcgcaaagcgtcggcgcagtgctggttgccacatgggttcatgattatgcgcctgcaattcgcgggctggtgctggcttctccggcctttaaggttaaattgtatgtgccgctggcacgtcctgcgctgacgctatggcatcgtctgcgtggtctgttttttattaattcctatgtgaaaagacgctatttgacccacgatcggcaacgggtggcgagtttcaataatgatccgctgatcacacgggcgattgccgtcaatatcttgctcgatctctataaaacgtctgaacgtattattagagatgcggcggcgattacgctccccacgcaacttctgatatcaggcgatgactatgtggtgcatcgccaaccgcagattgatttttatcagagattacgtagccctctgaaagagctgcatctgctgccaggcttttatcacgacacgttgggtgaagagaacagggcgcaggcatttgaaaaaatgcaaagctttattcgtcgtttatatgctaacaagtcacaaaaatttgattatcagcatgaagaccgcactggaccatcagcggatcgctggcgcctcctttcaggtggacccgtgccattatcgccggttgatttggcgtatcgctttatgcgtaaagcgatgaaattgttcgggacgcactctgcgggcctgcatctcggaatgagcactggctttgattcaggcagttcgctggattatgtctatcaaaatcaaccgcaaggcagtaacgcattcgggcgcttaatcgacaaaatttacctgaacagtgttggctggcgcggtattcgccagcgcaaaactcatttacaaatactgattaaacaagccgttgccgatctccacgtcaaaggtttagccgtccgcgtggttgacattgccgcagggcatgggcgctatgtactggatgcactggcaaacgagcctgccgtaagcgatattttattacgtgattacagtgagttaaatgttgcacaggggcaagagatgattgcccaacggggaatgtctgggcgggtgcgttttgaacagggcgatgcgtttaacccggaggaactcagcgcgttaactccgcggcctacgctggcgattgtctctggactgtatgagctgtttcccgaaaatgagcaggtaaaaaactcactcgcaggtcttgccaatgccatcgaaccgggtggcattctcatctacaccgggcagccgtggcacccacaactggagctgattgccggggtgttaaccagtcataaagatggtaaactgtgggtaatgcgcgtgcgtacgcaaggggagatggatttgctcgtgcatgatgctggatttgataaatgcacacaacggattgatgagtggggcatttttacggtttcgatggcggtgcgtcgtgataactga

SEQ ID NO: 484931 - DNA, 417 bp, Shigella sonnei
atgaatatccagggcggggccttactggtgttatttcttttggcattaaccgcgtcaaacgatattgcacagtatttatgggggaaatcctgcggcagaagaaaagtggtccccaaagtcagcccgggaaaaacgctggaaggtctggtcggcggcgtaatcaccaccatgatagcgtcgatgatcattggaccgttactgacaccgctaaatacattacaggcaatattagcgggtttgttaattggtattagtggtttttgcggcgatgtagtgatgtcagccatcaaacgagatgttggtgttaaagatagcgggaaactattacctggacatggcggaatccttgacaggattgactcattaattttcaccgctccggtatttttttattttattcgttactgctgttactga

SEQ ID NO: 484932 - DNA, 189 bp, Shigella sonnei
atgcctcacacgataaaaaagatgagtctgataggactcatattgatgatctttacttccgtatttggatttgccaatagcccatcggcttattacttaatgggttatagtgcgattcccttttatatattttctgcattgttattctttattccattcgccttaatggtgatgctgccaacttactga

SEQ ID NO: 484933 - DNA, 978 bp, Shigella sonnei
atgagcgaaacggcatcctggcagccgagcgcatccattcctaacttattaaaacgtgcggcgattatggcggagatccgtcgtttctttgccgatcgtggagtgctggaggtggagacgccttgtatgagccaggcgacggtaaccgatattcatttggtcccgtttgagacacgtttcgttggccccgggcattcgcaggggatgaatctctggttaatgaccagcccggaataccatatgaaacgcctgctggttgccggttgtgggccggtattccagctgtgccgcagcttccgtaatgaagagatggggcgttatcacaaccctgagttcactatgcttgagtggtatcgaccgcactatgatatgtaccggttgatgaacgaggtggacgatctcttacaacaggtgctggactgcccggcagcagaaagcctttcttatcaacaagctttcttgcgttatctggaaattgacccgctctctgccgacaaaacgcaactgcgggaagtcgcagcgaaactggatttgagtaacgttgctgataccgaagaagaccgcgacacgttgctacaattgctgtttacctttggcgtagagccaaatattggcaaagaaaaaccgacctttgtgtaccactttccagccagccaggcatcactggcgcaaatcagtaccgaagatcatcgggtcgctgaacgctttgaggtttattataaaggtattgagctggcgaatggtttccatgaattaacggatgcccgtgagcagcaacaacgctttgaacaagataaccgtaagcgcgcggcgcgcggtttgccgcagcaccccattgaccagaatctgattgaagccttgaaagtcggtatgcctgactgttccggcgtggcattaggtgttgatcgtctggtgatgttggcgctgggcgcggagacactggctgaagtcatcgcctttagcgttgaccgggcataa

SEQ ID NO: 484934 - DNA, 1809 bp, Shigella sonnei
gtgcaaacctttcaagccgatcttgccattgtaggcgccggtggcgcgggattacgtgctgcaattgctgccgcgcaggcaaatccaaatgcaaaaatcgcactaatctcaaaagtatacccgatgcgtagccataccgttgctgcagaagggggctccgccgctgtcgcgcaggatcatgacagcttcgaatatcactttcacgatacagtagcgggtggcgactggttgtgtgagcaggatgtcgtggattatttcgtccaccactgcccaaccgaaatgacccaactggaactgtgggggtgcccatggagccgtcgcccggatggtagcgtcaacgtacgtcgcttcggcggcatgaaaatcgagcgcacctggttcgccgccgataagaccggcttccatatgctgcacacgctgttccagacctctctgcaattcccgcagatccagcgttttgacgaacatttcgtgctggatattctggttgatgatggtcatgttcgcggcctggtagcaatgaacatgatggaaggcacgctggtgcagatccgtgctaacgcggtcgttatggctactggcggtgcgggtcgcgtttatcgttacaacaccaacggcggcatcgttaccggtgacggtatgggtatggcgctaagccacggcgttccgctgcgtgacatggaattcgttcagtatcacccaaccggtctgccaggttccggtatcctgatgaccgaaggctgccgtggtgaaggcggtattctggtcaacaaaaatggctaccgttatctgcaagattacggcatgggcccggaaactccgctgggcgagccgaaaaacaaatatatggaactgggtccacgcgacaaagtttctcaggccttctggcacgaatggcgtaaaggcaacaccatctccacgccgcgtggcgatgtggtttatctcgacttgcgtcacctcggcgagaaaaaactgcatgaacgtctgccgttcatctgcgaactggcgaaagcgtacgttggcgtcgatccggttaaagaaccgattccggtacgtccgaccgcacactacaccatgggcggtatcgaaaccgatcagaactgtgaaacccgcattaaaggtctgttcgccgtgggtgaatgttcctctgttggtctgcacggtgcaaaccgtctgggctccaactccctggcggaactggtggtcttcggccgtctggccggtgaacaagcgacagagcgtgcagcaactgccggtaatggcaacgaagcggcaattgaagcgcaggcagctggcgttgaacaacgtctgaaagatctggttaaccaggatggcggcgaaaactgggcgaagatccgcgacgaaatgggcctggcaatggaagaaggttgcggtatctaccgtacgccggaactgatgcagaaaaccatcgacaagctggcagagctgcaggaacgcttcaagcgcgtgcgcatcaccgacacctccagcgtgttcaacaccgacctgctctacaccattgaactgggccacggtctgaacgttgctgaatgtatggcgcactccgcaatggcacgtaaagagtcccgcggcgcacaccagcgtctggacgaaggttgcaccgagcgtgacgacgtcaacttcctcaaacacaccctcgccttccgcgatgctgatggcacgactcgcctagagtacagcgacgtgaagattactacgctgccgccagctaaacgcgtttacggtggcgaagcggatgcagccgataaggcggaagcagccaataagaaggagaaggcgaatggctga

SEQ ID NO: 484935 - DNA, 735 bp, Shigella sonnei
atggctgagatgaaaaacctgaaaattgaggtggtgcgctataacccggaagtcgataccgcaccgcatagcgcattctatgaagtgccttatgacgcaactacctcattactggatgcgctggtctacatcaaagacaacctggcaccggacctgagttaccgctggtcctgccgtatggcgatttgtggttcctgcggcatgatggttaacaacgtgccaaaactggcatgtaaaaccttcctgcgtgattacaccgacggtatgaaggttgaagcgttagctaacttcccgattgaacgcgatctggtggtcgatatgacccacttcatcgaaagtctggaagcgatcaaaccgtacatcatcggcaactcccgcaccgcggatcagggtactaacatccagaccccggcgcagatggcaaagtatcaccagttctccggttgcatcaactgtggtctgtgctacgccgcgtgcccgcagtttggcctgaacccagagttcatcggtccggctgccattacgctggcgcatcgttataacgaagatagccgcgaccacggtaagaaggagcgtatggcgcagttgaacagccagaacggcgtatggagctgtactttcgtgggctattgctccgaagtctgcccgaaacacgtcgatccggctgcggccattcagcagggcaaagtagaaagttcgaaagactttcttatcgcgaccctgaaaccacgctaa

SEQ ID NO: 484936 - DNA, 396 bp, Shigella sonnei; identical to SEQ ID NO: 458996

SEQ ID NO: 484937 - DNA, 360 bp, Shigella sonnei
atgattaatccaaatccaaagcgttctgacgaaccggtattctggggcctcttcggggccggtggtatgtggagcgcaattattgcgccggtgatgatcctgctggtgggtattctgctgccactggggctgtttccgggtgatgcgctgagctacgagcgcgttctggcgttcgcgcagagcttcattggtcgcgtattcctgttcctgatgatcgttctgccgctgtggtgtggtttacaccgtatgcaccacgcgatgcacgatctgaaaattcacgtgcctgcgggcaaatgggttttctacggtctggctgctatcctgacagttgtcacgctgattggtatcgttacaatctaa

SEQ ID NO: 484938 - DNA, 1134 bp, Shigella sonnei
atgttcaaaacgacgctctgcgccttattaattaccgcctcttgctccacatttgctgcccctcaacaaatcaacgatattgtgcatcgcacaattaccccgcttatagagcaacaaaagatccccggtatggcggtggcggtaatttatcagggtaaaccttattactttacctggggctatgcggacatcgccaaaaagcagcccgtcacacagcaaacgttgtttgagttaggttcggtcagcaaaacatttacgggcgtgcttggtggcgacgctattgctcgaggggaaatcaagttaagcgatcccgcaacaaaatactggcctgaacttactgctaaacagtggaatgggatcacactattacatcttgcgacctacaccgctggcggcctgccattgcaggtgccggatgaagtgaaatcctcaagcgacttgctgcgcttctatcaaaactggcagcctgcatgggctccaggaacacaacgtctgtatgccaactccagtatcggtttgttcggcgcactggctgtgaagccgtctggtttgagttttgagcaggcgatgcaaactcgtgtcttccagccactcaaactcaaccatacgtggattaatgtacctcccccagaagaaaagaattacgcctggggatatcgcgaaggtaaggcagtgcatgtttcgccaggggcgttagatgctgaagcttatggtgtgaagtcgaccattgaagatatggcccgctgggtgcaaagcaatttaaccccccttgatatcaatgagaaaacgcttcaacaagggatacaactggcacaatctcgctactggcaaaccggcgatatgtatcagggcctgggctgggaaatgctggactggccggtcaatcctgacagcatcattaacggcagtgacaataaaattgcactggcagcacgcccggtaaaagcgattaagcccccaactcctgcagtacgcgcatcatgggtacataaaacgggggcgaccggcggatttggtagctatgtcgcgtttattccagaaaaagagctgggtatcgtgatgctggctaacaaaaactatcccaatccagcgagagtcgccgccgcctgtcagattctcaacgctctacagtaa

SEQ ID NO: 484939 - DNA, 534 bp, Shigella sonnei
atgcgcctgctccctctcgttgccgcagcgacagctgcatttctggtcgttgcctgcagttctcctacgccgccgcgtggcgtgacagtagtgaataatttcgacgctaaacgctatctcggtacctggtatgagattgcccgttttgatcaccgttttgaacgtggactggaaaaagtcaccgcaacatacagtctgcgtgatgacggcggcctgaatgtcatcaataaaggctataaccctgacagagaaatgtggcagcagagtgaagggaaagcgtactttaccggcgcaccaacacgcgctgcgctgaaagtgtcattctttggtcctttctatggcggttataacgtcattgcacttgatcgggaataccgccatgcgctggtttgcggcccggaccgcgactacctgtggatactctcccgcacgccaaccatttctgacgaagtgaaacaggagatgctggcagtcgcgacccgggaagggtttgatgtcagtaagtttatttgggtacagcagcccggtagttag

SEQ ID NO: 484940 - DNA, 318 bp, Shigella sonnei
atgtcctggattatcttagttattgctggtctgctggaagtggtatgggccgttggcctgaaatatacccacggctttagtcgtttgacgccaagtgttattactgtgacggcgatgatagtcagtatggcgctacttgcctgggcgatgaaatcgttaccggtagggacggcttatgccgtgtggacgggtattggcgcagtcggcgcggccatcaccggcattgtgctgctcggtgagtccgctaacccgatgcgcctggcgagtctggcgttaatcgtattggggattattggtctgaaactcagcactcactaa

SEQ ID NO: 484941 - DNA, 147 bp, Shigella sonnei
atggtgaagaagacaattgcagcgatcttttctgttctggtgctttcaacagtattaactgcctgcaacaccacgcgtggcgttggtgaagacatttctgatggcggtaacgcgatttctggtgcagcaacgaaagcgcagcaataa

SEQ ID NO: 484942 - DNA, 126 bp, Shigella sonnei
atgatgaaacgccttatcgttcttgttttgcttgccagcacgctgctcacgggctgtaacaccgctcgcggtttcggcgaagacatcaaacatctcggcaactccatctcccgcgctgccagctaa

SEQ ID NO: 484943 - DNA, 567 bp, Shigella sonnei
atggcaacgtactatagcaacgattttcgtgctggtcttaaaatcatgttagacggcgaaccttacgcggttgaagcgagtgaattcgtaaaaccgggtaaaggccaggcatttgctcgcgttaaactgcgtcgtctgctgaccggtactcgcgtagaaaaaaccttcaaatctactgattccgctgaaggcgctgatgttgtcgatatgaacctgacttacctgtacaacgacggtgagttctggcacttcatgaacaacgaaactttcgagcagctgtctgctgatgcaaaagcaattggcgacaacgctaaatggctgctggatcaggcagagtgtatcgtaactctgtggaatggtcagccgatctccgttactccgccgaacttcgttgaactggaaatcgttgataccgatccgggcctgaaaggtgataccgcaggtactggcggcaaaccggctaccctgtctactggcgctgtggttaaagttccgctgttcgtacaaatcggcgaagtcatcaaagtggatacccgctctggtgaatacgtctctcgcgtgaagtaa

SEQ ID NO: 484944 - DNA, 1029 bp, Shigella sonnei
atggcgcatattgtaaccctaaataccccatccagagaagattggttaacgcaacttgccgatgttgtgaccgatcctggtgaacttctgcgtcttttgaatatagacgcggacgaaaaactgttggccggacgcagcgccaaaaagctgtttgccctgcgtgtgccccgctcatttatcgatcgcatggagaaaggcaatccggacgatcctattttgcgtcaggtacttacctcgcaagatgagtttgtcgtcgcgtccggattctccaccgacccactggaagaacagcacagcgtagtgcctggtttgttgcataaataccacaaccgggcgcttttgctggtcaaaggcggctgcgcggtaaattgccgctattgcttccgtcgccacttcccctatgccgaaaatcagggcaacaagcgtaactggcagactgcacttgagtatgttgctgcgcatccggaactggacgagatgattttctccggcggcgatccgctgatggcgaaagatcacgagctggactggttgctcacacaactggaagccatcccgcatatcaaacgtctgcggattcacagccgtctgccgattgtgatcccggcacgtatcaccgaggcgctggttgaacgctttgcccgttctacgctgcaaatcttgctggtgaatcacatcaatcatgccaatgaggtagatgaaacgttccgtcaggcgatggctaaattgcgccgtgtcggtgtcaccctgcttaaccagagcgttctgttacgtggtgtgaacgataacgcacaaacgttggcaaacctgagtaatgcgttgttcgatgccggcgtgatgccgtattacctgcatgtgctagataaagtacagggcgcggcgcattttatggtgagtgatgacgaagcacggcagattatgcgtgagttgctgacattggtgtcgggatatctggtgccgaaactggcgcgagaaattggcggcgaacccagcaaaacgccgctggatctccagctacgccagcagtaa

SEQ ID NO: 484945 - DNA, 1920 bp, Shigella sonnei
atgaataagtttatcgctgctgaagctgcggaatgtataggctgtcatgcttgtgaaattgcctgtgcggtggcacacaatcaagaaaactggccgctgagtcacagtgactttcgaccgcgtatccacgttgtagggaaaggccaggctgcgaatccggtggcctgccatcactgcaacaatgccccttgtgttacggcttgtccggttaatgctctgactttccagtccgatagcgtacaactggacgagcaaaaatgtattggctgtaaaagatgcgcaatcgcttgcccctttggcgtcgttgagatggtcgatacgattgcgcagaaatgcgacctttgtaaccagcgcagttccggcacgcaagcctgtattgaagtctgcccaacacaggcgttacgactgatggacgataaagggttacagtggataaaggtggctcgccagcgcaaaacggcagcaggaaaagcgtcatcagacgctcagccatctcgcagtgcagcgttgctccccgttaactcgcgtaaaggcgcagataaaatttcagcgagtgaacggaaaacccactttggcgaaatctattgcgggctggatccactgcaagcgacttatgagagtgaccgctgtgtttattgtgccgaaaaagctaactgcaactggcattgcccgctgcataacgctattccggattacatccgtctggtacaggaaggaaagattattgaagcggcagaactttgccaccagaccagttccttaccagaaatctgcggcagggtatgcccacaggaccgtctttgtgaaggcgcatgtactttgaaagatcactctggcgcagtctctatcggtaatctggaacgctacatcaccgataccgcgctggcgatgggctggcgtcccgatgtcagcaaagttgttccccgtatcgaaaaagtggcggtgattggcgctgggccagcagggttagggtgtgctgatattctggcgcgcgcgggagttcaggttgatgtctttgatcgccatccagaaattggcggtatgctgacttttggcattcctcctttcaaactcgataaaacggtattaagccagcggcgagagatattcaccgcaatgggaatcgactttcatcttaactgtgaaattggccgcgatattacctttagcgatttaacttctgaatatgatgcagttttcatcggcgtggggacttacgggatgatgcgagcagatctgccgcatgaagatgcgcccggtgtcattcaggctctaccgttcctgactgcccatacccgccagctcatgggattgccggagtctgaagagtatccgctgacggacgtggaaggtaagcgagtcgtggtattgggcggtggcgatacgacaatggattgtttgcggacttccattcgcctcaatgctgccagcgtgacctgcgcgtatcgtcgtgatgaagtcagtatgccgggctcgcgcaaagaggtggttaatgcgcgcgaggaaggtgtcgagtttcagttcaatgttcaaccgcaatatatcgcttgtgacgaagatgggcgtttaactgcggtgggcctgattcgtaccgccatgggtgagccggggccggatggtcgccgtcgtcctcgtccggtagcgggttcagagtttgaattgcccgccgatgttctgattatggcctttggtttccaggcgcatgccatgccgtggttgcagggcagcggaattaaactcgataaatggggcctgattcaaaccggtgacgtcgggtatttacctacccagacgcatctgaaaaaagtctttgctggtggtgatgcagttcatggcgcggatctggttgtcactgcaatggccgcaggaaggcaggcggcgcgcgatatgttaactctgtttgatacgaaggcatcgtga

SEQ ID NO: 484946 - DNA, 489 bp, Shigella sonnei
atgaaatcgttaattatcgttaatccggctgactgtattggctgccgtacttgtgaagtagcctgtgtggtcgctcacccttcagaacaggagttgaatgccgatgtctttttaccccggctgaaggtacagcgactggacagcatcagtgcgccggtgatgtgccatcagtgtgaaaacgccccttgtgttggcgcttgccccgtgggggcgctgacgatgggcgagcaggtggtgcagaccaattctgcccgttgtattggctgtcagagttgcgtcagtgcgtgcccgtttggaatgatcaccattcagtcgttgccgggggatacccgacaacaaattgtgaaatgcgatctctgtgaacagcgggaagaggggccagcctgtgttgaatcttgcccgacacaggcgctgcagttgcttactgaaagagaactcaggcgagtccgccagcagcgtattgttgccagcggtgagaatcctctgtga

SEQ ID NO: 484947 - DNA, 252 bp, Shigella sonnei
atgtctggagacatcctacaaacaccggacgcaccaaagccacagggcgcgctggataattattttaaaattaccgctcgtggcagtaccgttcgtcaggaagtactggctggcttaacgacctttctggccatggtttattccgttatcgtcgttccgggaatgctgggcaaagcagtttttcctcccgcagctgtgtttgttgccacctgtctggtcgcgggcttcggctcgttgctgatggggttgtag

SEQ ID NO: 484948 - DNA, 285 bp, Shigella sonnei
gtgttgcaattacaaggctatcgcctctcggcatatgaagcgttttacctggccacgctcggcggagcgaaatctctgggccttgacgatttgattggcaactttttacctggcaaagaggctgatttcgtggtgatggaacccaccgccactccgctacagcagctgcgctatgacaactctgtttctttagtcgacaaattgttcgtgatgatgacgttgggcgatgaccgttcgatctaccgcacctacgttgatggtcgtctggtgtacgaacgcaactaa

SEQ ID NO: 484949 - DNA, 2940 bp, Shigella sonnei
atgatcatccactttactttaaatggcgcgcctcaggagctaaccgttaatccaggcgaaaacgtgcaaaagctgttgtttaacatgggaatgcactctgtacgcaacagtgatgatggcttcgggtttgccggttctgacgcaataatctttaacggtaatatcgttaacgcgtccttgcttattgccgcacagttagagaaggcagatattcgtaccgcagaatctctgggtaaatggaacgagttaagtctggttcaacaggcaatggttgatgttggcgtggtgcagtctggttataacgatccagctgcagctctgattatcaccgatcttctcgatcgcatcgccgcacctacccgcgaagagatcgacgacgcgctttctggtttgttcagccgcgatgcaggctggcaacaatactatcaggtcattgaactggcggttgcacgtaaaaataatccgcaggccaccattgatatcgctccgactttccgtgacgaccttgacgtcattggcaagcattatcctaaaactgatgccgcgaaaatggtgcaggcgaaaccctgctatgttgaagactgcgtaacggctgacgcctgcgtcattaaaatgttacgtagcccacacgctcacgcactgattactcatctggatgtcagcaaagctgaagccttaccgggcgtcgttcacgttattactcacctgaattgccctgatatctactataccccggggggtcagagcgcaccggaaccgtcaccgcttgaccgccgtatgttcggcaagaaaatgcgtcacgtcggcgatcgtgttgctgcggtcgtcgcagaaagtgaagaaattgcgctcgaagcactgaagctcatcgacgttgaatatgaagtgcttaagccggtaatgtcgatcgacgaagcaatggcggaagatgcgcctgtcgtgcacgatgaaccggtggtgtatgttgctggtgcgccagatactctggaagacgataacagccatgcagcccagcgcggcgagcatatgatcatcaacttcccgatcggttctcgccctcgcaaaaatatcgccgccagtattcatggtcatattggcgatatggacaaaggctttgccgatgccgatgtgatcattgagcgaacctataactcaacgcaggcacagcagtgcccgactgaaacacatatctgctttacccggatggacggcgatcgtctggttatccacgcctccacccaggtaccatggcacttacgccgccaggtcgcgcgcctcgtgggcatgaaacagcataaagttcatgtcattaaagagcgagttggcggcggttttggttccaaacaggacatcctgctggaagaagtgtgcgcctgggcaacctgcgtgaccgggcgtccggtactattccgctacacccgtgaagaagagtttattgctaacacctctcgtcacgtcgcgaaagtcaccgtcaaactgggagcgaaaaaagatggtcgcctgacggcagtgaagatggatttccgcgccaacactggcccttacggcaaccactcactcaccgtaccgtgtaacggaccggcgctgtcgctgccgttatatccgtgcgataacgtcgatttccaggtcaccacctactacagcaacatttgcccaaatggtgcttatcagggttatggcgcaccgaaaggtaacttcgctatcaccatggcattagcggaactggctgaacagttacagatcgaccaactggaaattatcgaacgtaaccgggtacacgaagggcaagagctgaaaattctcggtgcaatcggtgaaggtaaagcgccgacctccgttccttccgccgccagctgtgcactggaagagatcctgcgtcagggtcgcgagatgatccaatggtcgtcaccgaaaccgcaaaatggtgactggcacatcggtcgcggcgtcgccattatcatgcagaaatcgggtatcccggatatcgatcaggctaactgcatgatcaaactggaatcggacggcacctttatcgttcattctggcggtgcggatattggtactggtctggatactgtagtgacgaaactggcagcagaagtgctgcactgcccaccgcaggacgtgcatgttatctccggtgataccgatcatgcgttgtttgataaaggcgcatatgcctcgtccggtacttgcttctcgggtaacgcggcgcgtttggcagcggaaaatctacgggagaaaattctgttccacggcgcgcaaatgttgggtgaggcagtggcagatgttcaactggcaacgccgggcgtcgtgcgcggcaagaaaggcgaagttagtttcggggatattgcccataaaggcgaaaccggcatcggctttggttcactggtgggaactggcagttatatcacgcctgatttcgccttcccgtatggcgcaaacttcgctgaagttgccgtcaacacgcgtacgggtgaaatccgcctggataaattctacgccttgctggactgcggtacaccggtcaacccggaattagcattgggacaaatctacggtgctaccctgcgagctatcggccacagtatgagcgaagagatcatttatgacgccgaaggtcacccgttaacgcgtgatttacgcagttacggcgcaccgaaaattggtgacattccgcgtgatttccgcgctgtgctggtgccgagcgacgataaagtcggcccgttcggggcgaaatcgatctcggaaatcggtgtaaatggcgcagctccggcgattgctaccgcaattcacgatgcatgcggcatctgggcagaagaaagtcaaagtgggcatgggaacggatatcggtgccggaacaactttcaacatgctgcaaacgctgaacgaagcctacaaagtgttgcaattacaaggctatcgcctctcggcatatga

SEQ ID NO: 484950 - DNA, 438 bp, Shigella sonnei
gtgctgcttcccgtcctgctagcactggatgctgaactggtttttggcaacggcgaaacgctgtcaatcgaggactacctggcctgcccatgcgatcgcctgctaaccgaaattatcattaaagatccgtatcgcacctgtgcgacccgcaaaattagccgttctcaggcaggtttaaccgtcgtgacggcagccgttgcaatgacagaccacgacggtatgcgaattgcgctggatggcgtcgccagtaaagcactgcgtctgcacgatgtcgaaaaacaaaatctggaaggcaatgcacttgaacaggctgtcgccaacgccattttcccgcaggaagatttgcggggcagcgtggcctataaacgctatatcacgggagttctggtagccgacctgtatgccgactgccaacaggctggggaggaagccgtatga

SEQ ID NO: 484951 - DNA, 1329 bp, Shigella sonnei
atgttgattctgaagaatgtcaccgcagtgcagttacacccggcgaaagtgcaggaaggcgttgatatcgctatcgaaaatgacgtgattgtcgctatcggcgatgccctgacgcaacgctaccccgatgccagctacaaagagatgcatggtcggattgtgatgccgggaattgtctgctcgcacaaccatttttactcggagctttcccgcggaattatggcaaacatcgccccttgcccggatttcatctcaacgctgaaaaatctctggtggcggctcgatcgcgcccttgatgaagagtcgctctattacagcggactgatttgttccctggaagcgattaagagcggatgtacatcggttatcgatcaccatgcctcgccggcgtatatcggcgggtcgctctccacattgcgcgacgcatttttaaaagttggcctgcgcgcgatgacctgttttgaaactactgaccgtaacaacggcatcaaagagttgcaggaaggtgtagaagaaaacatccgtttcgcccgtttgattgatgaggcgaagaaagcgacaagcgagccgtatctggtggaagcacatatcggtgctcacgcgccgtttaccgtgccggatgccggtctggagatgctgcgtgaagccgtgaaagccacaggccgtggtttgcatattcacgctgcggaagacctttacgacgtttcctacagtcaccactggtacggcaaagacctgctggcacgactggcgcaattcgacctcatcgacagcaaaacgctggtcgctcatgggctgtacttgtcgaaagatgacatcgccctactcaatcagcgcgatgcgttcctggtgcataacgcccgttcaaacatgaacaaccatgtcggctacaaccatcaccttagcgacatccgcaacctggcattgggaacggacggcattggttcggacatgtttgaagagatgaaatttgccttctttaaacatcgcgatgcgggtggtccgctgtggcctgacagttttgccaaagccctgactaacggtaacgaactgatgagccgcaactttggcgcgaaatttgggcttctggaagccggttacaaagctgatttgaccatttgcgattacaactcgccgacgccgctgctggcagacaatatcgccgggcatatcgctttcggtatgggctcaggcagcgttcacagcgtgatggtcaatggtgtgatggtctatgaagaccgtcagtttaacttcgattgcgattccatttatgcacaagccagaaaagccgctgccagtatgtggcgtcggatggatgcgctggcataa

SEQ ID NO: 484952 - DNA, 1257 bp, Shigella sonnei
gtgaaatttgagtatggctgctcacccgatttaaccgttgaacagttaaaaaatcagggcttccactatgttctgattgccaccggcactgataaaaatagcggtgtgaaactggcgggcgacaaccaaaatgtctggaaatcactccccttcctgcgtgaatacaacaagggtacagcgctcaagctgggcaaacatgtggtcgttgtcggggcgggtaacaccgcaatggactgcgctcgtgcggcgttacgcgttccaggcgtagaaaaagcaacgatcgtttaccgtcgttcactacaagagatgcccgcatggcgcgaagagtatgaagaagcgttgcacgacggcgtagagttccgtttcctgaataatccggaacgtttcgatgctgatggcaccttaaccttgcgcgttatgtcgcttggcgaaccggatgagaaaggtcgtcgccgtccggttgaaaccaacgaaacagtaacactgcatgtagacagcctgatcaccgccattggtgaacagcaggatactgaagccctgaatgcgatgggcgtgccgctggacaaaaacggctggccagacgtcgaccataatggcgaaactcgtctgactgacgtctttatgatcggcgacgtacagcgcggaccatcctccattgtcgctgctgtcggaaccgcgcgtcgggcgaccgatgccatccttagtcgggaaaatatccgttcccaccagaacgataaatactggaacaacgtcaatccagcggaaatctatcaacgtaaaggcgatatctctatcacgctggtgaacagtgacgatcgtgacgcgtttgtcgcccaggaagccgctcgctgcctcgaatgtaactacgtttgcaacaagtgtgtggatgtctgcccgaaccgcgccaacgtctccattgcagtccctggcttccagaatagattccagacgctgcacctcgacgcttactgtaacgaatgcggcaactgcgctcagttctgtccgtggaacggtaaaccatacgaagacaaaatcaccgtcttcagcctggcgcaagactttgataacagcagcaccccaggcttccttgtggaagattgccgggtacgagtacgtctgaataaccaaagctgggtgttaaacatcgacagcgaaggtcagtttaacaacgtaccaccggagctgaacgatatgtgccgcatcatcagccatgtccaccagcatcatcattatctgctgggccgcgtggaggtgtaa

SEQ ID NO: 484953 - DNA, 303 bp, Shigella sonnei; identical to SEQ ID NO: 484410

SEQ ID NO: 484954 - DNA, 534 bp, Shigella sonnei
ttgattgaaggcccggctgattttaatgaccgggtagacgaactgtttttagcccaccagcttccggtagctatttacagttattgccagtatcaggacggtgcagcccccgggcgtggtgcctggacgccatttgctgaattttcgccggagtggcaggcgctacaagccgcacgtcgtattcaggcacaaacttacttcatcgatttgccttgctgggcgcagagtgaagaagtggacgattcgcctgatacgcaagaggaaagccaggccttgctgctgcgtgccacccgcatggataacagcgacaccctgtgggatcacttgttcgaagatgaaagccagcaaactgcattaccctctgcactggcgcactattttgcccaactgcggggcgattcccccggcgatgcactcaatcgtcagcgcgaagcctttatggcccgctggattggatgggcgatgcagcaaaacaatggcgacgtgttagtcgtctgcggtggctggcacgctcctgcactggcaaaaatgtga

SEQ ID NO: 484955 - DNA, 1527 bp, Shigella sonnei
atgcctgccccggtctggcaaagctggtactggcagtggggcttacagcaggcgggagaacaactgctaaaaacggttcttacccgtttgcgccagcacaaattgcctgcttcgaccgcggatatggctgccgctcatctgcatgcgatggcgctggcacagttgcgcggacataaactaccgttacgcactgactggctggatgccatagcaggctcgctgattaaagaagccctgaacgcgccgttgccgtggagctatcgcggagttattcatcccgacaccgatccgattctgctaacgttgatagacacattagcgggtgacggattcggtaaacttgccccttctacgccacaaccgcctctgccaaaagatgtcacctgcgaactggaacgtaccgcaatctctcttccggcggagcttaccttaaatcgctttaaccccaatgggctagcgcaaagtcaggtgttacatcggctggcaatactggagatcccagggattgtacgccagcagggaagcacactgacacttgcaggcaacggtgaagaacgctggaaattaacccgcccgcttagccagcatgcggcattgattgaggccgcctgctttggtgccacactccaggaagccgcacgccataaattagaagccgatatgctggacgcgggtggaatcggcagtatcaccacatgtcttagccaggcggcgttagcgggtctggcgtccttcagtcaacaattactggagcaactcacattattaatcgcccaggaaaatcaatttgccgaaatgggccaggcgctggaagtgctatatgccttatggcggctggatgaaattagcggtatgcaaggcgcgcagatattacaaacgacgttatgcgcggctatcgatcgcacgctgtggctgtgtgaatctaacggcagaccagatgaaaaggagtttcacgctcacctgcatagctggcaggcgctttgccatatcctgcgcgatctacatagcggcgttaatttacccggcgtttttctttctgcggcggtagccttactggagcgccgcagtcaggcgattcatgtcccggcgctggatcgcggcgcggctcttggcgcactgatgcgtctggaacatcccaacgccagtgccgaagcggcgctgacgatgctggcgcagttatccccggcacaatccggcgaggcgctgcacggtttgctggcgctcgcccgtcatcaactggcctgccaaccagcatttatcgccggtttcagtagtcatttaaatcaactgagtgacgacgattttattaacgccctgcccgatttgcgcgcggcgatggcctggctaccgccacgagaacgcgggacactggcgcatcaggtgcttgagcattaccagcttgcgcagcttcctgtttcagcgctgcaaatgccgttgcattgtcctccgcaagccattgcacatcatcaacaactcgaacagcaggcactggcatcgctgcaaaactggggagttttccatgtctga

SEQ ID NO: 484956 - DNA, 1137 bp, Shigella sonnei
atgtctgaactgaacgatcttctgaccacccgtgagctacaacgctggcgattaattcttggcgaagcggcagaaacgacgctttgtgggctggatgacaacgcccggcagatagaccacgcgctggaatggctgtatgggcgcgatcctgaacggctccagcgtggtgaacgctccggtggattaggtggctcaaatctcaccactcctgagtggatcaacagtattcacacgctgtttccgcaacaggtgattgagcggctggaaagcgatgccgtactgcgctacggcattgaagatgtggtgacgaatctcgacatgctggaacgtatgcagccttctgaaagcctgctacgcgccgttttgcacaccaaacatctgatgaatcccgaagtactggctgccgcccgccggatagtgcgccaggttgttgaagaaattatggctcgactggcaaaggaagttcgtcaggctttttctggtgtccgcgatcgccgtcgccgctcatttattccactggcgcgaaactttgatttcaaaagtactctgcgcgctaacctgcaacactggcacccgcaacacggcaagttgtatatcgaatccccccgctttaacagccgcattaaacgccaaagcgaacaatggcaactggtcttactggttgatcaaagcggatcgatggtggactcggtgatccactctgcggtgatggcggcctgtttgtggcagttacccggcattcgtacccatctggtggcgtttgacacaagcgtggttgatctcacggcagacgttgccgatccggtagagttattaatgaaagtacagttgggcggcgggaccaatatcgccagtgccgtggagtatggtcggcaacttattgaacaaccagcaaaaagcgtcattatcctcgtgagcgatttttacgaagggggttcatcatcattgctgacgcatcaggtgaaaaagtgtgtccagagcggcatcaaagtgctgggactggctgcgctcgatagcaccgcaacaccttgctatgaccgcgatacggcccaggcgctggttaatgtcggcgcacaaatagccgccatgacgccgggcgagctggcatcatggcttgcggagaatcttcagtcatga

SEQ ID NO: 484957 - DNA, 2001 bp, Shigella sonnei
atgaattcactacgtccggaattattagaactgacaccgcaggccctgacggcgttaagcaatgccggttttgttaagcgcagtcttaaggaactggaaaatggcaacgtcccggagatcagccatgagaacgacgctttaatcgccaccttcagtgacggtgtccgtacccagctggcgaacggccaggcactgaaagaggctcagtgcagttgcggggccaacggtatgtgccgtcatcgcgtgatgctggtgttaagttatcaacgactttgtgccaccactcagtctacggaaaaagaagaagagtgggatccggcaatctggctggaagaactggctacccttcccgatgctacccgcaaacgcgcacaggcgctggtcgctaaaggcatcaccattgagttgttctgtgcgccgggtgaaattccctctgcccgcttaccgatgagcgatatgcgtttttattcccgcagcagtattcgtttcgcccgttgtgattgtattgaaagcacactttgcgaacatgtcgtactggcagtacaggcctttgtccaggcaaaagcgcagcaagcggaattgactcatttaatctggcagatgcgcagcgaacacgtcacatcatctgacgatccgtttgccagcgaagaaggcaaaacgtgtcgtcaatatgttcaacaactaagccaggcattatggctgagcggcatcagccagccgcttattcactacgaggccgctttcagccgcgcgcagcaagcagcggaacgctgcagctggcgatgggtgagtgaatcgctacggcaactgcgcgccagcgttgatgccttccacgcccgcgccagccactatcatgccggagaatgcttacgtcagcttgcggcattaaacagtcgattaaattgcgcacaagagatggcccggcgcgacagtattggtgaagttcctcctgtgccgtggcgcacggtcgttggctctggcattgccggagaagcaaagcttgatcatctgcggctggtgtctttaggtatgcgttgctggcaggatattgagcattatggtttacgcatctggtttaccgatcccgacaccggcagtattttgcacctttcgcgcagttggccgcgaagtgaacaggaaaactcaccggcagctacgcgtcggctgtttagttttcaggctggcgcactagcgggcgggcaaattgtttcacaagcagcaaaacgcagtgccgatggcgagctgctgttagctacccgcaaccgcttaagcagcgttgtgccgctgtcgcctgatgcctggcaaatgttgagcgcgccgttacgccagccgggcattgtggctttgcgggaatatttacgccagcgtcctcccgcctgcatacggcctcttaatcaggtcgataacttatttattctgccggtcgctgagtgtatttcgctcggttgggatagcagccgccagacgctggatgcgcaggtaatcagcggcgaaggtgaagataatctcctgacgttatcccttccggcatctgcctgttctccttttgccgttgaacgcatggcggcgcttttgcaacaaacagacgaccccgtgagtctggtttctggctttgtcagctttgtagaggggcaattgacactggaaccacgggtgatgatgacaaaaacccgcgcctgggcgctggacgcagaaactgcgcctgtggcaccgctaccttctgccagcgttttgcctgtgccgtctaccgctcatcagttgctgatgcgctgccaggcgttacttattcaactgctccataacggctggcgctatcaggaacagagcgctattagtcaggcagagttgctggcgaatgacctctccgcggtcggtttttatcggctggcacatgtgttgggacaatttcgtaatacagaaagcgaggcacgggtagaagcaatgaataacggtgttttactttgcgaacaattattccccatgcttcagcaacaaggatga

SEQ ID NO: 484958 - DNA, 462 bp, Shigella sonnei
atgaaggctttcaataagctgttttccctcgttgttgcatctgttctggttttctctcttgctggctgcggtgacaaagaagaatcgaagaaattcagcgccaatctgaacggcactgaaattgccattacctatgtctacaaaggtgacaaggtgcttaagcaatcttctgaaaccaaaattcaatttgcctccattggtgcaaccaccaaagaagatgctgccaagacacttgagccgttaagcgccaaatacaaaaacatcgcgggtgttgaagaaaaattaacctataccgatacctacgcgcaggaaaacgtgactatcgatatggaaaaagtggattttaaagccctgcagggtatttcaggaatcaacgtttctgctgaagatgccaaaaaaggtatcactatggcgcaaatggaactggtgatgaaagccgctggttttaaagaagtgaaataa

SEQ ID NO: 484959 - DNA, 471 bp, Shigella sonnei
atgctaagtaacgatattctgcgcagcgtgcgctacattttgaaagccaataataatgacctggtgcgtattctggcgctgggtaatgtcgaagccaccgcggaacagatcgccgtctggctacgtaaagaagacgaagagggttttcagcgttgtccggacattgttttgtcgtcattcctcaatggcctgatttatgaaaaacgcggcaaggatgagtctgctccggcactggagccggaacgtcgcattaataacaacatcgtgctgaaaaaattacgcatcgcgttttcgctgaaaaccgatgacattctggcgatcctcaccgaacagcagttccgcgtttcgatgccggaaattacagcgatgatgcgcgcaccggatcataaaaacttccgcgaatgcggcgatcaatttttacgttattttctgcgtggactggcagcgcgccagcatgtgaagaaaagctaa

SEQ ID NO: 484960 - DNA, 720 bp, Shigella sonnei
atgattaaagtcttaattgtcgatgatgaaccgttagcacgggagaacctgcgtgtatttttgcaggagcagagcgatattgaaatcgttggagagtgttcaaacgccgtggaagggatcggcgcggtgcataaactgcgcccggatgtgctgtttctcgatatccagatgccgcgcatcagtggtctggaaatggtggggatgcttgacccggaacatcgcccgtatattgtttttctcactgcgtttgacgaatacgctattaaagcctttgaagaacatgcctttgattatctgctgaagccaattgatgaagcgcgactggagaaaacgctggcgcgattgcgtcaggagcgcagcaagcaggatgtttcgctgttaccggaaaatcaacaggcgctgaaatttatcccttgtacggggcatagtcggatttatttgctgcaaatgaaagatgtggcatttgtcagcagtcggatgagcggtgtctacgttaccagccacgaagggaaagagggctttaccgaattgacattacgtaccctggaaagtcgtacaccactactgcgctgccatcgtcagtatctggttaacctcgcgcatttacaggagattcgtctggaagataacggccaggccgagttgattttgcgtaatggcttaaccgtgccggtcagccgccgttatctgaaaagcttaaaagaggcgattggcctgtaa

SEQ ID NO: 484961 - DNA, 1686 bp, Shigella sonnei
atgtacgattttaatctggtgttgctgctgcttcagcagatgtgcgtttttttagtcattgcgtggttaatgagtaaaacgccattattcataccgttaatgcaggtcacggttcgtctgccgcataaatttctctgctacatcgtcttttccatcttctgcatcatgggcacctggtttgggttgcacattgacgattctattgccaatacccgtgcgataggcgcggtaatgggcggcttactcggcggtccggtcgtcggtgggctggttggtctgaccggcggcttacatcgatattcgatggggggcatgaccgcgctaagttgcatgatctcaaccatcgttgaaggattgctcggcggcctggtacacagcatcctgatccgtcgcgggcgcactgataaagtctttaaccccattaccgccggtgccgtcacgttcgtcgctgaaatggtgcaaatgctgatcatcctggcgatcgcccgaccttatgaagatgcggtgcgtctggtgagtaatattgctgcgccaatgatggtcaccaataccgtcggcgcggcgctgtttatgcgtatattgctcgataaacgcgcgatgtttgaaaaatacacttcggctttttctgccactgcgctgaaagtggcagcctcgacggaaggcattttgcgacaggggtttaacgaagtgaacagcatgaaagtggctcaggtgctgtatcaggagctggatattggtgcagtcgcgattaccgatcgagagaaattgctggcctttaccggaattggtgacgaccaccatttacccggcaaaccgatttcttcgccttacaccttaaaagcgattgaaaccggtgaagtggtctacgctgatggcaacgaagtaccttatcgttgctctttgcatccgcaatgcaaactggggtcgacgctggtaattccgttgcgtggcgaaaatcagcgcgtgatgggcaccatcaaattgtatgaagccaaaaaccgtttattcagttcaataaaccgcacgctgggcgaggggattgcgcaactgctttcggcgcagattcttgccgggcaatatgagcggcaaaaagcgatgctcacccagtcagaaatcaaactgcttcacgcccaggtgaatcctcattttttgtttaatgcgcttaacaccattaaagcggtgatccgccgcgacagcgaacaggccagccagctggtgcagtatctttccacttttttccgcaaaaacttaaagcggccttcggagtttgttactctcgccgacgaaattgaacatgtgaacgcttatctgcaaattgaaaaggcgcgcttccagtcgcggttgcaggtcaacattgctattccgcaagaattatcccagcagcaattgcccgcgtttaccctgcaaccgatagtggaaaacgccattaaacatgggacatcacaactgctggatacagggcgagtggcaatcagcgcccgacgtgaggggcaacatttgatgctggagatcgaagacaatgccggtttgtatcaaccggtaaccaatgccagtgggctggggatgaatctggtggataagcgtttacgtgaacggtttggcgatgactatggaataagcgtcgcctgtgagcctgatagttacacccgaataacgttacgactaccatggagggacgaggcatga

SEQ ID NO: 484962 - DNA, 249 bp, Shigella sonnei
atgcgtgttgagatctgtatcgctaaagaaaaaatcactaaaatgccaaacggtgctgtggatgcgttaaaggaagaattaacccgacgcatcagtaaacgttatgacgatgtagaggtgatcgtaaaagccaccagcaacgatggcctttctgttacacgcaccgcagataaggattctgcaaaaacatttgttcaggagactctgaaagatacctgggagtctgctgacgagtggtttgttcggtaa

SEQ ID NO: 484963 - DNA, 366 bp, Shigella sonnei
atggaatttaaagatttaccgtctgatgtacagaaaacagcagctcatacattgcattctgtgctgcgagaaatcgggaaagatattgcaagcgagccagcaaaagatctggcccggaaaatcaagaccgctttcgttgagctttataatgttggcactgactctgaaactgtcgagaccaagaccgtaagttcaccaatattctcacttgagccaagcgtattatcaggtgaaatatgcaccgagatttccagcgaactgcttccggtaatacgagaagcaattcgccgtcgcggtttggatggaagttatgatcatgacgttctgcaagttctcaggacaatggtgacttcactggggatttga

SEQ ID NO: 484964 - DNA, 153 bp, Shigella sonnei
atggatactatcgatcttggcaacaacgaatctctggtgtgcggcgtgttccctaaccaggatggaacgtttaccgccatgacgtataccaaaagcaaaacgtttaaaaccgaatctggcgcgcgttgctggttagccagaaacactgactga

SEQ ID NO: 484965 - DNA, 291 bp, Shigella sonnei
atgttacccgttttatggctaccatctgctcgtgatgatttgcgccagatcgtagcctacatagctaaagaaaatcccgcggcagcacgcagaatgaaaattcgaattgaaacatccgttttgccgctcacagagcatccttacctgtatcctccaagcgagcgagttcttggtcttcgtgaaattgtaactcatcctaactacatcatcctttaccgagtaacagcatcaagcatagaagtagtaaatattgtgcattctcgaagacagtatccaggcaaaaacagttaa

SEQ ID NO: 484966 - DNA, 195 bp, Shigella sonnei
atgagtacagtcctttccccaatggtttcagaatttgagacagttgagcaagaaaatagttacaacgaatggctgcgggccaaagtagcagcaagcctcgcggatccccgcccggcgattccgcatgatgaggtaatggcggaaatggaacaaattattgcccaaattgctgctgcaactcacagaggtgaataa

SEQ ID NO: 484967 - DNA, 501 bp, Shigella sonnei
atgaaaagaaaatcattgtcagacaccgacctcaacgccgccagaagactgaaagaaatctggatggcaaagaaatctcagttgggattgactcaggaacgtgcggcggaaattatggggttttcaacacaaggggcggtaagtcactacctaaatggtcaaaccccactaaaccttgaggctgttctaaagtttgctggcttactgaaagttccccctgagtcaatcaggccagacatggtagatttgctgcaaattgcaaggatgtattgtcgagaaccacagcaagataacatagtcgcattaccagcagacacagaacaaacagaggatgaactaccgtttgccgtagagccgatggaacgagatttaatccatacgttcagagcttttccgaaagaagatcaagaacacatgcttcaggagatgaaagataaaaaagaatcaatggatcgtacggttgcgcggtggttagctgcacaaaaaggccgtcgcgcctaa

SEQ ID NO: 484968 - DNA, 264 bp, Shigella sonnei
atgaatcttggagaatatttgcatcattttcatataacccagagttcatttgctgagattgttggcgcatcccaagggatggtcagccacgttataacggggcgtgcaaaacttacaggagaaaaaatattacgttggtgtgaagcaacgggatgggtggtgaccccacatgagattgacagtaaaacctaccccaacccaactgacggcttgcctgctgagtttcaggctaacacacaaccatcggcgggggttgattcatga

SEQ ID NO: 484969 - DNA, 426 bp, Shigella sonnei
atgaaaatcaagcatgaacacatccgcatggcgatgaaagcctgggcgcatccggacggtgaaaaagttccggcagctgaaataaccagggtttatttcgaactgggaatgacgtttccggttctgcataacgacagcaagcacaacacgctttatctcaacacccaaaagattttccgttggctggataaagacacccctgacgctgttgaaaaaattcaggcgttgttacctgcgatcgaaagggcaatgccacctccgctggtggcacgaatgcgcagccacagttcagcttattttcgggaactggtggagacgcatgaacgactggtgagagacgctgatgattttgtcgcagtggcaatcgccggtttcaatcagatgaaccgtggtggcccggcaggaaatgctgtggcagtacattga

SEQ ID NO: 484970 - DNA, 1065 bp, Shigella sonnei
atggctaacgcctggctcagattatggcatgacatgccaaatgaccctaagtggcgaacaattgccagggtgtcagggcagccaattgcaacagtgatggcagtgtatatccacctcctggtgagcgcgtcacgaaatgtcacgcgaggtcacattgatgtcacgacagaagatttggcaagtgcgctcgacgtgacagaagaggtaattgattcaattttgcagacgatgcaggggcgggtacttgatggtgatttaatcactggatgggaaaaacgccaggtgcttaaagaggacaacggcaatatttcgcaaaccgcaaaatctcctgcagagcgcaagagggcgcagcgagagagggaaagaaagcgggaacaaaatggcgattgtcacggcgcgtcacgaaatgtcacgcacatgtcacgacgagtcacgacagatacagataaagatacagataaagaagatcaaaacactatggtccatggcgtaaaaaacgccacgaaccaggcaggggatgttcagaccgtcaatcctggtcagccagcaggctcgacaccggaagccgattcagcgtatgcgctgaaagccgattcgggcgctgtgcagcaggtgatgaccgcaaggccggagcaatcactccaactgcagcagcctgaagccgattccgccattcagcgggaagccgatcgggtagccccggaaaacaccgggcagcctgtgggacgagtggattatccggatgtgttcgaacaggtctggcgggaatacccgttgcgtgccggggcaaacccgaagaaatccgcattcagtgcctggaaggccagattgcgcgagggggtgccaccagagaccatgctggatggtgtgaggcgttacgcgagatacctggcggcgaccgggaaagcgggaacggaatttgttcagcgagcgacgacgttttttgggccggaccggaattttgaaaacccctggttgctcccggtaagcggcacgaacaaccagcgttgtgtgaatcatatttctgaaccggataccgaaattccgccgggattcagggggtga

SEQ ID NO: 484971 - DNA, 747 bp, Shigella sonnei
atgaaaaacattgcggcagccggggttcttgaacgtattcacagacttgcaccacagggggcggttccaccgtaccggacggtggaggagtggcgggaatggcaacttgctgaaggacgaaaacgcagcgaggagattaaccgccagaatcgccagttgcgggtggaaaaaatcctgaatcgttcgggcatccagcctctgcacagcaaatgctcgtttgcgaattatcaggtgcagaacgacgggcaaaaatacgcgctgagccaggccaaatccatagctgacgaactgatgaccgggtgcacgaattttgtgttcagcggtaaaaccggcaccgggaaaaatcaccttgcagcggcgatgggtaaccggctgatggcgaaggggcgcagcgtgattatcgtcaccgagtctgatgtcatgagcgtgttgcatgacagctacgacaacggcaaatccggtgaaaaatttttacaggagctttgcggggttgatttgctggtcctggatgaaataggcattcagcgggagacgaaaaacgagcaggtggtattgcaccagataattgatcgccggacagcatcactgtgcagtgtcgggatgttaacaaacctgaatcatgccgcaatgagcacgcttcttggtgagaggattatggaccgcatgaccatgaacggttgtcggtgggtgacgtttaactgggatagctggcgttcaaatgtcagctttccgggagttgtgaagtaa

SEQ ID NO: 484972 - DNA, 726 bp, Shigella sonnei
atggaaactgtatttgacgcactgaaagcactgaaaagagcctcttcacatgtggtggcgtcccgccttggaatcagccgtgaagatgcggtcaacgaactgtggaaactgaagcgccgtggtgaagcggataacaagggttcgatgtggtggctgattcaggctggtgaaagtgaaccagtgtcaccggtaccgaaagtgacagcgcaaatgctgactgaggcgattgaacaacatggcccacaaacggcggatgagctggcactgatgttcgggattacctcccgccgggcgaattcatcgctggccatggcaatcagcaaagggcgtctgattcgcgtgaatcagggcggtaaatttcggtactgcataccgggcgctgatttaccggcagagccgaaagccgcatccatagcggaaacggatggtaaagtctttcctcagccagcaggtgttgcgttaccggtacaggaagctgcaacacaggaagaaattaaaacagaaactgtggcggacattgtgcagtcgttgccatcgttcaccgaaacgcaagcggatgacctggttttaccatcgctgcatatggcaaaccgcgaactgcgtcgggcgaaaagtcatgtccagaagtgggagcgtgtctgcgccgcgttgcgggagctgaacaagcaccgggatattgttcgacagattgtcgattcctccggtcgtattgtgtcggaaaagtga

SEQ ID NO: 484973 - DNA, 423 bp, Shigella sonnei
atggcaaaagtatttacacaggaagagcgggaaaaaattaaggggcaggttgttgaactcgtacgccagagtgggcgcgagacgttacgacaactggaagctaaaaccggggcgacaagatatttaataagcgttctcgccagagagctggttgccagtggggatgtatacaactctggctacgggttattcccgtctgaacaggctcgtaaggactggcaaaacgcccgcaaaaaactctcgagggcaaagctgaagaaaccatctgtggttgatccggaccttatctggtcattaccggacggagaaatacgccgctacgacagacatcagaacataatctgtcgcgagtgccggaagagtgaagttatgcagcgtgtaccggctttctatcagggtgattttcaggaggcggtactgtga

SEQ ID NO: 484974 - DNA, 357 bp, Shigella sonnei
atggaaataaaaccagaagatgagttaagcaatattgttttatttccggtaaaagaggataaccctcgtaatcaggttaattttctttatgagccatcggaaagaccatattgccatcacgcttctgtccgggttgacgaaaaagagcgtcaggtccgctgtaaaatttgcggtgcagttgtggagccatttgactggatgctctctgtggcgaaaagagaaaccagactggcagatgatgtaaggctcttgcgccaggaggagcgggaaaggcgaaaaaatatagaaaagctaatccagattgagcgtaatgcgaaagcgcggatacgcagggtgacaaaatatagccccgaataa

SEQ ID NO: 484975 - DNA, 1833 bp, Shigella sonnei
atggcccgcatgtttgatacattaggattttacattatgaatgtgcaacattttgatttttttacagataatgagttttctaatctggaaagatatcaaacttgtaaagccatggccaaaggttatgcgggcaattacaaaaccgggcagtcaaggttgatgcatgcccgctcatactgcttcagcatcgtagctgcatattgggatacccttgcaaaaaagcaaaaaagcagcattaaaatgagggcagtaccgcacactgtttacatagaagacattccatgtgatgcacgcgagctcgctgaacgaacaggtgagcttattgctcaatttccggcggaggacgctggatatctgattgggtcaatttatacggtaatgctgccatccgcttaccgttcggaattgggggcttactatacccccccacctttggtagcgcgtctcttggacctggctgaaaagtctggtgttgatttttctcatgcatcggttattgatcctgcgtgtggtggcggtgcatttttggcaccagtagccattcgaatgttaaaaaaagacaaggggtcttcccctgaatggatgttgaggagaatcagtcgtcgtttaaaggggatagagatcgatccatttgcggcttggatgagtttggtattgctcgaatctgtactaatgccactatgtgtaaaggtaaaacgtagattgcctgaagatacaattattgttgctgatgcgcttcagcaagataaattttctggttatgatcttgtggtagggaatccgccttacggacgtgtcactctcgatattaaaacgagagaaaaatattctcgttcgttatttggtcatgcaaatctatatggattgttcaccgacttagctgttcgcatggttaaagagaaaacaggagttattgcatttcttacgccaacttcttttcttggtgggcagtatttcaccgcgctgcgaacccttttgaccgaaaaaactactccgtatgcccttgatttcgtcactgacagggatggggtctttgacgatgttctccaggaaacaatgttgacagcattcaaggcgggagaacataaagttcgggcccaggtatcctcacttgtccctaaggggttgaacaaagcaaaaattgagaaaataggtaatgttgatatagaaaaaggtggagcaacgtggcttttgccacgcgttaaagatgatgcctgttttcttaatgtattaaaacagatgtctacgcgtttagctgatctgggatactcagtctctacaggtcagttagtctggaatcgatttaagtcgcagttgcgtacgacgaaaggaaaaaatagctacccattagtctgggcggaatcaataacttcagctggttttcgttttagtgcagacagaaaaaatcatgttccctatatcgatataaccccacaacagggtttccttgtgacaaaatctgaatgtgtgcttgttcagcggacaacatcgaaggaacaggacagaaggattttagcggcaattttacctcagggatttatagatgaaactggtggcgtagtagttgaaaaccatattaatattgtatattcaaacggattgttctctgcggttcgccctgatgttattgatatgctacttaattcgcatgttgtcgatcgggcgttcaggtgtataagcggaagtgttgctgtttcggcctatgaattgaattcaatcccgttgccttctctggagcaggtgatggagattcaatcgttaattgatgctggcgtccacagacggattattgagagaactatcgctggtttctatggagtgatgattgcatga

SEQ ID NO: 484976 - DNA, 1083 bp, Shigella sonnei
atgaatctgcctgttgttcccccattgaatgttatccgggaaagattacaattaattttccctgaagggactgagaatcgtggatatttaattcgggaaatagctgcaaaaacaatttttgtcatgttttatgctggtgcggttgaggggctggggcgatggataaggcccagccaggttgtaagtatgggagattcgcaggctgctcttactgatgatgcgtccagagaaagctgggtaaagatgactttctctaaacaaaagataaggcctgctgatgcatggtatgcggaaaatacgcgtgagccaatacgtgatgaaactataaaaaatggcctaataccttgcaatgcaattgttgagcgtaaaggtatacccaccacatcctctcgtcctcgttacagtttgaatcgctcttttgcagcactctttgatgccgggcttgaaggagattcgctgctgagtgcaataagttcctggcaagaaaatcatttgaacaaagccgctcttgctaggttgcgtttattgaaatcaggggcagtgattgctgctgatgccgtagtcgtcactttcccaaatggagagaagagaactttagctccgggcccgtcaagtacaatagctaaggccgtcatcgaagtttttgctcctaattttcttaagaatccaactgtgctctggttgtctgaatccgggaataaagttgttgctcaggatgatgtattggcaaaagcattggggctgaatattgatgcctcaaaagcacttccagatattattttgattgatttgggagaggaccgaacgggttcggacatgcttgtagttttcactgaagtagttgcgacagatgggcctataaacagggaacgaaaagttactctcactcatttggctattgacgctgggttcagcgagaaaaatcttgcattccttacggcatttatggacagaagtgctctgccttttaaaaaggcaataccagaattggcgtggggatcttatgcatggtttgcttctgaaccggagcacttaattgatcttcgggatggttatccggtaaagatcagccagagaaaatga

SEQ ID NO: 484977 - DNA, 333 bp, Shigella sonnei
atgggtaaaacaatcagtataaaggtcctgttcggtatttatcttctattaatggcaggcaaagtttttgccttcagttgtaatgtcgatggcgggtcaagtattggagcaggtacaacctctgtttatgttaatctcgaccctgtaatacagccgggccagaatctggttgtagacttgtctcagcatataagttgctggaatgattacggcggctggtacgacactgatcatataaacctggtacaaggctcagctttcgcaggctccctacagtcatataaaggatcgctgtactggaataatgtgaccaacaggcggctgcaccgttga

SEQ ID NO: 484978 - DNA, 2280 bp, Shigella sonnei
atgaagaaaaaaattgaatcctaccagggtgctgcaggtggttggggtgctgttaaatccgtagcgaatgcagtacgtaagcagatggatatacgccatgatgttattgccatgtttgacatgaataagccagagggctttgactgtccgggttgtgcatggccagatcctaagcacagtgcgtcattcgacatttgtgaaaacggcgcaaaagcaatcgcctgggaagtcacggataagcaggtaaatgcctctttctttgctgagaatacggttcaatcattacttacctggggagatcacgagcttgaggctgcggggcgtctcactcagcctttgaaatatgatgccgtcagcgactgttacaagccattaagctggcaacaagctttcgacgaaattggcgcacgccttcaaagctatagtgatcccaatcaggttgaattctatacttcgggccgcacttccaatgaagctgcctttctttatcagctttttgcccgtgaatacgggagcaataactttcccgactgctccaacatgtgccatgaaccgacaagcgtgggtttggcagcgagtatcggtgtaggtaaagggaccgtgttgctggaagactttgagaagtgcgatttagtcatttgcattgggcataaccctggtacaaaccaccctcgcatgctgacttcgttgcgcgctttagtgaaacggggagcgaaaatgatcgccatcaatcctctacaggaacgtggcctggagcgatttaccgcaccgcaaaacccgtttgaaatgctgacgaactctgagactcagttggccagtgcctactacaacgtgcgcattggtggcgatatggcgttgctcaaggggatgatgcgcctgttaattgagcgcgatgatgctgcaagtgccgcaggtcggccctcattgcttgatgacgaatttattcaaacgcataccgtcggctttgacgagctacgccgtgacgttctcaattccgagtggaaagatatcgaacgtatttctggactaagtcagacacaaatcgccgaactggctgacgcatatgccgctgccgatcgcaccattatctgttacggaatggggatcactcagcacgaacatggtacccagaatgtacagcaactggtcaatctgctgttgatgaaaggtaacattggcaagcctggtgcgggtatctgcccactacgaggtcactctaatgtacagggcgaccgaaccgtcggtatcaccgagaaaccgtctgcagagtttctggctcgcctgggtgagcgctatggcttcaccccacctcatgcacctggacatgctgcaattgccagcatgcaagcaatatgcacggggcaggctcgagcattgatctgcatggggggcaactttgcactggcaatgccagatcgggaagcgagcgctgtaccgttaacgcaattagatttggcggtacacgtagccactaagcttaaccgctctcatctgctgaccgcacggcatagctatattctgccggttctggggcgtagcgagattgacatgcaaaaaagcggtgcgcaggcggtaaccgttgaggattcaatgtcgatgattcatgcctcgcgtggcgtgttaaaacccgccggtgtaatgctgaaatcagagtgtgcagtggtcgcgggaatcgcgcaggcagcactaccccacagcgtggtagcctgggagtatctggtggaagattatgatcgcattcgcaatgacattgaagctgtgttaccagagttcgccgactataaccagcgcatccgacatcctggaggttttcacctgataaatgcagctgctgaaaggcgctggatgacgccgtcaggtaaggctaatttcattaccagcaaagggctgttagaagatccctcttcagcgtttaacagtaagctggtcatggcgacagtacgtagccacgatcagtacaacacgacgatttatggtatggatgatcgctatcgaggggtattcggtcaacgagatgtggtctttatgagtgctaaacaagctaaaatttgccgtgtaaaaaacggcgaaagagttaatcttattgcgcttacgccagacggtaagcgcagctcacgccgcatggatagattaaaagtggtcatttaccctatggctgaccgctcactggtgacctattttccagaatcgaatcacatgctaactcttgataaccacgatccattaagtggcattcctggttataaaagtattccggttgaattagaaccatcaaattaa

SEQ ID NO: 484979 - DNA, 198 bp, Shigella sonnei
atgtatgcgaccacagtgaaaaacaaaatcacgcaaagagacaactataaagaaatcatgtctgtaattgtggttgtcttattactgacccttacgttgatagccattttttcggcaattgatcagctgggtatttcagaaatgggtcgcattgcaagagatcttacacatttcattatcaatagtttgcaagactga

SEQ ID NO: 484980 - DNA, 762 bp, Shigella sonnei
atgtcgctcgtttgttctgttatatttattcatcatgccttcaacgctaacattttagataaagattacgccttctctgacggcgagatcctgatggtagataacgctgttcgtacgcattttgaaccttatgagcggcattttaaagagatcggatttactgaaaataccattaaaaaatatctacaatgcactaacatccagacagtgacggtgcctgttcctgcgaagtttttacgtgcttcaaatgtaccgactggattgcttaatgaaatgattgcttatcttaactcggaagaacgcaatcatcataatttttcagaacttttgcttttttcttgcctgtctatttttgccgcatgcaaaggtttcattacactattaactaacggtgtgctatccgtttccggaaaagtgagaaatattgtcaacatgaagctggcgcacccatggaagctgaaagatatttgtgactgcctgtacatcagtgaaagcctgttgaagaaaaaactaaagcaagagcaaacgacattctcacagattctattagatgccagaatgcagcacgcaaaaaatttgatacgcgtagaaggttcagtcaataaaattgccgaacaatgtggttatgccagtacatcttattttatttatgcgttccgcaaacatttcggcaacagtccgaagagagtttctaaggagtaccgttgtcaaagtcacatgggtatgaatacgggcaacacgatgagtgctttagctatttga

SEQ ID NO: 484981 - DNA, 1683 bp, Shigella sonnei
atgaagtctgcattaaagaaaagtgtcgtaagtacctcgatatctttgatactggcatctggtatggctgcatttgctgctcatgcggcagatgatgtaaagctgaaagcaaccaaaacaaacgttgctttctcagattttacgccgactgaatacagtaccaaaggaaagccaaatattatcgtactaaccatggatgatcttggttatggacaacttccttttgataagggatcttttgacccaaaaacaatggaaaatcgtgaagttgtcgatacctacaaaatagggatagataaagccattgaagctgcacaaaaatcaacgccgacgctcctttcattaatggatgaaggcgtacgttttactaacggctatgtggcacacggtgtttccggcccctcccgtgccgcaataatgaccggtcgagctcccgcccgctttggtgtctattccaataccgatgctcaggatggtattccgctaacagaaactttcttgcctgaattattccagaatcatggttattacactgcagcagtaggtaaatggcacttgtcaaaaatcagtaatgtgccggtaccggaagataaacaaacgcgtgactatcatgacaacttcaccacattttctgcggaagaatggcaacctcaaaaccgtggctttgattactttatgggattccacgctgcaggaacggcatattacaactccccttcactgttcaaaaatcgtgaacgtgtccccgcaaaaggttatatcagcgatcagttaaccgatgaggcaattggcgttgttgatcgtgccaaaacacttgaccagccttttatgctttacctggcttataatgctccgcacctaccaaatgataatcctgcaccggatcaatatcagaagcaatttaataccggtagtcaaacagcagataactactacgcttccgtttattctgttgatcagggtgtaaaacgcattctcgaacaactgaagaaaaacggacagtatgacaatacaattattctctttacctccgataatggtgcggttatcgatggtcctctgccgctgaacggggcgcaaaaaggctataagagtcagacctatcctggcggtactcacaccccaatgtttatgtggtggaaaggaaaacttcaacccggtaattatgacaagctgatttccgcaatggatttctacccaacagctcttgatgcagccgatatcagcattccaaaagaccttaagctggatggtgtttccttgctgccctggttgcaagataagaaacaaggcgcgccacataaaaatctgacctggataacctcttattctcactggtttgatgaggaaaatattccattctgggataattaccacaaatttgttcgccatcagtcagacgattacccgcataaccccaacactgaggacttaagccaattctcttatacggtgagaaataacgattattcgcttgtctatacagtagaaaacaatcagttaggtctctacaaactgacggatctacagcaaaaagataaccttgccgccgccaatccgcaggtcgttaaagagatgcaaggcgtggtaagagagtttatcgacagcagccagccaccgcttagcgaggtaaatcaggagaagtttaacaatatcaagaaagcactaagcgaagcgaaataa

SEQ ID NO: 484982 - DNA, 1158 bp, Shigella sonnei
atgcacgttacagccaagccctccagttttcaatgtaatctcaaatgtgattactgtttttaccttgaaaaagagtcgcagtttactcatgaaaaatggatggatgacagcactctgaaagagttcatcaaacaatatatcgaagcgtctggcaatcaggtctattttacctggcaaggcggtgaacccactctggctggcctggattttttccgtaaagttattcactatcaacaacgctatgcaggccaaaaacgtatttttaatgcattacaaacgaatggcattttattgaataatgaatggtgtgcctttctcaaagaacatgaatttctggttggtatctcgatcgatggccccctggagttacatgaccgttacagacgcagtaattcaggtaacggtacttttgcaaaagtgatagcagccatcgagcgtctgaaatcatatcaagtagagtttaatacgttaaccgtcattaataacgttaatgtccattaccctcttgaggtttatcattttttaaaatctatcggcagtaaacatatgcaatttatcgaattgctagaaaccgggacgccgaatattgatttcagtggtcatagtgagaacacattccgtatcattgatttttctgtgcctcccacggcttatggcaagtttatgtcaaccatttttatgcaatgggttaaaaacgatgtgggtgaaattttcattcgtcagtttgaaagctttgtcagccgttttttggggaatgggcatacaagttgtattttccaggagtcctgcaaggataatctggttgttgaaagtaatggagacatttacgaatgcgaccattttgtctatccacagtacaaaattggaaacattaataaatctgaactcaaaacgatgaacagtgtacaactgacagcgcaaaaaaaacggatttcagcgaaatgtcagcaatgtgcatataaacctatctgcaatggcggttgtcctaagcatcgtattactaaagtaaacaatgagactgtttcttatttttgcgaaggttataaaatccttttttcaaccatggtaccttatatgaacgccatggttgagttagctaagaacagagtaccgctttaccacattatggatgttgcaaaacaaatggagaataattaa

SEQ ID NO: 484983 - DNA, 978 bp, Shigella sonnei
atgataaccattcccattacgttttatatgttgatagcaaagtatctctgtctgctgaagcccttttggctgcgtaagaataataaaacttcagtgttgttaatcattattatcctcgcaatgatccttggcgtggttaaaattcaggtctggttaaacgactggaataatgattttttcaatgcgctaagccagaaagaaaccgataagctttggcagcttgttctttggttccctgccctgctggggatctttgtattaatatccgtaaacaaaacatggttaattaaactactgactattcgctggcgcgaatggttaacagattactaccttaatcgctggtttgcagataaaaactactacttcacgcagatctacggcgagcataaaaatacagataaccctgaccaacgtatcgctgaagacattctcttactgatcagcaaaacgctcagtctttcatttggcttcatccagtcacttagcatgctgatcacctttaccgttattctttggcaaagcgcgggtacgctctcattcactgttggtggaacagaatggaatatccaggggtatatggtctataccgtcgtgctcattgtgatcggtggaactttatttacccataaggtgggtaaacgtattcgtccgcttaatgtggaaaaacaacgtagcgaagcgacatttcgaactaatcttgtgcagcataataagcagacagaactgattgcgctaagcaatgctgagtctctacaacgccaggagttgcgcgacaattttcataccattaaagagaactggcatcgtttaatgaatcgtcagcggtggcttgattactggcaaaatatttattcgcgctcgcttagcgttcttccctactttctgttattgccgcagtttattagcgggcagatcaatctgggcggactgatgaaatcgcgccaggcatttatgctaaatagctgcgcggaatag

SEQ ID NO: 484984 - DNA, 1254 bp, Shigella sonnei
gtgagccgtactacaactgttgatggcgctccggcaagcgacactgacaagcaaagcatttctcagccaaatcaatttattaaacgcggtacgccgcaatttatgcgcgtcaccctggcgctgttctctgccggactggcaacctttgcactcctctattgtgtgcagcctatccttccggtgctttcgcaggagtttggcttaacccccgcgaacagtagtatttcactgtccatttccacggcgatgttggctattggtttgctgtttactggccccctatccgatgccattggtcgcaaaccagtgatggtcacggcgctactgttggcctccatttgtacgttactttcgacaatgatgaccagctggcacggcattttgattatgcgcgccttgattgggctttcgttaagtggcgtggcagctgttggcatgacttatcttagcgaggaaatccaccccagtttcgtggccttttcgatggggttgtatatcagcggcaactcaattggcggcatgagcggacgcttaattagtggtgtcttcacggactttttcaactggcgaattgctctggcggcaatcggttgtttcgcgctagcctcggcgttgatgttctggaaaatccttccggaatcacgccattttcgcccgacttcgctgcgccctaagacgttatttatcaactttcgtctgcactggcgtgaccggggattaccgttattgttcgcagaaggctttttgctgatggggtcgttcgtcacgctgtttaattacatcggctatcggttgatgctttccccctggcatgtcagtcaggccgtggttggcttattatcgctggcttatttgaccggtacatggagctcacccaaagccggaaccatgaccacccgctacgggcgcggtccggtgatgttgttttcgacgggggttatgctgtttggtttactgatgaccttattcagctcgctgtggctgatctttgccggaatgttactcttctcagcaggattcttcgcagcccactcagttgccagcagctggattggcccccgcgcaaaacgcgctaaaggccaggcctcctcgctgtatctgttcagttactatctggggtcgagtattgccgggacgctgggtggtgttttctggcataactatggctggaacggcgtcggcgcatttattgctctgatgctggtcattgctctgctggtcgggacgcgtttgcatcgtcgtctgcacgcctga

SEQ ID NO: 484985 - DNA, 894 bp, Shigella sonnei
atgaatattgaacttcgtcatctgcgttactttgttgctgttgcggaagagctgcatttcgggcgcgccgctgcccgcctgaatatttcgcaaccaccgctaagtcagcagattcaggcactggagcaacaaattggtgcccgactgctggcacgaactaatcgcagtgtattgctgacggcagcaggaaaacagtttcttgcagatagtcggcaaatcctgtctatggtagatgacgctgccgctcgcgctgaaagactgcatcagggtgaagcgggggagttgcgcattggttttacttcgtccgctccttttattcgggcggtgtccgatacgttatcgctgtttcgccgtgattatcccgatgtccatttacaaacccgcgaaatgaacactcgtgagcaaatcgctccgctcattgaaggaacgctggatatgggattgctgcgtaacacagcgttaccggagacgcttgaacacgcagtcatcgtccatgaaccgcttatggcgatgatcccgcacgatcatcccctggcaaataacccgaatgtaacgctggctgaactggcgaaagaacccttcgtcttttttgatccgcacgtcgggacagggctgtatgacgatattctcgggctgatgcgacgttaccatttgacgcccgtcatcactcaggaggtgggcgaggcaatgaccatcatcggtctggtttccgccggtctgggtgtttcaattttgcctgcttcatttaaacgtgttcagctcaacgaaatgcgctgggtgccgattgctgaagaggatgcggtttctgaaatgtggttggtctggccgaaacatcatgaacaaagtccagcttcgcgtaactttcgtattcatctgctgaatgctctcaggtga

SEQ ID NO: 484986 - DNA, 1221 bp, Shigella sonnei
gtggttgctgaaaaccagcttgggcacattgatcaaataaagcagaccaacgcgggcgcggtttatcgcctgattgatcagcttggtccagtctcgcgtatcgatctttcccgtctggcgcagctggctcctgccagtatcactaaaattgtccgtgagatgctcgaagcacacctggtgcaagagctggaaatcaaagaagcggggaaccgtggccgtccggcggtggggctggtggttgaaactgaagcctggcactatctttctctgcgcattagtcgcggggagattttccttgctctgcgcgatctgagcagcaaactggtggtggaagagtcgcaggaactggcgttaaaagatgacttgccattgctggatcgtatcatttcccatatcgatcagttttttatccgccaccagaaaaaacttgagcgtctaacttcgattgccataaccctgccgggaattattgatacggaaaatggtattgtacatcgcatgccgttctacgaggatgtaaaagagatgccgctcggcgaggcgctggagcagcataccggcgtaccggtttatattcagcatgatatcagcgcatggacgatggcagaggccttgtttggtgcctcacgcggggcgcgcgatgtgattcaggtggttatcgatcacaacgtgggggcgggcgtcattaccgatggtcatctgctacacgcaggcagcagtagtctcgtggaaataggccacacacaggtcgacccatatggtaaacgctgttattgcgggaaccacggctgcctcgaaaccatcgccagtgtggacagtattcttgagctggcacagctgcgtctcaatcaatccatgagctcgatgttacatgggcaaccgttaaccgtggactcattgtgtcaggcggcattgcgcggcgatctactggcaaaagacatcattaccggggtgggcgcgcatgtcgggcgcattcttgccatcatggtgaatttatttaacccacaaaaaatactgattggctcaccgttaagtaaagcggcagatatcctcttccctgtcatctcggacagcatacgtcagcaggcccttcctgcgtatagtcagcacattagcgttgagagtactcagttttctaaccagggcacgatggcaggcgctgcgctggtaaaagacgcgatgtataacggttctttgttgattcgtctgttgcagggttaa

SEQ ID NO: 484987 - DNA, 696 bp, Shigella sonnei
atgctggagcgtttctttattaccggtacagacacttctgtagggaaaacggtggtttcccgcgcattgctacaagcgttagcctcccagggaaaaacagttgcgggatataaacccgtagcgaaggggagcaaagagacacccgaagggctgcgtaataaagatgccctggtgttgcagagtgtttcaaccatcgaactgccttatgaagcagttaatcctatcgcgttaagcgaagaagaaagtagcgtggcgcacagttgcccaatcaattacaccctcatttcaaacggcctggcaaacctgaccgataaagtcgatcatgtcgtggtagaagggactggcggctggcgcagtctgatgaatgatttgcgtccactctctgaatgggtggtgcaggaacagttgccggtgttgatggttgtcggtattcaggaaggttgcattaaccatgcactgctaacagctcaggcgattgccaacgacgggctgccgctcattggctgggtggctaaccgaatcaacccaggactggcgcattatgcggaagtcattgatgtgctgggtaaaaaacttccggcaccgctcattggtgaactgccttatctgccgcgcgccgaacagcgagaactggggcaatacatccgcttagctatgctgcgcagtgtgctggcggtagatagagtcacggtgtaa

SEQ ID NO: 484988 - DNA, 1257 bp, Shigella sonnei
atgttccgccgtctgcttatcgcaacagtcgtcggtattctcgcggcctttgccgttgccgggtttcgtcatgcgatgctgctactggagtggttgttcctcaataatgactccggcagtctggtcaatgcagcgacaaacctttccccctggcgacggctgctaactccggcgctcggcggactggcggcgggtttgttgctgatgggctggcagaaatttacccaacaacgccctcatgcgccgaccgattacatggaagcgttgcaaaccgatggacagttcgattacgcagcaagcctggttaaatcgcttgcctcgctgctggtagtaaccagcggcagtgcaattggtcgcgaaggtgcgatgattcttttagctgcccttgccgcctcctgttttgcccaacgttttacgccacgccaggaatggaaattatggatcgcctgtggggccgcggcgggaatggctgcggcctatcgcgccccgcttgctggcagtttatttatagccgaagtgctgtttggcactatgatgttggcctctctcggcccggtgattatttccgccgtcgtggcgttgctggttagcaatcttattaatcatagcgacgcgttactctacagcgtacaactctcagtaacggttcaggctagtgactatgcgctgattatcagtacaggtgtgctggcaggtctgtgcggaccactgttgttaacgttaatgaacgcctgtcatcgtggatttgtgagtctcaaacttgcgccgccctggcaactggcactaggcgggttgatcgtgggtctgctttccctgttcacacctgcagtgtggggcaacggctatagcaccgtacaatcctttttaaccgccccaccactgttaatgatcattgccgggatcttcctttgtaaactgtgtgccgtgctggcgagtagcggttccggcgcacccggtggtgtctttacaccgacgctatttatcggtcttgccattggcatgttgtatggtcgtagcctgggattatggttccctgatggcgaagaaattacgcttttactcggattgaccgggatggcgacactgttggcggcaaccacgcacgcgccgattatgtcgacgttgatgatatgtgaaatgaccggggagtatcagctactccccggtttattgattgcctgcgtcattgcgtcggtaatttcgcggacgttacaccgtgactctatctaccgccagcacactgcgcagcatagctaa

SEQ ID NO: 484989 - DNA, 615 bp, Shigella sonnei
atgacccatttttcacagcaagataatttttctgtcgcggcgcgcgtgttgggcgcgctgttttattacgctccagagagtgcggaagccgcacctctggttgcggtactcaccagtgacggctgggaaactcagtggcctctaccagaagcgtcattagcgccgctggtgacggcttttcagacacagtgtgaagagactcacgcccaggcctggcagcgtttgtttgtcggcccgtgggcactgccgtctccgccgtggggatcggtctggctggatcgcgaatctgtgctgtttggcgattcaacattggcacttcgtcagtggatgcgcgagaaaggcattcagtttgaaatgaagcaaaacgaaccggaagatcattttggttcactgctgttgatggctgcgtggttggcggagaatggtcgccagacagaatgcgaagaattgctggcatggcacctttttccgtggtcaacacgttttcttgatgtttttatcgaaaaagcagaacaccctttctaccgtgcactgggtgaactggctcgcttaacgctggcgcaatggcaatcacaactgttgattcctgtcgcggttaaaccactctttcgatag

SEQ ID NO: 484990 - DNA, 855 bp, Shigella sonnei
atgggaaatggatggcatgagtggccactggttatctttaccgtattgggtcaatgcgtagtaggcgcgctgattgttagcggaattggctggttcgccgccaaaaatgacgcagaccgtcagcgtattgtccgtggcatgtttttcctctggctgttgatgggcatcgggtttatggcctctgtcatgcacctgggatcgccactgcgggcgtttaactcgctgaatcgaatcggagcttctggtctgagtaacgagattgctgccggttccatattttttgccgttggcggactatggtggctggtggcggtcatcggtaaaatgccgcaagcgttggggaaactctggttacttgtcagcatggcgctcggcgtcattttcgtctggatgatgacctgcgtgtatcaaatcgacactgtgccaacctggcataacggttacactacgctggctttcttcctgacggtattgttgagcggtccaatacttgctgccgcaattctgcgggcagcccgcgttacatttaataccacaccatttgccatcattagcgttctcgcgctgatcgcttgtgccggggtgattgtgctgcaaggtttgtctctggcgtctattcactcatccgtgcaacaagccagcgcactggtaccagattacgcctccttacaggtctggcgtgtggtattgttatgcgcaggtcttggatgctggctttgtccgctcattcgtcgccgtgaacctcacgttgccggacttgttctggggctaatcctcatacttgttggtgagatgatcgggcgtgtgctcttttatggcctgcacatgacagtaggaatggctattgcaggttaa

SEQ ID NO: 484991 - DNA, 618 bp, Shigella sonnei
gtgaccacacaatatggattttttatcgattccagccgctgtactggctgtaaaacctgcgaactggcgtgcaaagattttaaagatcttggcccggaagtcagtttccgccgtatttatgaatatgctggcggcgactggcaggaagataatggcgtctggcaccagaacgtgttcgcttattatctctccatctcctgtaaccattgcgatgaccccgcatgtacaaaagtctgccccagcggcgcaatgcataagcgtgaagatggctttgtggtggttgatgaagatgtttgtatcggctgccgctactgccacatggcttgtccgtacggcgcgccacagtacaatgctgaaaaagggcacatgacgaagtgcgatggttgttattcgcgcgtcgccgaggggaaacaacccatatgtgtcgaatcctgcccgctgcgtgcacttgagttcggtccaattgaagagctgcgccagaagcacggcactctggctgccgtcgcgccactgccgcgcgcgcatttcacaaaacccaatatcgttatcaaacctaacgccaacagccgcccgaccagcgataccactggttatctggctaatccggaggaagtgtaa

SEQ ID NO: 484992 - DNA, 960 bp, Shigella sonnei
atgattgttggcattgaccacttcatgacggcctcggctaagtattgcgatatcctgttgcccgacctgatgccaacagagcaagaagaccttatctctcatgaatctgcagggaatatgggctatgtgatcctcgcccaacccgcaacctcagcaaaatttgaacgcaaacccatctactggatgctgagtgaagtcgccaaacgcttaggaccagacgtttatcaaacctttactgaaggtcgcagtcagcatgaatggatcaaatatctccatgcgaaaacgaaggaacgtaaccctgagatgcccgactacgaggagatgaaaacgaccgggatctttaagaaaaaatgcccggaagaacactacgtcgctttccgcgcattccgtgaagatccacaggcaaacccgttgaaaacaccttcggggaaaatcgaaatttattctgaacgactggcgaagattgcggatacctgggaattgaaaaaagatgaagttattcatccccttcctgcgtataccccaggttttgatggctgggacgatcccctgcggaaaacctatccactgcagttaacgggcttccattacaaagcgcgtacccactccagctacggcaatattgatgtgttacagcaggcctgcccacaagaggtgtggatcaaccccattgatgctcaggcacgcggtatccgtcatggcgataccgtgcgggtatttaacaataatggagaaatgctgattgccgcaaaagtgactccgcgtattctgcctggcgttaccgccatcgggcaaggtgcttggcttaaagcggatatgtttggtgaccgggtcgatcacggcggcagtatcaatattctgacctctcaccgcccttcaccgcccttcaccgctggcaaagggaaacccgtcgcacagcaatcttgtccagatcgaaaaggtttaaggagtagcccgtga

SEQ ID NO: 484993 - DNA, 1260 bp, Shigella sonnei
atgtttacatcagtggcgcaagccaatgctgcggttatcgaacaaattcgtcgcgctcgtccacactggctggatgtgcaaccggcttcttcacttatcagcgaactaaacgagggcaaaacactgcttcacgccgggccgccaatgcgctggcaggagatgaccggacccatgaaaggggcgtgcgtgggcgcatgtctgttcgaaggctgggcgaaagatgaagcgcaggcgctggcaatactggagcagggggaagtgaacttcattccttgtcaccatgtgaatgccgtcggtccaatgggcggtattacttctgccagtatgccgatgctggtggtcgagaacgtgaccgacggcaaccgggcgtactgcaacctcaacgaaggtatcggcaaagtgatgcgttttggcgcttacggcgaagatgtcctgactcgccatcgctggatgcgcgatgtgttaatgccagtattaagcgcggcgctggggcgcatggagcgcggtatcgatctcacggcgatgatggcgcagggcattacgatgggcgatgagttccatcaacgcaatattgcttcctctgcactgttaatgcgtgcgctggccccacaaattgctcgcctcgatcatgataaacagcacatcgccgaagtgatggatttcctcagcgtgaccgatcagttcttcctcaacctcgcgatggcttactgcaaggcggcgatggatgctggcgcgatgatccgcgcaggcagcatcgtcacggcaatgacccgcaacggcaatatgttcgggattcgggtaagcgggctgggcgaacgctggtttactgcgcctgtaaacactccgcaaggtctgtttttcaccggcttctcgcaggagcaggcgaacccggatatgggcgatagcgcgattaccgaaacctttggtatcggaggtgcggcaatgatcgcagcgcctggcgtaacgcgctttgtcggtgcgggtggcatggaagcggccagagcggtatctgaagagatggcggaaatttaccttgagcgcaatatgcagttgcagatcccaggctgggattttcagggcgcgtgcctgggactggacattcgtcgcgtggtagaaaccgacattacgccactcatcaataccggtatcgcccataaagaggcggggatcgggcagattggcgcaggcactgtgcgggcaccgctggcgtgttttgaacaggcgctggaagcactggctgaaagcatggggattggttga

SEQ ID NO: 484994 - DNA, 654 bp, Shigella sonnei
atgacgatcatccatcctctgcttgccagccgtagtgcaccgaattatcgccagtcctggcggttagcgggagtgtggcgacgggcgattaacctgatgacggaaagcggcgaactgttaacgctgcatcgtcagggtagtggtttcggccccggaggatgggtgcttcgccgcgcgcaattcgatgcgttatgcggtggattatgcggcaatgaacgaccacaggttgtggctcaagggattcgcctcgggcgtttcacggttaaacagccacagcgttattgtttgctgcgtattacgccgcctgcgcatcctcaaccgcttgcagctgcatggatgcaacgcgcggaggaaaccgggcttttcgggccactggcgttggcggcaggcgatccgctgcctgctgagttacgccagttttttgcctattccgacaatcttcaactcgttaccacagcggtgagcgtcagttatttacgttatgccgcgcaaggatatttcgcctcgccactcctgcactttgtccatgctctgagttgcccgaaacgtaccgctgttgcgattgattcgctgctggcgctggggcatacgtcaggggcagatacgctgctggggttctggcttggccaacaattattacaaggaaaaccatga

SEQ ID NO: 484995 - DNA, 894 bp, Shigella sonnei
atgaaaacactggttgtagctcttgggggcaacgccttactccagcgcggtgaggcgctgacggcggaaaatcaatatcgcaatatcgccagtgctgtacccgcgctggcacgcctggcccgttcttatcggctggcgattgttcacggcaacgggccgcaggtggggctgctggcgttacagaatctggcgtggaaagaggtagaaccgtatccgctggatgtgctggtggcggaaagccaggggatgattggctatatgctggcgcagagcttgagcgcacagccgcagatgccgcctgttacgacggtgctgacgcgcattgaggtttcgcctgatgatccggcgtttttgcagccagagaaatttattggtccggtttatcagccagaagaacaagaggcactggaagcggcttacggctggcagatgaaacgtgatggtaaatatttgcgccgggtggtggcgtctccgcaaccgcgtaaaattctcgacagcgaagccatcgagttgttgctcaaagaggggcatgtggtgatttgcagtggcggcggaggtgtgcctgtgacggaagatggggcagggagtgaagcagtgattgataaagatctcgccgctgcgttgctcgccgagcagattaatgccgatggactggtgatcctcaccgatgctgatgcggtatatgaaaactggggaacgccgcagcaacgtgccattcgccatgccacaccggatgagttagcgccatttgccaaagccgatggttcgatggggccgaaggtaacggcggtgagtggttatgtcagaagccgtggtaaacccgcgtggattggggcgttatcgcgaattgaagagacgctggcgggcgaagcggggacctgtatttcgctgtag

SEQ ID NO: 484996 - DNA, 1068 bp, Shigella sonnei
atgaaacaggtttgcgtcctcggtaacgggcagttaggccgtatgctgcgtcaggcaggcgaaccgttaggcattgctgtctggccagtcgggctggacgctgaaccggcggcggtgccttttcaacaaagcgtgattaccgctgagatcgaacgctggccggaaaccgcattaacccgcgagctggcgcgccatccggcctttgtgaaccgcgatgtgttcccgattattgctgaccgtctgactcagaagcagcttttcgataagctccacctgccgaccgcgccgtggcagttacttgccgatcgcagcgagtggcctgcggtgtttgatcgtttaggtgaactggcgattgttaagcgtcgcactggtggctatgacggtcgcggtcaatggcgtttacgcgccaatgaaaccgaacagttaccggcagagtgttacggcgaatgtattgtcgagcagggcattaacttctctggtgaagtgtcgctggttggcgcgcgcggctttgatggcagcaccgtgttttatacgctgacgcataacctgcatcaggacggtattttgcgcaccagcgtcgcttttccgcaggccaacgcacagcagcaggcgcaagccgaagagatgctgtcggcgattatgcaggagctgggctatgtgggcgtgatggcgatggagtgttttgtcaccccgcaaggtctgctgatcaacgaactggctccgcgtgtgcataacagcggtcactggacacaaaatggtgccagcatcagccagtttgagctgcatctgcgggcgattaccgatctgccgttaccgcaaccagtagtgaataatccgtcggtgatgatcaatctgattggtagcgatgtgaattatgactggctgaaattgccgctggtgcatctgcactggtacgacaaagaagtccgtccggggcgtaaagtggggcatctgaatttgaccgacagcgacacatcgcgtctgactgcgacgctggaagccttaatcccgctgctgccgccagagtatgccagcggcgtgatttgggcgcagagtaagttcagttaa

SEQ ID NO: 484997 - DNA, 510 bp, Shigella sonnei
atgtcttcccgcaataatccggcgcgtgtcgccatcgtgatggggtccaaaagcgactgggctaccatgcagttcgccgccgaaatcttcgaaatcctgaatgtcctgcaccacgttgaagtggtttctgctcaccgcacccccgataaactgttcagcttcgccgaaagcgccgaagagaacggttatcaggtgattattgcgggcgcaggtggcgcagcgcacctgccaggcatgattgccgccaaaacgctggtgccggtgctgggcgtgccagtacagagcgccgcactgagcggtgtcgatagcctctactccatcgtacaaatgccgcgcggcattccggtgggtacgctggcgattggtaaagctggcgcggcaaacgcggcattactggcagcacaaattctcgcgactcacgataaagagctacaccagcgtctgaatgactggcgcaaagcacaaactgatgaagtgctggaaaacccggacccgcgaggtacggcatga

SEQ ID NO: 484998 - DNA, 723 bp, Shigella sonnei
gtggcgacactctttattgcagatcttcatctctgcgtggaagaaccggcgatcaccgccggttttctgcgttttttagcgggggaagctcgcaaggccgacgcgctgtatattcttggcgatctgtttgaagcgtggattggcgacgacgagcccaatccactccatcgccagatggcggcagcgatcaaagcggtgtccgattctggcgttccctgttatttcattcatggcaaccgtgattttctgctcggcaaacgctttgcccgtgaaagtggcatgacgttattgccggaagaaaaggtgctcgaactttatggccgccgggtgttgattatgcatggcgacacgctgtgcaccgatgacgcgggttatcaggcttttcgcgccaaagtccacaaaccctggctgcaaatgctattcctcgccctgccgttgtttgtgcgcaaacgcattgccgcgcgaatgcgagcgaacagtaaagaagccaacagcagtaaatcgctggcgatcatggacgttaaccaaaacgcggtagtcagtgcgatggaaaaacatcaggtgcaatggctgatccacggacatacccatcgcccggcggtacatgaacttatcgccaaccagcaacctgcttttcgcgtggtactcggtgcctggcatacggaaggttcgatggtgaaagtcacggcggatgacgttgagctgattcattttccgttttaa

SEQ ID NO: 484999 - DNA, 495 bp, Shigella sonnei; identical to SEQ ID NO: 460498

SEQ ID NO: 485000 - DNA, 1386 bp, Shigella sonnei
atgctaaaaatcttcaatactctgacacgccaaaaagaggaatttaagcctattcacgccggggaagtcggcatgtatgtgtgtggaatcaccgtttacgatctctgtcatattggtcacgggcgtacctttgttgcttttgacgtggttgcgcgctatctgcgtttcctcggctataaactgaagtatgtgcgcaacattaccgatatcgacgacaaaatcatcaaacgtgccaatgaaaatggcgaaagctttgtggcgctggtggatcgcatgatcgccgaaatgcacaaagattttgatgctttgaacattctgcgcccggatatggagccgcgcgcgacgcaccatatcgcagaaattattgaactcactgaacaactgatcgccaaaggtcacgcttatgcggcggacaacggcgacgtgatgttcgacgtcccgaccgatccgacttatggtgtgctgtcgcgtcaggatctcgaccagctgcaggcaggcgcgcgcgttgacgtggtcgacgacaaacgcaacccgatggacttcgttctgtggaagatgtcgaaagagggcgaaccgagctggccgtctccgtggggcgcgggccgtccaggctggcacattgaatgttcggcaatgaactgcaagcagctgggtaaccactttgatatccacggcggcggttctgacctgatgttcccgcaccacgagaatgaaatcgcgcagtccacctgtgcccatgatggtcagtatgttaactactggatgcactccggaatggtgatggttgaccgcgagaagatgtccaaatcgctgggtaacttctttaccgtgcgcgatgtgctgaaatactacgatgctgaaaccgtgcgttacttcctgatgtcgggccactatcgcagccagctgaactacagcgaagagaacctgaagcaggcgcgtgcggcgctggagcgtctctacactgccctgcgcggcacagaaaaaaccgttgctcctgccggtggcgaagcgtttgaagcgcgctttattgaagcgatggacgacgatttcaacaccccggaagcctattccgtactgtttgatatggcgcgtgaagtaaaccgtctgaaagcagaagatatggcagcggcgaatgcaatggcatctcacctgcgtaaactttccgctgtattaggcctgctggagcaagaaccggaagcgttcctgcaaagcggcgcgcaggcagacgacagcgaagtggctgagattgaagcgttaattcaacagcgtctggatgcccgtaaagcgaaagactgggcggcggcagatgcggcgcgtgaccgtcttaacgagatggggatcgttctggaagatggcccgcaagggaccacctggcgtcgtaagtaa

SEQ ID NO: 485001 - DNA, 417 bp, Shigella sonnei
atgctgcccgacgccgacgtattgtcgtttaaatttggcgttgcttacggcaatgtttttggtcatcgcgggtttacccattcgctggtgtttgcgtttgttgtcccgctgttatgtgtgctgattggacgccgatggttcagggctgggctgattcgctgctggctgtttttaaccgtctcgttgctatcgcacagcatgctggattcggtaaccactggcggtaagggtgttggctggctgtggccgtggtcagatgaacgctttttcgctccctggcaggtgattaaagtcgcgccgtttgcattgtcttgttacaccacgccgtacgggcatcaggtgattatttctgaattgatgtgggtgtggttgccggggatgctactgatgggaatgttgtggtggcgcagacgataa

SEQ ID NO: 485002 - DNA, 213 bp, Shigella sonnei
atggcgacattttctttaggtaaacatccgcacgttgagctgtgcgacttgctgaaactggaaggctggagcgaaagcggcgcgcaggcgaaaatcgcgattgccgaaggccaggtgaaagccgacggcgcggttgaaacgcgcaaacgctgcaaaatcgtcgccggtcagacagtgagttttgcaggtcacagcgtacaggttgttgcctga

SEQ ID NO: 485003 - DNA, 867 bp, Shigella sonnei
atggcagcaaagattattgacggtaaaacgattgcgcagcaggtgcgctctgaagttgctcaaaaagttcaggcgcgtattgcagccggactgcgggcaccaggactggccgttgtgctggtgggtagtaaccctgcatcgcaaatttatgtcgcaagcaaacgcaaggcttgtgaagaagtcgggttcgtctcccgctcttatgacctcccggaaaccaccagcgaagcggagctgttggagcttatcgatgcgctgaatgccgacaacaccatcgatggcattctggttcaactgccgttaccggcgggtattgataacgtcaaagtgctggaacgtattcacccggacaaagacgtagacggtttccatccttataacgtcggtcgcctgtgccagcgcgcgccgcgtctgcgcccctgcacccctcgcggcatcgtcacgctgcttgagcgttacaacattgataccttcggcctcaacgccgtggtgattggcgcatcgaatatcgtcggtcgtccaatgagcatggaactgttgctcgcaggttgcaccactaccgtgactcaccgcttcactaaaaatctgcgtcaccacgtagaaaatgccgatctactgatcgttgccgtcggcaagccgggctttattcctggtgactggatcaaagaaggcgcaattgtgattgatgtcggcatcaaccgtctggaaaatggcaaagttgtgggcgacgtcgtgtttgaagacgcggctaaacgcgcctcatacattacgcctgttccgggcggcgttggcccgatgacggttgccacgctgattgaaaacacgctacaggcgtgcgttgaatatcatgatccacagggtgagtaa

SEQ ID NO: 485004 - DNA, 168 bp, Shigella sonnei
atggtaggtctgtggaatgcgacattattactcagtgaaaaaggtttttatggactggctttcttcttaagcttgtttggtgcagtagcggtgcagaagaatattcgtgatgccggaataaacccgccaaaagaaacacaggttacccaggaagaatacagcgaataa

SEQ ID NO: 485005 - DNA, 996 bp, Shigella sonnei; identical to SEQ ID NO: 462278

SEQ ID NO: 485006 - DNA, 300 bp, Shigella sonnei
atgatgatgaacgctttctttccggcaatggcgcttatggtgctagtgggttggtctacaccgtcacccgtgcagaaagcacaacgggtaaaggttgatcctctgcgttcgttgaatatggaagcgttatgcaaggatcaggcggcaaaacgttataacaccggcgagcaaaaaatcgacgtcaccgccttcgaacagttccagggaagctatgaaatgcgcggttataccttccgtaaagagcagtttgtctgttcttttgacgcagatggccattttttgcatctttccatgcgttaa

SEQ ID NO: 485007 - DNA, 912 bp, Shigella sonnei
atgcaaaagtttgataccaggaccttccagggcttgatcctgaccttacaggattactgggctcgccagggctgcaccattgttcaaccattggacatggaagtcggcgcgggaacctctcacccaatgacctgtctgcgcgcgctggggccagaaccgatggcggctgcttatgttcagccttctcgtcgcccgaccgatggtcgctacggcgaaaaccccaaccgtttacagcactactatcagttccaggtggtcattaagccatcgccggacaatattcaggagctgtacctcggttctctgaaagagctgggcatggacccgactattcacgacatccgtttcgtggaagataactgggaaaacccgactctgggtgcctggggactgggctgggaagtgtggctaaacggcatggaagtgacgcagttcacttacttccagcaggttggtggtctggagtgtaaaccggttaccggcgagatcacctacggtctggaacgtctggccatgtacattcagggcgtagacagcgtttacgacctggtctggagcgacggcccgctgggtaaaaccacctacggcgacgtgttccatcagaacgaagtggagcagtccacttacaacttcgaatacgcggatgtggatttcctgttcacctgcttcgagcagtacgagaaagaagcgcagcagctgctggcgctggaaaatccgctgccgctgccagcctacgagcgtattctgaaagccgcccacagcttcaacctgctggatgcgcgtaaagccatctccgtcactgagcgtcagcgctacattctgcgcattcgcaccctgaccaaagcagtggcagaagcatactacgcttcccgtgaagccctcggcttcccgatgtgcaacaaagataagtaa

SEQ ID NO: 485008 - DNA, 2070 bp, Shigella sonnei
atgtctgagaaaacttttctggtggaaatcggcactgaagagctgccaccaaaagcactgcgcagcctggctgagtcctttgctgcgaactttactgcggagctggataacgctggcctcgcacacggcaccgttcaatggtttgctgctccgcgtcgtctggcgttgaaagtagctaacctggcggaagcgcaaccagatcgtgaaatcgaaaaacgcggcccggcgattgcccaggcgttcgacgctgaaggcaaaccgagcaaagcggcagaaggttgggcgcgtggttgcggtattaccgttgaccaggctgagcgtctgactaccgataaaggcgaatggctgctgtatcgcgcccatgtgaagggcgaaagcactgaagcactactgccgaatatggttgcgacttcgctggcgaaactgccgatcccgaaactgatgcgttggggcgcaagcgacgtgcacttcgtgcgtccggtgcacaccgtgaccctgctgctgggcgacaaagtcattccggcaaccattctgggcattcagtccgatcgcgtgattcgcggccaccgctttatgggcgaaccggaattcaccatcgacaacgccgatcagtatccggaaattctgcgtgagcgcgggaaagtcatcgccgattacgaagaacgtaaagcgaagattaaagccgatgccgaagaagcagcgcgtaagattggcggtaacgctgacttaagcgaaagcctgctggaagaagtggcttcgctggtggagtggccggtcgttctgaccgcaaaattcgaagagaaattcctcgcggtgccggctgaagccctggtttacaccatgaaaggtgaccagaaatacttcccggtgtatgcgaacgatggcaaactgctgccgaacttcatcttcgttgccaacatcgaatcgaaagatccgcagcaaattatctctggtaacgagaaagtcgttcgtccacgtctggcggatgccgagttcttcttcaataccgaccgtaaaaaacgtctggaagataacctgccgcgcctgcaaaccgtgctgttccagcaacagctgggtacgctgcgtgacaaaactgaccgcatccaggcgctggctggctggattgctgaacagattggcgctgacgttaaccacgcaacccgtgcgggcctgctgtctaagtgtgacctgatgaccaacatggtcttcgagttcaccgacacccaaggcgttatggggatgcactacgcgcgtcacgatggcgaagcggaagacgtagccgtcgcgctgaatgagcagtatcagccgcgctttgccggtgatgacctgccgtccaacccggtagcttgtgcgctggcgattgctgataagatggatactctggcgggtatcttcggtatcggtcagcatccgaaaggcgacaaagacccgtttgcgctgcgtcgtgccgcacttggcgtgctgcgaattatcgttgagaagaacctcaaccttgatctgcaaacgctgaccgaagaagcagtgcgtctgtatggcgataagctgactaacgccaacgtagttgatgatgttatcgactttatgctcggtcgcttccgcgcctggtatcaggacgaaggttacaccgttgacaccatccaggcggtactggcgcgtcgtccgactcgtccggctgatttcgatgcccgtatgaaagcggtatcgcatttccgtaccctggatgcagctgctgcactggcggcggcgaacaaacgtgtatctaacattctggcgaaatctgacgaagtgctgagcgaccgcgtgaatgcctctaccctgaaagagccggaagaaattaaactggcgatgcaggttgtggtgctacgtgacaagctggagccgtactttgcggaaggtcgttaccaggatgcgctggtcgaactggcagagctgcgtgagccggttgatgctttcttcgataaagtgatggtcatggttgatgacaaagaattgcgtctcaaccgtctgaccatgctggagaaactgcgcgaactgttcctgcgcgttgcggatatttcgctgttgcagtaa

SEQ ID NO: 485009 - DNA, 213 bp, Shigella sonnei
atgcctgaacaccataaggttagcctcttactcgttggaaatcaacacaggaggctgggaatgccgcagaaatatagattactttctttaatagtgatttgtttcacgcttttatttttcacctggatgataagagattcactgtgtgaattgcatattaaacaggagagttatgagctggcggcatttttagcctgcaatttgaaagagtaa

SEQ ID NO: 485010 - DNA, 213 bp, Shigella sonnei; identical to SEQ ID NO: 460420

SEQ ID NO: 485011 - DNA, 291 bp, Shigella sonnei; identical to SEQ ID NO: 32761

SEQ ID NO: 485012 - DNA, 711 bp, Shigella sonnei
atggcgacaggaaagtcctgctctcgctggtttgcgcctcttgcggcgttattaatggtagttagcctgagtgggtgttttgataaagaaggcgatcagcgtaaagcgtttatcgacttcctgcagaatacagtgatgcgtagcggtgaacgtctaccaaccctgactgccgatcagaaaaaacagtttggtccttttgtctctgattacgcgattctgtatggttattctcagcaggtgaatcaggcgatggattctggtctgcgcccggtcgtagacagcgttaacgcaattcgcgtaccgcaggattacgttacgcaaagcggtccgctgcgtgaaatgaatggttcgctgggtgtgctggcgcaacaactgcaaaatgcgaagttgcaggccgatgctgcgcactctgcgctaaaacagagcgatgacctgaaaccggtatttgatcaggcattcaccaaagtggtaacgacgccagctgatgcattgcaaccgttgattccggcggcacaaactttcacgcaacaactggtgatggttggagactacattgctcagcaaggtactcaggtgagctttgtcgcaaatggcatccagttcccgacttcacagcaggcaagtgaatataacaaactgattgcgccattaccggcacaacatcaggcgtttaatcaggcctggactacagcagttactgcaacccaataa

SEQ ID NO: 485013 - DNA, 975 bp, Shigella sonnei
atgaagccgtccgttatcctctacaaagccttacctgatgatttactgcaacgcctgcaagagcatttcaccgttcaccaggtggcaaacctcagcccacaaaccgtcgaacaaaatgcagcaatttttgccgaagctgaaggtttactgggttcaaacgagaatgttgatgccgcattgctggaaaaaatgccgaaactgcatgccacatcaacgatctccgtcggctatgacaattttgatgtcgatgcgcttaccgcccgaaaaattctgctgatgcacacgccaaccgtattaacagaaaccgtcgccgatacgctgatggcgctggtgttgtctaccgctcgtcgggttgtggaggtagcagaacgggtaaaagcaggcgaatggaccgcgagcataggcccggactggtacggcactgacgttcaccataaaacactgggcattgtcgggatgggacggatcggtatggcgctggcacaacgtgcgcactttggcttcaacatgcccatcctctataacgcgcgccgccaccataaagaagcagaagaacgcttcaacgcccgctactgcgatttggatacactgttacaagagtcagatttcgtttgcctgatcctgccgttaactgatgagacgcatcatctgtttggcgcagaacaattcgccaaaatgaaatcctccgccattttcattaatgccggacgtggcccggtggttgacgaaaatgcactgatcgcagcattacagaaaggggaaattcacgccgccgggcttgatgtcttcgaacaagagccactgtccgtagattcgccgttgctctcaatggccaacgtcgtcgcagtaccgcatattggatctgccacccatgagacgcgttatggcatggccgcctgtgccgtggataatttaattgatgcgttacaaggaaaggttgagaagaactgtgtgaatcctcacgtcgcggactaa

SEQ ID NO: 485014 - DNA, 660 bp, Shigella sonnei
atgaagaaacgtgtttatcttattgccgccgtagtgagtggcgctctggcggtatctggctgcacaactaacccttacaccggcgaacgcgaagcaggcaaatctgctatcggcgcaggtctgggctctctcgtgggcgcgggtattggtgcgctctcttcttcgaagaaagatcgcggtaaaggcgcgctgattggcgcagcagcaggcgcagctctgggcggcggcgtgggttattacatggatgtgcaggaagcgaagctgcgtgacaaaatgcgcggcactggtgttagcgtaacccgcagcggggataacattatcctcaatatgccgaacaatgtgaccttcgacagcagcagcgcgaccctgaaaccggcaggcgctaacaccctgaccggcgtggcaatggtgctgacagagtatccgaaaacggcggttaacgtgattggttataccgacagcacggggggtcacgacctgaacatgcgtctctcccagcagcgtgcggattccgttgccagcgcgttgatcacccagggcgtggacgccagccgcatccgtactcagggccttggcccggctaacccaatcgccagcaacagcaccgcagaaggtaaggcgcaaaaccgccgtgtagaaattaccttaagcccgctgtaa

SEQ ID NO: 485015 - DNA, 816 bp, Shigella sonnei
atgcgtaaaacagtggcttttggctttgtcggtaccgtgctggattatgccggacgcggcagtcagcgctggtcgaaatggcgtccgacgctttgtttatgccagcaagaatcgttagtcatcgatcggctggaattgttgcacgacactcgctcgcgctcgctattcgaaacgcttaaacgcgatatcgccagcgtttcgccagaaacagaagtcgtgggcgttgagattgaactgcataacccgtgggatttcgaagaggtttacgcctgcctgcatgatttcgcccgtggttacgagtttcagccagaaaaagaagactatttaattcacatcaccaccggcacccacgtcgcgcagatttgctggtttctgctggcggaagcgcgttacctgcccgcccggctgatacaatcttcacctccgcgcaaaaaagaacagccgcgcggcgcaggtgaagtgacgattatcgatctcgatttaagccgttataacgccatcgccagccgctttgccgaggaacgccagcaaacgcttgattttcttaagtccggcattgccacgcgtaacccccacttcaaccgcatgattgagcagatcgaaaaagtggcgatcaaatcccgcgcgccgattctgcttaacggtccaaccggcgcgggcaagtcatttctggtgcgacgcatcttcgagttaaaacaggcgcggcatcagtttagcggcgcgtttgtggaagtgaactgcgccaccctgcgcggcgataccgccatgtcgacgctgtttggtcatgtaaaaggcgcgtttaccggggcgcggtaa

SEQ ID NO: 485016 - DNA, 597 bp, Shigella sonnei
atgttgtttcttgatgagattggcgaactgggcgcagacgaacaggcaatgctgctaaaagccattgaagagaaaaccttttacccgtttggcagcgatcgccaggtgagcagtgattttcagcttatcgccggaacggtgcgcgatttgcgccagctggttgccgaaggcaaatttcgcgaagatctgtacgcgcggatcaatctctggaccttcaccctgccgggtctacgccagcgccaggaagatattgaaccgaaccttgattatgaagtggagcgccacgccacactcactggcgacagcgtgcgttttaacaccgaagcgcggcgcgcctggttggcttttgcgacctctccccaggcaacatggcgcggtaactttcgcgaactttctgccagcgtcacgcggatggccacctttgccactagcggacgcatcactctggacgtggttgaagatgagataaaccgtctgcgctataactggcaggagagccgcccctccgcgcttacggcgttgctgggcgcagaggcagaaaacatcaatctcttcgaccgtatgcaactggaacacgttatcgctatctgccgctag

SEQ ID NO: 485017 - DNA, 759 bp, Shigella sonnei; identical to SEQ ID NO: 460848

SEQ ID NO: 485018 - DNA, 831 bp, Shigella sonnei
atgttgatgattacctcttttgctaacccccgcgtggcgcaggcgtttgttgattacatggcgacgcagggtgttatcctcacgattcaacaacataaccaaagcgatgtctggctggcggatgagtcccaggccgagcgcgtacgggcggagctggcgcgttttctcgaaaacccggcagatccgcgttatctggcggccagctggcaggcaggccataccggcagtggcctgcattatcgccgttatcctttctttgccgccttgcgtgaacgcgcaggtccggtgacctgggtgatgatgatcgcctgcgtggtggtgtttattgccatgcaaattctcggcgatcaggaagtgatgttatggctggcctggccattcgatccagcactgaaatttgagttctggcgttacttcacccacgcgttaatgcacttctcgctgatgcatatcctctttaacctgctctggtggtggtatctcggcggtgcggtggaaaaacgcctcggtagcggtaagctaattgttattactctcattagcgccctgttaagcggctatgtgcagcaaaaattcagcgggccgtggtttggcgggctttctggcgtggtgtatgcgctgatgggctacgtctggctacgtggtgaacgcgatccgcaaagtggcatttacctgcaacgtgggttaattatctttgcgctgatctggattgtcgccggatggtttgatttgtttgggatgtcgatggcgaacggagcacacatcgccgggttagccgtgggtttagcgatggcttttgttgattcgctcaatgcgcgaaaacgaaaataa

SEQ ID NO: 485019 - DNA, 327 bp, Shigella sonnei
atggatcagttcgaatgtattaacgttgccgacgcgcaccagaagttgcaggaaaaagaggcggtgctggtcgatattcgcgatccacagagtttcgctatggggcatgcggtgcaggctttccatttaaccaacgacacgctgggcgcgtttatgcgtgataacgactttgacactccggtgatggtgatgtgttatcacggcaatagcagcaaaggcgcggcgcagtatctgctgcaacagggctacgatgtggtctatagcattgacggcggctttgaagcctggcaacgtcagtttcccgcagaggtggcgtacggcgcgtaa

SEQ ID NO: 485020 - DNA, 1506 bp, Shigella sonnei
atggaaaccaaagatctgattgtgataggtggcggcatcaatggtgctggtatcgcggcagacgccgctggacgcggtttatccgtgctgatgctggaggcgcaggatctcgcttgcgcgacctcttccgccagttcaaaactcattcacggtggcctgcgctaccttgagcactatgaattccgcctggtcagcgaggcgctggctgaacgtgaagtgctgctgaaaatggctccgcatatcgccttcccgatgcgttttcgcctgccacatcgtccgcatctgcgcccggcgtggatgattcgcattggtctgtttatgtacgatcatctgggtaaacgcaccagcctgccgggatcaactggtttgcgttttggcgcaaattcagtgttaaaaccggaaattaagcgcggattcgaatattctgactgttgggtagacgacgcccgtctggtactcgccaacgcccagatggtggtgcgtaaaggcggcgaagtgcttactcggactcgcgccacctctgctcgccgcgaaaacggcctgtggattgtggaagcggaagatatcgataccggcaaaaaatatagctggcaagcgcgcggcttggttaacgccaccggcccgtgggtgaaacagttcttcgacgacaggatgcatctgccttcgccttatggcattcgcctgatcaaaggcagccatattgtggtgccgcgcgtgcatacccaaaagcaggcctacattctgcaaaacgaagataaacgcattgtgttcgtgatcccgtggatggacgagttttccatcatcggcaccaccgatgtggaatacaaaggcgatccgaaagcggtgaagattgaagagagtgaaatcaattacctgctgaaagtgtataacacgcactttaaaaagcagttaagccgtgacgatatcgtctggacctactccggtgtgcgtccgctgtgtgatgatgagtccgactcgccgcaggctattacccgtgattacacccttgatatccatgatgaaaacggcaaagcaccgctgctgtcggtattcggcggtaagttgaccacctaccgcaaactggcggaacatgcgctggaaaaactgacgccgtattatcagggcattggcccggcatggacgaaagagagcgtgctgccgggtggtgccattgaaggcgaccgcgacgattacgcagctcgtctgcgccgtcgctatccattcctgactgaatcgctggcgcgtcattacgcacgcacttacggcagcaacagcgagctgctgctcggcaatgcgggggcgataagcgacctcggggaggatttcggtcatgagttctacgaagcggaactgaaatacctggtggatcacgaatgggtccgccgcaccgacgatgccctttggcgtcgcacaaaacaaggcatgtggctgaatgcggatcaacaatctcgtgtgagtcagtggctggtggaatatacgcagcagaagttgtcgctggcgtcgtaa

SEQ ID NO: 485021 - DNA, 606 bp, Shigella sonnei
atgattaaattccggctttatattccccctgtaattctcggttttgttatcgtgccattattggtatggccgacggttattgtcttagccgtgcttatattcacgttaacttttctggcagaaataatattctcctttccgctcctggttgtgcgtatttctcttcaggaattacaacttgagttaatggttgaatatgcactttttttcagtgtaatggctggcatcggttggcaattctcccgcagaacgcctcctgaattaaaaaacagactgcattgctggctggtcttttcgccggtctatttctggttaattctctcgaatttcattctttatatttctccagagaaatcagcgttgctggaaaatatccgaaatttctttctgacgtttgtctggcctcccctgaatttttcccctttttggccgcagccttggactgattttgtcggcccgattagtgcacagcttggttttgcattgggatattattgccattggtgcagaaaaaatagaaaccagaggaagaagtggggcgattgggtaacgtgcttaagtttggcgattttagctcaggggccgttattcaattatttacaatga

SEQ ID NO: 485022 - DNA, 768 bp, Shigella sonnei
atgcaacccagccccgccatgcaggcattaattgagcagatttatcacacctttcgtcgttatcgggtgccgcagaaatttgtggtttgttgtgaatattgcctgagtcagcaggaacaaaaggcattacggagtacatcgttacgagcgatcccgtattccttaatcaatgcctggaatagtagcccagggcctgatccgcaaaatagcgatgaggtccgctattttctgccgcgtttactggaatttgttgcacaggggcattttgacaatattcacgtagttttttctctgcgccgtatcaaccttgccaacaaagaaaactggcgtgcggatgaacgggcaattttacagcgatttgcctgccagtatatgactgattgggtatccggcgatgaagctgtcgaattacagtatatgctggaaatgtttttccgtgccgatatcgctcttgcgccattgctggatgccattaattcagttcccggcttttggtcgaccgtttctcttgcctgtttattgaacagatattgtgaggattatatcagagataaccaggacgatatcgataacgccattaccacccaaatcaatgcctgggctagaaataatcatcctttactgaaagaaagagcgcggcaagcgattgagaacccgctaaaacagcccgaaccaatgacagaatatcaggtctgggaagatgactggataattgatgagtgtttatgcgcgatgtatgacgcatcatccgaatcaccaggaaaataa

SEQ ID NO: 485023 - DNA, 711 bp, Shigella sonnei
atggaattagttaatacattatttgcaagccttgccggtactgatcccttcacaggcgtggatattacgattgccaactgcaaatcggcatactgggatgaaggcattgttcagcaacttattaaccaggccttggatgaaggggaaaagttcgtcggtgctgacggtcttgagggattgcttcgatatgatgtcacattaaatattggcttaacctccagcaaggtatggccgggattttccctcgataccgccaccattagccgtctttgtgcctgtggtgctgattttggatttgacccctatatcagtgatgtaccagatgttcaatgtgacctgaacacgacaaatgacgtcaccgtacaatttacggcgatgctaaatccggatgagcgggtgataatagcaaagcgcccgcttaaaaaatgtgactcctggattgaggatgtctatatctttcaggtctttaaagatgcctggaaatttcataacaataacagtttacgcggatttcgcgataagcaggccgaactgaaactctacacgcgtcattactcagtggaaaattgcgcagaggaaagctgtcgagactgcaatagttgcattcgccccagcttttccctttcgcgtagcgcccttattcgcctgaacgcggcgaatgctcgttttgtctatcaaccgtttacacgcgatcagcgggcgagggggtaa

SEQ ID NO: 485024 - DNA, 1506 bp, Shigella sonnei
atgcaaaacagaaaatggattttgtcctcgctggtaatgacttttttcggcatccccatactgacgcaatttttggcggcggttgttgctatgctgggtgtcggacttgccggtattattgaagtttgtaatatccttatcacgccaacaagttaccttctgctcaacatttttatgctggcgctgggcgcattaatgctatttttctcggggcgagtatgggcaggcgatagtgcaccagaaaaaagagaaatagccgtctggcgacaatgtctttttttagtacccggtttattaatcctggttggctggataatcgcgctgcatctggcagattatcaatttcaccagatgggatcgggttggttggctgatcttatgctcccctggctgggcgttttgttagtctcagtagtcggaggtgagtactggtggatagtcattatacccgttggcgcgcatatcagtttttcgctggggtacggccggccaaccagacatcctttaaccggtacatccgggctacgttgccgtaattccctcctgtttatccttctcatgcttggttttgtcgctggttatcagggttatttatataaacagctcaatcccggtgtcggtgtgcgcgaaaatattgatacctgggcctggcgacccgataaactcaataatcaactgacaccactgcgtggtaaaccgcaaattcagtttacgcaaaactggccgcgactcgatggtgctacggcggcgtacccaatttatgcctctgcattttatgctttaagcgttataccggaagattttcacaccagggaatatctggagagctctcgtacccccgatgcgtataacaggattgttaaaggtgatgctgatattatttttgtggcgcaaccttccggtgggcagaaaaaacgcgctgaggaatcgggcgttactttgctgtacacgccttttgcccgtgaagcgtttgttttcatcgtcaatgcggataatccggttaattccctgactgaacaacaggtgcgtgacatcttcagtggtgcaattaccaactggcgtactgttggcggtaacgatcaggagatccagacctggcaacgcccggaagactctggtagccagacggtgatgcaatcccaggtcatgaaaaatgtccgcatgatctcgccgcaggaaacagaagtggcaagtatgatggagggaatgattaaagtcgttgccgaataccgtaatacaaacaacgcaataggttacaccttccgttattacgcaacacaaatgaacgccgataaaaatataaaactgctagcgattaacggtattgcaccgactgccgaaaacattcgcaacggcaaatatccctatatcgtcgatgcctttatggtaacgcgggaaaatacgacgtcagagacacaaaaattgttggagtggtttttaacgccgcagggacagagtttggtggaagatgtaggttatgtcccgatgtataagacgctaccttaa

SEQ ID NO: 485025 - DNA, 567 bp, Shigella sonnei; identical to SEQ ID NO: 170886

SEQ ID NO: 485026 - DNA, 138 bp, Shigella sonnei
atgggatttcattcccgcgccccgatgagttccgcgcctgatgtacatgtcgaagaaaacggccggcggggggaatacggcgcgctacctgggtcgttatcggggggtgagggccaatggaacgaaaacgtacgttaa

SEQ ID NO: 485027 - DNA, 876 bp, Shigella sonnei
atgagaaagttcatccttatttctatgataacgttagctagtgttagtctgggagcctgcagacagaatgtcaccataaagcaggatgcgccagggcagaaagctttcctgactgacgggcagatttacgatttgcacagtggcaaaattatttctagcagcgagcttttggcggatcttgctaccgctcgacatcttattattggtgaaaaacacgataatgccgagcatcatcagattgagctttggcttattcaaaatttgctcatccagcgaccacaggggagtgtgttgcttgagatgttgacgtcagagcaacagccccgagttaaccaagttaaatgttggctgaaagataatcctgtggttcgagatagccgtgttcaggaactacttaactggcaaaaagggtggtcctgggagatgtatggcgacatcgtcatgcagctattacgtgggccttacccgctgctcaatgccaacattggccgggagcagatgttggcactgtacaaaaaaaacgaatttcctaaaggaaaaaaatccactgcacctgtggtacaagaagctctgcgtgaaaccatcatatctatgcatgaaggcaaccttgaaagccagcaactgacgtcaatgctctctattcagcagcagcgggatcgctacatggcccgccagcttctgagtgccccggtaccgtcgttgttgattgcaggtggttatcacgcgtcaaaaagcatgggcgtaccgttacacatggaagatcttgccaccggcacccatccagtggtgttgatgcttgcagaaaaaggaatgaacatcacagtagatcatgctgactacgtgtggtttgtagcgccagatacaacaaaaaggtaa

SEQ ID NO: 485028 - DNA, 777 bp, Shigella sonnei
atgatgaatattctccacttctcacagtcggtaaaatggagcagctggtttatctgttctctactgcttcatggactgattttccttgcgtttatctggcgtttttccgaagttcagcccgctatgtctcctgcaccggcgatcatgctgcaatgggcagaaattatagaggctccttcttctccactttcgcttccggtgggaatcgctcaacaggagtccgcagtgacagaagaaaagcaacaaactgaggacagacaacaacgtcctgtcactgaagacagtgatgcaaccattgaaataactaggaagaaaaagtcatccgatggagaaaagaaaaagacacgtccacctcgtaagataaaggctcaaaccagcgacagcaaccccacagccgtttccagtaatgctgcacctcaggctctggtcgaatcgtcccgtattgctgcgccttttaacagtgactcaacaaagcgagataattctgaggcatcttgggaaagcagagtaaaaggccacctaaaccgttataaacgttaccctggcgatgccagaaaacgtgcacgaaccggcacagccgtcgtgacttttaccgtaaacacggaaggcactattgtcagtagtttcttggaaatctcttcaggaaccctttctcttgaccgcgaagctattgctgttttagaacgcgctcaaccacttcccaaaccaccgcctgaaatattggagggaggattatttaaagtaaaaatgccgattacctttaagttgaaggagtaa

SEQ ID NO: 485029 - DNA, 2262 bp, Shigella sonnei
atgaacgttataaaactggctatcggctcaggcatattattgctcagctgcggtgcttactcacaatccatcagtgaaaaaactaattccgacaaaaaaggagcggcagaattcagtccgctcagcgtttctgtcgggaagacgaccagtgagcaggaagctctcgagaaaacaggcgcgaccagttcccggacaacggacaaaaacctgcaatcacttgacgcaacagtgcgtagtatgcctggtacttatactcaaatagatcctggtcagggagcaatcagtgtgaatattcgaggcatgagcggatttggtcgtgtaaacactatggtcgatggtattacccagagtttttacggaacctctacctccggaacaacgacgcatggttcaactaacaatatggctggcgtacttatagatcctaacttactggtagcagttgatgttacacgcggtgacagcagtggctctgaagggatcaacgcccttgccggtagtgcaaatatgcgtactattggcgttgacgatgtaatatttaacggtaatacatatggccttcgttcacgtttctctgtcggtagtaatgggctgggacgcagcggaatgatcgcccttggtggaaaaagcgacgcttttacggatacgggaagcattggcgttatggctgctgtgagcggcagttctgtgtactctaatttctcaaatggttctggaattaacagcaaagagtttggttatgataaatatatgaagcagaaccccaaatcccaactgtataaaatggatatcagaccagacgaatttaacagcttcgaactttccgctcgaacctatgaaaataaatttacacgtcgtgatataaccagtgacgactattacattaaatatcattacacccctttttctgaattaattgactttaacgtaacggccagtaccagtcgcggtaatcaaaagtatcgtgatggctcgctgtatactttctacaaaacctcagcgcaaaatcgttctgacgcgctggatatcaacaataccagccggttcactgtcgcggacaatgacctggagtttatgctgggcagcaaactgatgcgtacccgctatgaccggaccattcactcagcggcgggcgacccgaaagcgaatcaggaatcgatcgagaacaatccgttcgcaccctccggccagcaggatatttcagcgctgtataccgggctgaaggttacgcgcggcatctgggaggcagatttcaatctcaactacacacgtaacaggatcacagggtacaagcccgcctgcgattcacgcgttatctgcgtgccacagggtagctacgatattgacgataaagagggtggcttcaacccttcagttcagctttctgctcaggtaacaccatggcttcagccgttcattggctacagcaaatccatgcgcgccccgaacatccaggagatgttcttctctaattcaggaggcgcatccatgaacccattcctgaagcctgaacgtgcagaaacctggcaggcgggttttaacattgataccagagatttactggtcgaacaggatgccctgcgctttaaggctctggcgtaccgcagcaggatccagaactacatctacagcgagtcttatctggtttgttctggaggtcgtaaatgcagtatgcctgaggtgattggcaatgactgggagggcattagcgatgaatacagcgacaatatgtacatctacgttaactcggcaagcgacgttatcgcaaagggcttcgaactggagatggattatgatgcaggttttgcttttggccgactctctttcagccagcagcaaacagaccagccaacctccatcgccagcacctactttggcgcaggggatatgaccgaactgcccagaaaatacatgacgctggatactggtgttcgcttcttcgataacgcgttgaccctgggcactatcataaaatacacaggcaaggctcgtcgcctgtcgcctgattttgagcaggacgaacataccggcgcaataatcaaacaggatttgccgcagatcccaacgattatcgatctctatggtacttacgagtacaaccgcaacctaacactgaaactttcggtacaaaacctgatgaacagagattattcggaggcgctgaataagctcaacatgatgccaggtcttggtgacgagacccacccagccaattccgcgcgtggcagaacatggatatttggcggggacattcgtttctga

SEQ ID NO: 485030 - DNA, 1176 bp, Shigella sonnei; identical to SEQ ID NO: 5984

SEQ ID NO: 485031 - DNA, 1539 bp, Shigella sonnei
atgaacgacatctcttctgacgacatcttcctgctgaaacagcgcctggccgaacaggaagcgctgatccacgccctgcaggaaaagcttagcaaccgggagcgcgaaatagaccatctgcaggcgcagctggataaactccgccggatgaacttcggcagtcgttccgaaaaagtctcccgccgtatcgcacaaatggaagccgatctgaaccggcttcagaaagagagcgatacgctgactggtagggtgtatgacccggcagtacagcgtccgttgcgtcagacccgcacccgtaagccgttccctgaatcactaccccgtgacgaaaagcgactgttgcctgcggcgccgtgctgcccgaactgcggcggttcactgagctatctgggcgaggataccgccgaacagctggagttgatgcgtagcgccttccgggttatccggacggtacgggaaaaacatgcctgtactcagtgcgatgccatcgtgcaggcacctgcaccttcgcggcccatcgagcggggtatcgccggaccggggctgctggcccgcgtgctgacctcgaagtatgcagagcacaccccgctgtatcgccagtcagaaatatacggccggcaaggtgtggagctgagccgttcactgctgtcgggctgggtggatgcatgctgccggctgctgtctccgatggaagaggcgcttcatggctatgtgctgactgacggtaagctccatgttgatgacacgcctgtcccggtgctgttgccaggcaataagaaaacgaagaccgggcggttgtgggcgtatgttcgtgacgaccgtaacgccgggtcaacgctggcgccggcggtgtggttcgcttacagcccggacagaaaaggcatccatccgcagacccatcttgcggggttcagtggtgtactgcaggcggatgcatacgccgggttcaacgagctgtaccgggatggccggataacggaagccgcctgttgggctcacgcccgccgtaaaatccacgatgtgcacgttcgcaccccgtcagccctgacggaggaagcgctgaaacggatcggcgaactgtacgccatcgaggcagagataaggggaatgacggcggaacagcgccttgccgaacgtcagttgaaaacgaaaccgctgctgaaatccctggaaagctggctgcgtgaaaagatgaaaaccctgtcgcgacactcagaactggcgaaagcgttcgcatacgccctgaaccagtggccggcgctgacgtactatgcagatgatggctgggctgaggcggacaataacatcgctgaaaatgcgttgcggatggtcagtctgggccgcaaaaactacctgttcttcggttcggatcatggaggagagcggggagcgctgctgtacagcctgatcgggacgtgcaaactgaacggagtggagccagaaagctacctccgctatgtccttgacgtcatagccgactggccgataaaccgggtcggcgaactgctcccctggcgcgtagcactgccgactgaataa

SEQ ID NO: 485032 - DNA, 783 bp, Shigella sonnei
atgaaaaggaatttattatcttccgctattatagtcgccatcatggccctcggtctgacgggttgtgatgataaaaaagccgaaacagaaacgcccccgcctgccaatagtcaacctgccgcaccagctcctgaagctcccgttgcaaaagcagaagctaaacctgaaacacctgcgcaaccggtggtcgatgaacaagcggttttcgacgaaaaaatggatgtctatatcaagtgctacaacaagttacagatccctgtacagaacagtctggcgcgttatgctgactggctgaaagattttaaacaggggcctaccggtaaagagagtactgtttatggcatctacggcattagtgaatccaacctcgctgagtgtgaaaaaggcgtaaaaagtgctgtggcgttaacgcctgcgctgcaacctattgatggcgtggcggtgagttatattgatgctgccgtggcgttgggtaataccattaacgaaatggataaatattacacccaggaaaattataaagacgatgcgtttgcgaaagggaaaacgctgcaccagacattcttaaaaaatctggaatcctttgaacctgtagcagaatcttatcatgcggcgattcaggaaattaatgataagcgccagcttgcggaactgaaaaatattgaagaaagagaagggaaaacattccactactactctctggcagtcatgatttcagcgaaacaaattaataacctgatttcgcaagagaagtttggtgatgctgccaacttactgatttag

SEQ ID NO: 485033 - DNA, 834 bp, Shigella sonnei
gtgaaaaaaacacagcgaaaagaaatcgaaaatgtgacaaatatcacaggtgttcgtcaaattgagttatggcggcgtgatgatttacaacacccacggttagatgaggtcgcggaagaagttcccgttgcgctggtctacaacggcatttcgcatgtggtgatgatggcgtcgcccaaagaccttgagtactttgcgctcggtttttcgctttccgaggggataatagaaagtccgcgcgatatcttcggcatggatgtcgttccttcctgtaatggtcttgaagtacaaattgagctttccagccgccgctttatggggttgaaggagcgccgccgggcgctggcgggacgtacgggctgtggcgtatgcggcgtggagcaacttaatgacatcggaaaaccggtgcagccgctaccgttcacccagacgtttgatctcaacaaactggatgatgcattacgtcatctcaacgattttcagccagtggggcaactgactggttgtactcacgccgctgcctggatgttgccatctggcgaactggtcggcgggcatgaagacgtgggtcgccatgtggcgctggacaaactgttaggccgccggtcacaagaaggggaaagctggcagcaaggtgcggtactggtttccagtcgtgccagttatgaaatggtgcaaaagtcggcgatgtgcggcgtagagattttgtttgcggtgtctgccgcgaccacgcttgctgtagaagtggctgagcgctgtaatctgacactggtaggtttttgtaaaccgggtcgggcaacggtttatacccatccgcagcgtttgagcaattaa

SEQ ID NO: 485034 - DNA, 588 bp, Shigella sonnei; identical to SEQ ID NO: 473821

SEQ ID NO: 485035 - DNA, 2415 bp, Shigella sonnei
atgaccaaccactgggtcgacatcaagaacgccaacctcgtcgtggtgatgggcggtaacgccgctgaagctcacccggtcgggttccgctgggcgatggaagccaaaattcacaatggcgcgaagctgattgtgatcgatcctcgctttacgcgtacggcggcggtggctgactactatgcccctattcgttccggtactgacattgctttcctgtcaggcgtattgctgtacctgctgaacaatgaaaaattcaaccgcgaatacaccgaagcctataccaacgccagcctgatcgtgcgtgaggattacggctttgaagatggcctgttcaccggctatgacgcggaaaaacgcaagtacgataaatcctcctggacttacgaactggacgaaaacggcttcgccaaacgcgataccacgctgcaacatccgcgctgcgtgtggaacttgctgaaacagcacgtttcccgctacacgccagatgtggttgaaaacatctgtggtacgccaaaagacgcgttcctgaaagtctgcgaatacatcgcagaaaccagtgctcacgataaaactgcctcgttcctgtatgccctcggctggacgcaacactccgttggtgcgcaaaacattcgtacgatggcgatgatccagctgctgctcggcaatatggggatggcaggcggcggcgttaacgccctgcgcggtcactccaatattcaggggctgacggacctggggctgctgtcgcagagcctgccaggttacatgacgctgccaagcgagaagcagaccgatctgcaaacctaccttaccgccaacacgccaaaaccgctgctggaaggccaggtaaactactggggcaactacccgaaattcttcgtctctatgatgaaggccttctttggtgataaagcgacggcggaaaatagctggggctttgactggttgccgaagtgggataaaggctacgacgtcctgcaatacttcgagatgatgaaagagggcaaggtcaatggctatatctgccagggctttaaccctgttgcctcattcccgaacaaaaacaaagtgatcggttgtctgtcgaaactgaagttcctcgtcaccatcgacccgctgaacactgaaacctctaacttctggcagaaccacggtgagctgaacgaagttgactcgtcgaagatccagaccgaagtgttccgtctgccatcgacctgcttcgcagaagagaacggttcaatcgttaactcaggtcgctggttgcagtggcactggaaaggtgcggacgccccagggattgcgctgactgatggcgagatcctctccggtatcttcctgcgcttgcgcaagatgtatgccgaacagggtggcgcaaacccggatcaggtgctgaacatgacctggaactacgccattccgcatgagccgaagtcggaagaagtggcgatggagagcaacggtaaggcgctggccgatattaccgatccggcaaccggtgcggttatcgtcaagaaaggccaacaacttagctcgttcgcccaattgcgcgatgacggtacaacctcctgtggctgctggattttcgccggtagctggacgccggaaggcaaccagatggcgcgtcgtgataacgccgatccgtctggcctcggtaacacgctgggctgggcatgggcatggccgcttaaccgccgcattctgtataaccgcgcctccgcagatccgcagggtaacccgtgggatccgaagcgtcagttgctgaaatgggacggcactaagtggaccggctgggatattccggactacagcgcagcgcctccgggcagcggcgtcgggccgtttatcatgcagcaggaaggcatggggcgtctgtttgccctcgataagatggcggaaggtccgttcccggaacactacgagccgtttgaaacgccgctgggaactaacccgctgcatccaaacgttatctcgaacccggctgcgcgaatctttaaagacgacgccgaagcattgggtaaagccgataagttcccgtatgtcggaaccacctatcgtctgaccgagcacttccactactggaccaaacacgcgctgttgaacgcgattttgcaaccagagcagtttgtggaaatcggggagtcgctggcgaataaacttggcattgcccagggcgataccgtgaaagtctcctccaaccgtggctatatcaaagccaaagcggtggtgaccaaacgtattcgcacgctgaaagcgaacggcaaagatatcgataccatcggtattccgattcactggggctatgaaggcgtagctaaaaaaggctttattgccaatacgttaacgccattcgttggtgatgcgaacacgcagacgccggagtttaagtccttccttgtgaatgtggaaaaggtgtaa

SEQ ID NO: 485036 - DNA, 903 bp, Shigella sonnei
atggcttatcaatcgcaagatatcattcgtcgttccgcgactaacggtctgacccccgcgcctcaggcgcgggacttccaggaagaagtggcgaaactcatcgacgtcaccacctgtatcggctgtaaagcctgtcaggtggcgtgttcagagtggaacgacattcgcgataccgtcggcaataacattggggtgtacgacaaccccaatgatttaagcgccaaatcgtggacggtgatgcgcttctcggaagtggagcagaacgacaaactggaatggctgatccgcaaagacggctgtatgcactgttccgatccaggctgcctgaaagcgtgcccggcggaaggtgcaattattcagtatgccaacggtatcgtcgacttccagtccgagcagtgcattggctgcggttattgcattgcgggctgtccgttcgacattccgcgcctcaacccggaagacaaccgcgtctacaaatgtacgctgtgcgttgaccgcgtggtggttgggcaagaaccagcctgcgtgaagacctgcccaacgggcgcgattcacttcggtacgaaagagtcgatgaaaacgctggcgagcgagcgcgttgctgagctgaaaacccgcggttacgacaatgcgggtctgtacgatccggcaggcgtcggtggtacacacgtcatgtacgtgctgcaccatgctgacaagccaaatctgtatcatggcttgccggagaacccggaaatcagcgaaaccgtgaaattctggaaaggcatctggaaaccgctcgcggctgttggctttgcggctacctttgcggccagtatcttccactacgtgggtgtcggtccgaaccgtgcggatgaggaagagaataatctgcacgaagagaaagacgaggagcgcaaatga

SEQ ID NO: 485037 - DNA, 636 bp, Shigella sonnei
atgaaacgacgtgacaccatcgtgcgctacaccgcgccggaacgtatcaaccactggatcaccgccttctgcttcatcctggcggcggtgagcgggctgggctttttgttcccgtccttcaactggttgatgcaaatcatgggcacaccgcagctggcgcgaattctgcacccgtttgtcggcgtggttatgtttgcctcgttcatcatcatgtttttccgttactggcatcacaacctaatcaatcgggatgatatcttttgggcgaagaatattcgtaagatcgtcgtcaacgaggaagtaggtgacaccgggcgttataacttcggtcagaaatgcgttttctgggcggcgattattttcctggttctgctgctggtgagcggcgtgattatctggcgtccttattttgcgcctgctttctcaatcccggtgatccgattcgcgttaatgctgcattcatttgccgcagtggcgttaattgtggttatcatggtgcatatctacgccgccctttgggtgaaaggcacgattaccgccatggtggaaggatgggttaccagcgcctgggcgaagaaacatcacccgcgctggtaccgtgaggtccgcaagacaacggaaaagaaagctgaatga

SEQ ID NO: 485038 - DNA, 930 bp, Shigella sonnei
atgagtattcgcataatcccgcaagatgagctgggttcgagcgagaaacgtacggcggatatgattccgccgttattgttccctcggctcaagaatttatacaaccgccgcgccgagcgtctgcgcgagctggcagaaaataatccgctgggtgattacctgcgctttgctgcgcttatcgcccacgcccaggaagtggtgctgtacgaccatccgctggagatggatctgaccgcgcgcattaaagaagccagcgcacagggcaagcccccgctggatattcacgttctgccgcgtgataagcactggcaaaagctgctgatggcgctaattgctgagctgaaacctgaaatgagcggcccggcgctggcagtgattgagaatctggagaaggcatcgactcaggagctggaagatatggccagcgcgctgtttgcctctgatttctcgtccgtcagcagcgataaagcgccgtttatctgggctgcgctgtcgctctactgggcgcagatggccaatctgatccccggcaaagcccgcgctgaatacggcgaacaacgtcaatattgcccggtatgtggctctatgccggtgtccagcatggtgcaaattggcaccactcagggtctgcgttacctgcactgcaacctgtgtgaaaccgaatggcacgtagtgcgcgtaaaatgcagcaactgcgagcagagcggcaaactgcattactggtcgctggatgacgaacaggccgcgattaaagccgaaagctgcgatgactgcggcacttacctgaagattctttatcaggaaaaagaaccgaaagttgaagccgtggcagatgacctcgcctctctggtactggacgcgcgaatggagcaagaaggctacgcccgtagttccattaacccgttcctgtttccgggtgaaggagagtaa

SEQ ID NO: 485039 - DNA, 243 bp, Shigella sonnei; identical to SEQ ID NO: 460631

SEQ ID NO: 485040 - DNA, 297 bp, Shigella sonnei
atgtactatttaaaaaacacaaacttttggatgttcggtttattctttttcttttacttttttatcatgggggcctacttcccgtttttcccgatttggctacatgacatcaaccatatcagcaaaagtgatacgggtattatttttgccgctatttctctgttctcgctattattccaaccgctgtttggtctgctttctgacaaactcgggctgcgcaaatacctgctgtggattattaccggcatgttagtgatgtttgcgccgttcggtgatgctgccaacttactgatttag

SEQ ID NO: 485041 - DNA, 3075 bp, Shigella sonnei
atgaccatgattacggattcactggccgtcgttttacaacgtcgtgactgggaaaaccctggcgttacccaacttaatcgccttgcagcacatccccctttcgccagctggcgtaatagcgaagaggcccgcaccgatcgcccttcccaacagttgcgcagcctgaatggcgaatggcgctttgcctggtttccggcaccagaagcggtgccggaaagctggctggagtgcgatcttcctgaggccgatactgtcgtcgtcccctcaaactggcagatgcacggttacgatgcgcccatctacaccaacgtgacctatcccattacggtcaatccgccttttgttcccgcggagaatccgacgggttgttactcgctcacatttaatattgatgaaagctggctacaggaaggccagacgcgaattatttttgatggtgttaactcggcgtttcatctgtggtgcaacgggcgctgggtcggttacggccaggacagccgtttgccgtctgaatttgacctgagcgcatttttacgcgccggaaaaaaccgcctcgcggtgatggtgctgcgctggagtgacggtagttatctggaagatcaggatatgtggcgaatgagcggcattttccgtgacgtctcgttgctgcacaaaccgagcacacaaatcagcgatttccatgttgccactcactttaatgatgatttcagccgcgcggtactggaggcagaagttcagatgtacggcgagctgcgcgatgagctgcgggtgacggtttctttgtggcagggtgaaacgcaggtcgccagcggcaccgcgcctttcggcggtgaaattatcgatgagcgtggtggttatgccgatcgcgtcacgctacgtctgaacgtcgaaaacccggcgctgtggagcgccgaaatcccgaatctctatcgtgcggtggttgaactgcacaccgacgacggcacgctgattgaagcagaagcctgcgatgtcggtttccgcgaggtgcggattgaaaatggtctgctgctgctgaacggcaagccgttgctgattcgcggcgttaaccgtcacgagcatcatcctctgcatggtcaggtcatggatgagcagacgatggtgcaggatatcctgctgatgaagcagaacaactttaacgccgtgcgttgttcgcattatccgaaccatccgctgtggtacacgctgtgcgaccgcttcggcttgtacgtggtggatgaagccaatattgaaacccacggcatggtgccaatgaatcgtctgaccgatgatccgcgctggttacccgcgatgagcgaacgcgtaacgcgaatggtgcagcgcgatcgtaatcacccgagtgtgatcatctggtcgctggggaatgagtcaggccacggcgctaatcacgacgcactctatcgctggatcaaatctgtcgatccatcccgcccggtgcagtatgaaggcggcggagccgacaccacggccaccgatattatttgcccgatgtacgcgcgcgtggatgaagaccagcccttcccggctgtgccgaaatggtccatcaaaaaatggctttcgctacctggagagacgcgcccgctgatcctttgcgaatacgcccacgcgatgggtaacagtcttggcggcttcgctaaatactggcaggcgtttcgtcagtacccccgtttacagggcggcttcgtctgggactgggtggatcagtcgctgattaaatatgatgaaaatggcaatccgtggtcggcttacggcggtgattttggcgatacaccgaacgatcgccagttctgcatgaacggtctggtctttgccgaccgcacgccgcatccagcgctgacagaagcaaaacaccagcagcagtttttccagttccgtttatccgggcaaaccatcgaagtgaccagcgaatacctgttccgtcatagcgataacgagcttctgcactggtcggtggcgttggatggcaagccgctggcaagcggtgaaatgcctctggatgttgctccacaagataaacagttgattgaactgcctgaactaccgcagccggagagcgccggacaactctggcttacggtacacgtagtgcaaccgaacgcgaccgcatggtcagaagccggacacatcagcgcctggcagcagtggcgtctggcggaaaacctcagcgtgacactccccgccgcgccccacgccatcccgcaactgaccaccagcgaaacggatttttgcatcgagctgggtaataaacgttggcaatttaaccgccagtcaggctttctttcacagatgtggattggcgctgaaaaacaactgctgacgccgctgcgcgatcagttcacccgtgcaccgctggataacgacattggcgtaagtgaagcgacccgcattgacccgaacgcctgggtcgaacgctggaaggcggcgggccattaccaggccgaagcagcgttgttgcagtgcacggcagatacacttgccgacgcggtgctgattacgaccgctcacgcgtggcagcatcagggaaaaaccttatttatcagccggaaaacctaccggattgatggtagtggtcaaatggcgattaccgttgatgttgaagtagcgagcgatacaccgcatccggctcggattggcctgacctgccagctggcgcaggtagcagaacgggtaaactggctcggattagggccgcaagaaaactatcccgaccgccttactgccgcctgttttgaccgctgggatctgccattgtcagacatgtataccccgtacgtcttcccgagcgaaaacggtctgcgctgcgggacgcgcgaattgaattatggcccacaccagtggcgcggcgacttccagttcaatatcagtcgctacagccaacaacaactgatggaaaccagccatcgccatctgctgcacgcggaagaaggcacatggctgaatatcgacggtttccatatggggattggtggcgacgactcctggagcccgtcagtttcagcggaattccagcttagcgccggtagctaccattaccagttggtctggtgtcaaaaataa

SEQ ID NO: 485042 - DNA, 1092 bp, Shigella sonnei
gtggtgaatgtgaaaccagtaacgctatacgatgtcgcagagtatgccggtgtctcttatcagaccgtttctcgcgtggtgaaccaggccagccacgtttctgcgaaaacgcgggaaaaagtggaagcggcgatggcggagctgaattacattcccaaccgcgtggcacaacaactggcgggcaaacagtcgttgctgattggcgttgccacctccagtctggccctgcacgcgccgtcgcaaattgtcgcggcgattaaatctcgcgccgatcaactgggtgccagcgtggtggtgtcgatggtagaacgaagcggcgtcgaagcctgtaaagcggcggtgcacaatcttctcgcgcaacgcgtcagtgggctgatcattaactatccgctggatgaccaggatgccattgctgtggaagctgcctgcactaatgttccggcgttatttcttgatgtctctgaccagacacccatcaacagtattattttctcccatgaagacggtacgcgactgggcgtggagcatctggtcgcattgggtcaccagcaaatcgcgctgttagcgggcccattaagttctgtctcggcgcgtctgcgtctggctggctggcataaatatctcactcgcaatcaaattcagccgatagcggaacgggaaggcgactggagtgccatgtccggttttcaacaaaccatgcaaatgctgaatgagggcatcgttcccactgcgatgctggttgccaacgatcagatggcgctgggcgcaatgcgcgccattaccgagtccgggctgcgcgttggtgcggatatctcggtagtgggatacgacgataccgaagacagctcatgttatatcccgccgttaaccaccatcaaacaggattttcgcctgctggggcaaaccagcgtggaccgcttgctgcaactctctcagggccaggcggtgaagggcaatcagctgttgcccgtctcactggtgaaaagaaaaaccaccctggcgcccaatacgcaaaccgcctctccccgcgcgttggccgattcattaatgcagctggcacgacaggtttcccgactggaaagcgggcagtga

SEQ ID NO: 485043 - DNA, 483 bp, Shigella sonnei
atggtggtacgcgaaaccacccaccgtttcagccgcttatcctttcaccgggcaatggtcgggcgacgtttaccgctcctgaaaaccgcctcgggcctgacctggctggccttttgcccggaacaagaacgcaaggaattaatcgaaatgttagccgcccgccccggtgatgactatcaactggcacgagaaccgttaaagctgcaagccattctggcgcgcgcgcgcaaagagggttacggacagaactaccgcggctgggatcaggaggagaagatcgcctctatcgccgtaccgctgcgcagtgaacaacgggtgattggctgtctgaatctggtgtatatggcgagcgcaatgaccattgaacaggcagcggaaaagcatcttccggcgctacaacgggtagcaaaacagatcgaagaaggggttgaatcgcaggctattctggtggccggacggcgaagcggcgtgcatttacgttga

SEQ ID NO: 485044 - DNA, 330 bp, Shigella sonnei
atgtcaattaatatgcagaacaatgagcagacggaatacaaaaccgtgcgcggcttaacccgcggtctaatgttattaaatatgttaaataaacttgatggcggtgccagcgtcgggctgctggcggaactcagcggcctgcatcgcaccactgtgcggcgactgctggagacgctgcaggaagagggatatgtccgccgtagcccctccgatgacagttttcgtctgaccatcaaagtgcggcaattaagcgaaggatttcgtgacgaacagtggatttctgcactggcggccccgctgctgggcgatctgttgcgcgaagtggtatga

SEQ ID NO: 485045 - DNA, 1665 bp, Shigella sonnei
atggcaatacaacaccctgacatccagcctgctgttaaccatagcgttcaggtggcgatcgctggtgccggtccggttgggctgatgatggcgaactatctcggtcagatgggcattgacgtgctggtggtggagaaactcgataagttgatcgactacccgcgtgcgattggtattgatgacgaggcgctgcgcaccatgcagtcggtcggcctggtcgagaatgttctgccgcacactacaccgtggcacgcgatgcgttttctcaccccaaaaggccgctgttttgctgatattcagccaatgaccgatgaatttggctggccgcgccgtaacgcctttattcagccacaggtcgatgcggtgatgctggaagggttgtcgcgttttccgaatgtgcgctgcttgttttcccgcgagctggaggccttcagccagcaagatgacgaagtgaccttgcacctgaaaacggcagaagggcagcgggaaacgatcaaagcccagtggctggtggcctgtgatggtggggcaagttttgttcgtcgcaccctgaatgtgccgtttgaaggtaaaactgcgccaaatcagtggattgtggtagatatcgccaacgatccgttaagtacgccgcatatctatttgtgttgcgatccggtgcgcccgtatgtttctgccgcgctgcctcatgcggtacgtcgctttgaatttatggtgatgccgggagaaaccgaagagcagctgcgtgagccgcaaaatatgcgcaagctgttaagcaaagtgctgcctaatccggacaatgttgaattgattcgccagcgtgtctacacccataacgcgcgactggcgcaacgtttccgtattgatcgcgtactgctggcgggcgatgccgcgcacatcatgccggtgtggcaggggcagggctataacagtggtatgcgcgacgcctttaacctcgcctggaaactggcgttggttatccaggggaaagcccgcgatgcgctgctcgatacctatcaacaagaacgtcgcgatcacgccaaagcgatgattgacctgtccgtgacggcgggcaacgtgctggctccgccgaaacgctggcagggtacgttacgtgacggcgtttcctggctgttgaattatctgccgccagtaaaacgctacttcctcgaaatgcgcttcaagccgatgccgcaatattacggcggtgcgctggtgcgtgagggcgaagcgaagcactctccggtcggcaagatgtttattcagccgaaagtcacgctggaaaacggcgacgtgacgctgctcgataacgcgatcggcgcgaacttcgcggtaattggctggggatgcaatccactgtgggggatgagcgacgagcaaatccagcagtggcgcgcgttgggcacacgcttcattcaggtggtgccggaagtgcaaattcataccgcacaggataaccacgacggcgtgctacgcgtgggcgatacgcaaggtcgtctgcgtagctggttcgcgcaacacaatgcttcgctggtggtgatgcgcccggatcgctttgttgccgccaccgccattccgcaaaccctgggcaatacgctgaataaactggcgtcggtgatgacgctgacccgccctgatgccgacgtttctgtcgaaaaggtagcctga

SEQ ID NO: 485046 - DNA, 945 bp, Shigella sonnei
atgcacgcttatcttcactgtctttcccactcgccgttggtggggtatgtcgacccggcgcaagaggtactcgatgaggtcaatggcgtgattgccagcgcccgcgagcgtattgcggctttctcccctgaactggtggtgctgtttgcgccagatcactacaacggctttttctatgacgtgatgccaccgttctgtttaggcgttggagcgacggcaattggtgatttcggcagtgcggcaggagagctgcccgtgcctgtggagctggcggaggcctgtgcgcatgctgtcatgaagagcgggatcgatcttgccgtttcttactgtatgcaggtggaccacgggttcgcccagccgctggagttcctgctcggtgggctggataaggtgccagttctgcctgtgttcatcaacggtgtcgccacgccgctgcccggtttccagcgtacccgcatgttgggtgaagccattggacgtttcaccagcactctcaataaacgcgtgctgttcctgggttccggtgggctttcccatcagccgccggtgcccgaactggcgaaagccgatgcccatatgcgcgaccgtctgttggggagcgggaaagatttacccgccagtgagcgcgaattgcgtcagcaaagggtgattagcgccgctgagaagtttgttgaggatcagagaactctgcatccgctcaacccgatttgggataaccagttcatgactttgctggagcagggacgcatacaggaactggatgccgtcagtaacgaagagctttccgccattgccggaaagtcgacacatgaaatcaaaacctgggtcgccgcttttgccgctatttctgcatttggcaactggcgtagcgaagggcgttattaccgcccaatcccggagtggattgccggatttggctcgttaagcgccagaacagagaactga

SEQ ID NO: 485047 - DNA, 408 bp, Shigella sonnei
atgagttatcagccacaaaccgaagccgccaccagccgttttctgaatgtagaagaagcgggtaaaacgctgcgcatccattttaatgactgcggacaaggcgacgaaaccgttgtcctgctgcatggttccggcccgggtgctactggctgggcgaacttcagccgcaatatcgatccgctggtagaggcgggctatcgggtgatcctgctggattgtccgggttggggcaaaagcgattcgatcgttaatagtggttcacgatcggatcttaatgcacgaatcctgaaaagcgtggtggatcaactggatatcgccaaaatccacctgctgggcaactcgatgggcggccatagttctgtgaggtgtactggcaatagcggacactaccatttgttctttttttaa

SEQ ID NO: 485048 - DNA, 774 bp, Shigella sonnei
atgcatgaccagccattattgagaatgtctttgccgtcgattccctcttttgtgttgtcgggattactgttgctttgcttgccgttttcttcatttgcctgcgccaccacatcacatatctctttcagctacgccgcccgccagcggatgcaaaaccgtgcgcgtttattaaaacagtaccaaacccatctgaaaaaacaggccagctacattgtggaaggcaatgcccaaagcagaagggcgctgcgccagcacaaccgggagcagataaaacagcatccagaatggtttcctgcgccgctcaaggcgagtgacagacgctggcaggcgctggcggaaaacaaccactttttaagcagcgatcacctgcataacatcaccgaagtggcgattcaccgtctggagcagcagcttggcaagccttacgtctggggcggcacgcggcccgatcaaggcttcgattgtagtgggttagttttttatgcctacaacaagatcctcgaggcgaagctcccgcgtacggccaatgagatgtatcactaccgtcgggcaaccattgtggcgaataacgacctgcgccggggagatttgctgtttttccatatccacagccgcgagattgccgaccatatgggggtgtatctgggcgacggtcagtttattgagtcaccgcgcaccggggaaaccattcgggtaagtcggttagctgaacctttctggcaggatcattttttgggcgcgcggcggatattgacggaagagacgattttgtag

SEQ ID NO: 485049 - DNA, 261 bp, Shigella sonnei
atggctgctaacgcgtttgttcgcgcccgaatcgatgaagatctgaagaatcaggcggcggacgtactggccgggatggggctgaccatctctgacctggttcgcataaccctcacaaaggtcgcgcgtgaaaaggcattgccgtttgatttacgcgagcctaatcaattaaccattcaatcaatcaaaaacagcgaagctggcgttgatgttcataaggccaaagacgctgatgatttatttgataaattaggaatttaa

SEQ ID NO: 485050 - DNA, 279 bp, Shigella sonnei
atgattcaaagggatattgaatactcgggacaattttcaaaggatgtaaaacttgcacaaaagcgtcataaggatatgaataaattgaaatatcttatgacgcttcttatcaataatgctttaccgcttccagctgtttataaagaccacccgctgcaaggttcatggaaaggttatcgcgatgctcatgtcgaaccggactggatcctgatttacaaacttaccgataaacttttacgatttgagagaactggaactcacgcggcgctctttgggtaa

SEQ ID NO: 485051 - DNA, 741 bp, Shigella sonnei; identical to SEQ ID NO: 460953

SEQ ID NO: 485052 - DNA, 768 bp, Shigella sonnei
atgtgcgaattgctcgggatgagcgccaacgtccctaccgatatctgctttagtttcaccggtctggtgcagcgtggtggtggaaccgggccacataaagatggctggggcattaccttttacgaaggtaaaggctgtcgcacatttaaagatccacaacccagctttaattcccccatcgccaaacttgtccaggactacccgataaaatcctgttcggtggtggctcatattcgccaggccaatcggggcgaggtggcgctggaaaatactcacccgtttacccgtgagttatgggggcgtaactggacttatgcccataacggacaactgacgggctacaaatcactggaaaccggcaacttccgcccggtcggtgaaaccgatagcgaaaaagccttctgctggctcctgcataaattaacgcagcgttacccgcgcacaccgggcaacatggcggcagtgtttaaatatatcgcctcactggcggatgaactgcggcagaagggcgttttcaacatgctgctttctgacgggcgctatgtgatggcgtattgctcgactaatttacactggatcacccgccgcgcgccgtttggcgtggcaacgctgctggatcaggatgtggaaatcgacttcagctcgcagaccacaccgaatgatgtggtcacggtgattgcaacacagccgctgacgggcaatgaaacctggcaaaagattatgccaggcgaatggcgcttattttgcctcggggagcgtgtagtttga

SEQ ID NO: 485053 - DNA, 579 bp, Shigella sonnei; identical to SEQ ID NO: 472391

SEQ ID NO: 485054 - DNA, 2445 bp, Shigella sonnei
atgatgattttgagtattctcgctacggttgtcctgctcggcgcgttgttctatcaccgcgtgagcttatttatcagcagtctgattttgctcgcctggacagccgccctcggcgttgctggtctgtggtcagcgtgggtactggtgcctctggccattatcctcgtgccatttaactttgcgcctatgcgtaagtcgatgatttccgcgccggtatttcgcggtttccgtaaggtgatgccgccgatgtcgcgcactgagaaagaagcgattgatgcgggcaccacctggtgggagggcgacttgttccagggcaagccggactggaaaaagctgcataactatccgcagccgcgcctgaccgccgaagagcaagcgtttctcgacggcccggtagaagaagcctgccggatggcgaatgatttccagattactcatgagctggcggatctgccgccggagttgtgggcgtaccttaaagagcatcgcttcttcgcgatgattatcaaaaaagagtacggcggactggagttctcagcttatgcccagtctcgcgtgctgcaaaaactctccggcgtgagcgggatcctggcgattaccgtcggcgtgccgaactcattaggcccgggcgagctgctgcaacattacggcactgacgagcagaaagatcactatctgccgcgtctggcgcgtggtcaggagatcccttgctttgcactgacaagcccggaagcgggttccgatgcgggcgcgattccggacaccgggattgtctgcatgggcgaatggcagggccagcaggtgctggggatgcgtctgacctggaacaaacgctatattacgctggcaccgattgcgactgtgcttgggctggcgtttaaactctccgacccagaaaagctgctgggtggcgcagaagatttaggtattacctgtgcgctgatcccgaccaccacgccgggcgtggaaattggtcgtcgccacttcccgctgaacgtaccgttccagaacggaccgacgcgcggtaaagatgtcttcgtaccgatcgattacatcatcggtgggccgaaaatggccgggcaaggctggcggatgctggtggagtgcctctcggtaggccgcggcatcaccctgccttccaactcaaccggcggcgtgaaatcggtagcgctggcaacgggcgcgtatgctcacattcgccgtcagttcaaaatctctatcggtaagatggaagggattgaagagccgctggcgcgtattgccggtaatgcctacgtgatggatgctgcggcatcgctgattacctacggcattatgctcggcgaaaaacctgccgtgctgtcggctatcgttaagtatcactgtacccaccgcgggcagcagtcgattattgatgcgatggatatcactggtggcaaaggcattatgctcgggcaaagcaacttcctggcgcgtgcttaccagggcgcaccgattgccatcaccgttgaaggggctaacattctgacccgcagcatgatgatcttcggacaaggagcgattcgttgccatccgtacgtgctggaagagatggaagcggcgaagaacaatgacgtcaacgcgttcgataaactgttgttcaaacatatcggtcacgtcggtagcaacaaagttcgcagcttctggctgggcctgacgcgcggtttaaccagcagcacgccaaccggcgatgccactaaacgctactatcagcacctgaaccgcctgagcgccaacctcgccctgctttctgatgtctcgatggcagtgctggacggcagcctgaaacgtcgcgagcgcatctcggcccgtctgggggatattttaagccagctctacctcgcctctgccgtgctgaagcgttatgacgacgaaggccgtaatgaagccgacctgccgctggtgcactggggcgtacaagatgcgctgtatcaggctgaacaggcgatggatgatttactgcaaaacttcccgaaccgcgtggttgccgggctgctgaatgtggtgatcttcccgaccggacgtcattatctggcaccttctgacaagctggatcataaagtggcgaagattttacaagtgccgaacgccacccgttcccgcattggtcgcggtcagtacctgacgccgagcgagcataatccggttggcttgctggaagaggcgctggtggatgtgattgccgccgacccaattcatcagcggatctgtaaagagctgggtaaaaacctgccgtttacccgtctggatgaactggcgcacaacgcgctggcgaaggggctgattgataaagatgaagccgctattctggtgaaagctgaagaaagccgtctgcgcagtattaacgttgatgactttgatccggaagagctggcgacgaagccggtaaagttgccggagaaagtgcggaaagttgaagccgcgtaa

SEQ ID NO: 485055 - DNA, 447 bp, Shigella sonnei
atgtttaagacaataacgacagtcgccgctctggtcatcgccaccagtgcaatggcgcaggatgatttaaccattagcagccttgcaaagggcgaaaccaccaaagctgcatttaatcagatggtacaagggcataagctgcctgcctgggtgatgaaaggcggtacttatactcccgcacaaaccgtaacgttgggagatgatacgtatcaggtgatgagcgcgtgcaaaccgcatgactgtggctcgcaacgtatcgctgtgatgtggtccgagaaatctaatcagatgacggggctgttctcgactattgatgagaaaacgtcgcaagagaaactcacctggctgaatgtgaacgatgcgctttcgattgatggtaaaacggtgctgttcgcggcgttgaccggcagcctggaaaaccatccggatggctttaattttaaataa

SEQ ID NO: 485056 - DNA, 771 bp, Shigella sonnei
gtgcctggtttgaagattacgcttttgcagcaaccactggtgtggatggatggccctgccaacctgcgtcattttgatcgtcaactggaaggtattaccgggcgcgatgtgatcgttctaccgaagatgtttaccagcggctttgccatggaagcggcagcttcgtcgctagcacaagatgacgtagtggactggatgacagctaaggcgcagcagtgcaatgcgctgattgcaggcagtgttgcattacaaacggagtctggttcggttaaccgctttttgctggttgagccgggcggcacggtacatttttatgataagcgtcatctgttccgcatggcagatgagcatctacattataaagcgggcaatgcgcgagtgattgtggaatggcgcggctggcgtattttgccgttggtgtgctacgacttacgttttccggtgtggtcgcgcaatctcaacgattatgacctcgccatctacgttgccaactggcctgctccgcgctctctgcactggcaggcattgctgacggcccgcgcgattgagaatcaggcgtatgtggcgggatgcaatcgcgtcggcagcgatggcaacggctgccattatcgcggtgacagccgggtgattaatccacaaggcgagattatcgctactgccgacgcgcatcaggcaacgcgcattgatgcggagctgtcgatgatggcattgcgggaatatagagaaaagtttccggcatggcaggatgcggatgagtttaggttgcggtga

SEQ ID NO: 485057 - DNA, 438 bp, Shigella sonnei
atgcgagagacagtcgaaattatgcgttatcccgtcactcttacacccgcgccggaaggcggttatatggtttcttttgtggatatccctgaagcgttgacgcagggcgaaactgtcgctgaagcgatggaagcggcaaaagatgctttactgaccgcatttgatttttattttgaagataacgagcttatcccgttaccttcgccattaaatagtcatgatcactttattgaagtacctttgagcgtcgcctctaaagtattgctgttaaatgcttttttacagtcagaaatcactcagcaagagttagccaggcgaattggcaaacctaaacaggagattactcgcctatttaacttgcaccatgcgacaaaaatcgacgccgtccagcttgcggcaaaggcgcttggcaaagagttatcgctggtgatggtttaa

SEQ ID NO: 485058 - DNA, 1407 bp, Shigella sonnei
atgaaaaaataccagcagcttgcagaacaattacgcgagcagattgcgtcgggtatctggcaacccggcgatcgtttgccttcgttgcgtgaccaggtggcgctttcaggcatgagctttatgactgtcagccatgcctatcagttgctcgaaagtcagggatatattatcgcacgaccgcagtcgggttattacgttgcgccacaggcaataaaaatgccgaaagcgccagtcattccagtcactcgagatgaagcagtcgatatcaacacttatatttttgatatgttgcaggccagtcgcgaaccgtcggtcgttccgtttgcctcggcctttcccgacccgcgacttttccccctccaacaactaaaccgctcgctggcgcaggtaagcaaaaccgccacagcgatgagcgtgattgaaaacttaccgccaggaaacgcagaactgcgtcaggctattgctcgtcgctatgccttacagggcatcaccatttctcctgatgaaattgtcattactgccggggcgttagaggcattaaacctcagtttgcaagcggtaactgaaccgggcgattgggtgatagtagagaatccttgtttctacggtgcgttgcaggcgctggagcggctacggctgaaggcgttatcggtggcgacggatgttaaagaagggatcgatcttcaggcgctggaactggcgttgcaggattatccggtgaaagcgtgctggctgatgactaatagccagaacccactcggatttaccttaacgccgcaaaaaaaagcacaactggtggcgttactcaatcagtacaacgtaacgctgattgaagatgacgtttacagcgaactttattttggacgggaaaaaccgctgcctgcgaaagcgtgggatcgccacgatggcgttttgcattgctcttcgttttcgaaatgtctggtgcctggttttcgtattggttgggtcgccgccggaaaacatgcacgtaaaattcaacgcttgcagttgatgagtacgctttccaccagctcaccgatgcaacttgcgctggtggattacctttccacgcgccgatacgacgcccatcttcgtcgcctgcgtcgccagcttgcggaacgtaaacaacgtgcctggcaggcactgctgcgttatctgcctgcggaagttaaaattcatcatagtgacagcggttattttctctggctggagctccccgagccgttagatgccggcgaattaagcctggcggcactgacgcatcatatcagtattgcgccgggtaaaatgttttctaccggtgaaaactggtcacgtttttttcgttttaataccgcgtggcagtggggagaacgtgaagaacaggcggtaaaacaattaggcaaacttattcaagaacggctgtaa

SEQ ID NO: 485059 - DNA, 1146 bp, Shigella sonnei
atgagcaagacatttgcccgcagcagcctgtgtgcgctcaccatgacaataatgaccgctcacgccgccgaaccacctaccaatttagataaaccggaagggcgactggatattatcgcctggccgggatacatcgaacgcggacaaactgataaacaatacgactgggtaacgcaatttgaaaaagagacaggctgcgcggtgaatgtgaaaaccgccgcgacttccgatgaaatggtcagtctgatgaccaaagggggttacgatctggttacggcatccggcgatgcctcgctgcgtttgattatgggcaaacgcgtgcagccgattaataccgccttgattcccaactggaaaacgctcgatccgcgcgtggttaaaggcgactggtttaatgttggcggcaaagtttacggcacaccttaccaatgggggccgaacctgctgatgtacaacactaaaaccttcccgacgccgccggatagctggcaagtggtttttgttgagcaaaatctgccggacggcaagagcaataaaggccgcgttcaggcttatgatggccctatctacattgcggacgctgcgttgttcgttaaagccactcagccgcagttgggcatcagcgatccgtatcaactaaccgaagaacagtaccaggcggtgctgaaagtgctgcgcgctcaacacagtttgatccatcgctactggcatgacactaccgtgcaaatgagcgatttcaaaaacgagggggtggttgcttccagtgcctggccctatcaggccaacgccctgaaagccgaaggccagcctgttgctaccgttttcccgaaggagggtgttaccggttgggctgataccaccatgctgcatagcgaagcgaaacatccggtttgcgcctacaaatggatgaactggtcattaacgccaaaagtgcagggcgatgtggcggcctggtttggctcgttaccggtagtgccggaagggtgtaaagccagtccgttattaggcgaaaaaggttgtgaaaccaacggttttaactatttcgacaaaatcgccttctggaaaacgcctatagcagaagggggcaagtttgttccctacagtcgctggacgcaggattacattgccattatgggcggtcgctaa

SEQ ID NO: 485060 - DNA, 1014 bp, Shigella sonnei
atgacgtacgcagtggagtttgacaacgtctcgcggttgtacggtgacgtgcgcgcagtagatggcgtcagtattgcgataaaagatggtgagttcttctctatgctggggccgtccggctccggcaaaaccacctgcctgcgcctgattgctggcttcgaacagctttccggcggggctatctctatctttggtaaacccgccagcaatctgccaccgtgggagcgggacgtgaatactgtctttcaggactacgcgctatttccgcatatgtcgattcttgacaatgtcgcctatgggctgatggtcaaaggcgtgaataaaaagcagcggcacgcaatggcgcaagaggcgctggagaaagtggcgttggggtttgtacagcaacgtaaaccgtcacaactttctggtggtcagcgccagcgggttgctatcgccagagcattggtgaatgaaccgcgcgtattgctgttggatgaaccgctcggcgcactggatctcaaattgcgtgagcagatgcagctggaactgaaaaaactgcaacagtctctcggtatcacttttatcttcgttacccacgatcagggcgaagcgttatcgatgtccgatcgtgtggcggttttcaataatggacgcattgagcaggtcgattccccgcgcgatctctatatgcgcccgcgcacgccgtttgttgccgggttcgttggtacatcgaatgtttttgatggactgatggcagagaaactttgtggcatgacgggaagcttcgccctgcgaccggaacatatccgcctcaacacccctggtgaactgcaggccaatggcacgatccaggcggtgcaatatcagggcgcggcaactcgttttgaactgaaattgaacggcggtgaaaaactgcttgtgagtcaggccaatatgacaggcgaagaactgcctgccacgctcacgcccggacaacaggtgatggtttcctggtcgcgtgatgtgatggtgccgctggttgaggagaggtga

SEQ ID NO: 485061 - DNA, 375 bp, Shigella sonnei
atggcgatgaatgtattgcaatcaccttcacgtccaggtctggggctgtttttactgctgcttggcccgctaatgtggtttggcattgtctatttcggctcgctgctgacactgttatggcagggattttatacttttgacgatttcaccatgtcggtaacgccggaactgacgctggcgaatatccgtgcgctgtttaatccggcgaattacgacatcattctccgcacgctgactatggctgtggcagtcactatcgccagcgccattctggcttttccaatggcgtggtatatggcgcgctataccagcgggaaaatgaaagcgtttttatattgcggtaatgttgccgatgtgggcgagctacattgttaa

SEQ ID NO: 485062 - DNA, 558 bp, Shigella sonnei
atgttgccgatgtgggcgagctacattgttaaagcctatgcctggacgttattgctggcaaaagatggcgtggctcagtggtttttacaacatcttgggctggaaccactgctgactgcgttccttacattacctgcggtgggcggaaatacgctgtcaacttccgggctggggcgctttctggtgtttctctatatctggttgccgttcatgatcctgcccgttcaggcggcgcttgagcgtttgccgccgtcattgttgcaggcgtcggctgatctcggcgcacgtccacgacaaacctttcgctatgtggtgctgccgctggcaatcccgggtattgccgctggctctatctttaccttctcactcactctgggcgattttatcgtcccgcagctggttggtcctccaggatattttatcggcaatatggtttattcccagcagggggcgattggcaatatgccgatggcggcggcattcaccttggtgccgattattctcatcgcactgtacctggcgttcgtgaaacgtctgggagcgttcgatgcactctga

SEQ ID NO: 485063 - DNA, 795 bp, Shigella sonnei
atgcactctgaacgcgcaccgtttttcctcaaactggcggcctggggcggcgttgttttcctacattttcccatcctgataatcgccgcctatgcgtttaacactgaagatgcggcgtttagttttccaccgcagggcctgacgctgcgctggtttagcgtggcagcacagcgtagtgatattcttgatgccgtgacactgtcacttaaagtggcggcgctggcgacattaattgcgctggtgttagggacgctggcagctgccgcgctgtggcgacgagactttttcggcaaaaacgccatttcgctgttactgctgctgcccattgcgctgccgggcagcgtcactggtctggcgttattaaccgcctttaaaaccatcaatctggagccgggatttttcaccatcgtggtcggtcatgcgactttttgtgtagttgtggtgtttaacaatgtcatcgcccgttttcgccgcacctcctggagtctggttgaggcgtcaatggatcttggggccaatggctggcaaaccttccgctacgtagtgttgccgaatctcagttcggcgttactggcaggaggaatgctggcgtttgccttgtcgttcgatgaaatcatcgttacgacctttacggcaggtcatgaacgaacgttactgttgtggttgctcaatcagcttgggcgaccgcgtgatgtaccggtaactaacgtggtggcactgctggttatgttggtaacaaccttgccgatcctgggggcctggtggctaacccgcgaaggcgacaatggtcaataa

SEQ ID NO: 485064 - DNA, 1425 bp, Shigella sonnei
atgcaacataagttactgattaacggagaactggttagcggcgaaggggaaaaacagcctgtctataatccggcaacgggggacgttttactggaaattgccgaggcatccgcagagcaggtcgatgctgctgtgcgcgcggcagatgcagcatttgccgaatgggggcaaaccacgccgaaagtgcgtgcggaatgtctgctgaaactggctgatgttatcgaagaaaatggtcaggtttttgccgaactggagtctcgtaattgtggcaaaccgctgcatagtgcgttcaatgatgaaatcccggcgattgtcgatgtttttcgctttttcgcgggtgcggcgtgctgtctgaatggtctggcggcaggtgaatatcttgaaggtcatacttcgatgatccgtcgcgatccgttgggggtcgtggcttctatcgcaccgtggaattatccgctgatgatggccgcgtggaaacttgctccggcgctggcggcagggaactgcgtagtgcttaaaccatcagaaattaccccgctgaccgcgttgaagttggcagagctggcgaaagatatcttcccggcaggcgtgattaacatactgtttggcagaggcaaaacggtgggtgatccgctgaccggtcatcccaaagtgcggatggtgtcgctgacgggctctatcgccaccggcgagcacatcatcagccatgccgcgtcgtccattaagcgtactcatatggaacttggtggcaaagcgccagtgattgtttttgatgatgcggatattgaagcagtggtcgaaggtgtacgtacatttggctattacaatgctggacaggattgtactgcggcttgtcggatctacgcgcaaaaaggcatttacgatacgctggtggaaaaactgggtgctgcggtggcaacgttaaaatctggtgcgccggatgacgagtctacggagcttggacctttaagctcgctggcgcatctcgaacgcgtcagcaaggcagtagaagaggcgaaagcgacagggcacatcaaagtgatcactggcggtgaaaagcgcaagggtaatggctattactatgcgccgacgctgctggctggcgcattacaggacgatgccatcgtgcaaaaagaggtatttggtccagtagtgagtgttacgcccttcgacaacgaagaacaggtggtgaactgggcgaatgacagccagtacggacttgcatcttcggtatggacgaaagatgtgggcagggcgcatcgcgtcagcgcacggctgcaatatggttgtacctgggtcaatacccatttcatgctggtaagtgaaatgccgcacggtgggcagaaactttctggttacggcaaggatatgtcactttatgggctggaggattacaccgtcgtccgccacgtcatggttaaacattaa

SEQ ID NO: 485065 - DNA, 333 bp, Shigella sonnei
atgaatgcgttattactccttgcggcactttccagccagataacctttaatacgacccagcaaggggatgtgtataccattattcctgaagtcactcttactcaatcttgtctgtgcagagtacaaatattgtccctgcgcgaaggcagttcagggcaaagtcagacgaagcaagaaaagaccctctcattgcctgctaatcaacctattgctttgacgaagttgagtttaaatatttccccggaagatcgggtgaaaatagttgttactgtttctgatggacaggcacttcatttatcacaacaatggccgccctcttcagaaaagtcttaa

SEQ ID NO: 485066 - DNA, 312 bp, Shigella sonnei
atgttcagaccttttttaaactctcttatgctcggcagtttgttttttccttttattgccatcgcaggaagcaccgcgcaagggggtgtgatccatttttatggccaaattgtggaaccggcatgtgacgtcagcacccagtcatcacccgtagaaatgaactgcccacagaatggttctgttccgggcaaaacctattccagcaaagcgttaatgagcggtaatgttaaaaacgcgcaaatagcctcagtaaaagtgcagtatcttgataaacagaaaaagctggctgtaatgaacatcgaatataactaa

SEQ ID NO: 485067 - DNA, 534 bp, Shigella sonnei
atgaaaacgcgtattcatgttgtgcagggtgatattaccaaactggccgttgatgtgattgtgaatgcggctaatccgtcattaatgggaggcggcggcgtcgatggggccattcatcgcgcagcgggtccggccctgctggatgcctgtttaaaagtcaggcaacagcagggcgattgccctacggggcatgccgttattacgcttgcaggcgatcttcccgctaaagccgtagtacacaccgtcgggccagtctggcgtggtggtgaacaaaacgaagaccagcttttgcaggatgcctatctgaatagcctgcgactggtggcggcaaacagctatacgtcagtggcttttcctgcaatcagtactggggtttatggttaccctcgtgcggcagcggctgaaatcgcagttaaaaccgtttcagaatttattacccgtcacgctttacccgaacaggtatactttgtctgttatgatgaagaaaacgcccacctctacgaaagactccttacccaacaaggagatgaatga

SEQ ID NO: 485068 - DNA, 1482 bp, Shigella sonnei
atgatgaagaaaacgcccacctctacgaaagactccttacccaacaaggagatgaatgatttgccccggctggcgagcgcggtgctgccactgtgttcgcaacatcccggtcagtgtggtcttttccctctggagaaaagtctggatgcgtttgccgcccggtatcgtctggccgaaatggcagagcatacgctggatgttcagtattacatctggcaggacgatatgtcgggtcggttactgttttccgccctgttagccgcagcaaagcgtggcgttcgcgtccgtttgttgctggacgacaacaatacgcccggacttgacgatattttacgcttgcttgacagccatccccgcattgaagtccggctttttaatcctttctcgtttcgcttgctgcgtccgcttggttatatcaccgacttttcccgtctcaatcgccgtatgcacaataaaagtttcactgtcgatggcgtggttactctggtgggaggacgaaatattggtgatgcctattttggggcaggggaagagccacttttttcggatttagatgttatggcaataggacccgtggtagaggacgttgccgatgatttcgcccgctactggtattgcaaatcggtttcacccttacagcaggtgctggatgtcccggaaggtgaaatggcggatcgcatcgagttacccgcctcctggcataacgatgccatgacgcatcgttacttacgccaaatggaatccagtccgtttataaatcatctggttgatggaacgttgccgcttatctgggcgaaaacacgtttattaagtgatgatccggcgaaaggggagggcaaggcaaaacggcattcactgttaccgcagcgcctgtccgatatcatgggctcacccagtgaacgcatcgatattatctcttcctattttgtaccgacacgcgcaggtgtggcgcaactcttacggatggtgagaaaaggggtaaagattgcgatcctaaccaattctcttgccgctaacgatgttgctgtcgtccatgccggatacgcgcgctggcgcaaaaaattgctccgctatggcgtggaattatatgaactcaagccgacgcgtgaacaaagtagtacgttacacgatcgcggcataaccggtaattccggagccagcctgcatgctaaaacttttagcatcgatggtaaaacggtgtttatcggctctttcaatttcgatccgcgttcaacattgctcaatactgaaatgggcttcgtgatagagagcgaaacgctggcacagttaattgataaacgctttattcagagccagtatgatgcggcctggcagctccgtctggacaggtggggacggatcaactgggttgatcgtcatgcaaagaaagagattattctcaaaaaagaacccgccaccagtttctggaagcgggttatggtcagactggcgtcgatattgcccgtggaatggttattgtaa

SEQ ID NO: 485069 - DNA, 1158 bp, Shigella sonnei
atgaatccagtacccgcgcaacgtgaatatttcctcgactccatccgcgcctggctgatgttgttagggatcccttttcatatttctttaatctattcgagccatacatggcatgtgaatagcgccgaaccgtcattgtggctgaccctttttaatgacttcatccactcgttccgcatgcaggtatttttcgttatatccggctacttttcctacatgctttttttacgctatcccttgaaaaaatggtggaaagtacgtgtcgaacgtgtaggtatcccgatgttaacagccatccccttactgacattgccgcaatttattatgctgcaatacgtcaaagggaaagcggaaagttggcctgggctgtcattgtatgacaaatataatacgttggcctgggaattaatatcacacctgtggtttttactggtgttagtagtcatgacgacgctgtgcgtatggatatttaaacgcatcagaaataatttagaaaattctgataaaacgaataaaaaattctcgatggtaaaactatcggtgatttttttatgcctcggcatcggctatgcggtaataagaagaacgatttttattgtgtatccgcccattctgagtaatggcatgttcaattttattgtcatgcaaacgctattttatttgccgttctttatcctcggtgcactggctttcattttccctcatcttaaagccttgtttaccacgccgtctcgtggctgtacccttgcagcagcattggcatttgtcgcttatttactcaaccagcgctatggcagtggcgatgcctggatgtacgaaaccgagtcggtgatcaccatggtcctcggtctgtggatggtgaatgtggtcttctcctttggccaccgtttgcttaacttccagtcagcgcgggtgacttactttgttaacgcatcgctatttatctatctggttcaccacccgttaacgctgtttttcggcgcatacattacaccgcacatcacctccaactggcttggttttctctgtggcctgatattcgtagtagggattgcgataattctgtatgaaattcatttacgcatcccgttactgaagtttttgttttctggtaaaccggttgttaagcgtgagaacgataaagcaccagcccgttaa

SEQ ID NO: 485070 - DNA, 1503 bp, Shigella sonnei
atgttaaccctgtatacatcttcaagctgggctttcagtattgatgatgtcgcaaagcaagctcaatccttagccgggaaaggctatgaggcgcccaaaagcaacttgccctccgttttccgcgatatgaaatacgcggactatcagcagatccagtttaatcatgacaaagcgtactggaacaatctgaagaccccattcaaactcgagttctaccatcagggtatgtacttcgataccccggtcaaaataaatgaagtgactgccaccgcagtcaaacgaatcaaatacagcccggattatttcactttcggcgatgttcagcatgacaaagacacggtaaaagaccttggttttgccggttttaaagtgctttacccgatcaacagcaaagataaaaacgatgaaatcgtcagcatgctcggggccagctatttccgcgtgattggtgcaggtcaggtttatggcctttctgcccgcggcctggcaattgataccgccttgccatcgggggaagaatttccacgcttcaaagagttctggatcgagcgtccaaaaccgactgataaacgtttaaccatttatgcattgcttgactcgccgcgcgcgacaggtgcttacaaattcgtggttatgccagggcgtgacacggttgtggatgtgcagtcgaaaatctatctgcgcgataaagtcggcaaactgggggttgcaccgttaaccagtatgttcctgtttgggccgaaccaaccgtcgcctgcaaataactatcgtccggagttgcacgactctaacggtctctctatccatgccggtaatggcgaatggatctggcgtccgttgaataacccgaaacatttagcggttagcagcttctcgatggaaaacccgcaaggcttcggtctgttgcagcgcggtcgtgatttctcccgctttgaagatctcgatgatcgttacgatcttcgtccaagcgcatgggtgactccgaaaggggagtggggtaaaggcagcgttgagctggtggaaattccaaccaacgatgaaaccaacgataacatcgtcgcttactggacgccggatcagctgccggagccgggtaaagagatgaactttaaatacaccatcaccttcagccgtgatgaagacaaactgcatgcgccagataacgcatgggtgcaacaaacgcgtcgttcaacgggggatgtgaagcagtcgaacctgattcgccagcctgacggtactatcgcctttgtggtcgattttaccggcgcagagatgaaaaaactgccagaggataccccggtcacagcgcaaaccagcattggtgataatggtgagatagttgaaagcacggtgcgctataacccggttaccaaaggctggcgtctggtgatgcgtgtgaaagtgaaagatgccaagaaaaccactgaaatgcgtgctgcgctggtgaatgccgatcagacgttgagtgaaacctggagctaccagttacctgccaatgaataa

SEQ ID NO: 485071 - DNA, 2514 bp, Shigella sonnei
atgcccatcgccgcaagcgagaaagcggcattgccgaagactgatatccgcgccgttcatcaggcgctggatgccgaacaccgcacctgggcgcgggaggatgattccccgcaaggctcggtaaaggcgcgtctggaacaagcctggccagattcacttgctgatggacagttaattaaagacgacgaagggcgcgatcagctgaaggcgatgccagaagcaaaacgctcctcgatgtttcccgacccgtggcgtaccaacccggtaggccgtttctgggatcgcctgcgtggacgcgatgtcacgccgcgctatctggctcgtttgaccaaagaagagcaggagagcgagcaaaagtggcgtaccgtcggtaccatccgccgttacattctgttgatcctgacgctcgcgcaaactgtcgtcgcgacctggtatatgaagaccattcttccttatcagggttgggcgctgattaatcctatggatatggttggtcaggatttgtgggtttcctttatgcagcttctgccttatatgctgcaaaccggtatcctgatcctctttgcggtactgttctgttgggtgtccgccggattctggacggcgttaatgggcttcctgcaactgcttattggtcgcgataaatacagtatatctgcgtcaacagttggcgatgaaccattaaacccggagcatcgcacggcgttgatcatgcctatctgtaacgaagacgtgaaccgtgtttttgctggcctgcgtgcaacgtgggaatcagtaaaagccaccgggaatgccaaacactttgatgtctacattcttagtgacagttataacccggatatctgcgtcgcagagcaaaaagcctggatggagcttatcgctgaagtcggtggcgaaggtcagattttctatcgccgccgccgtcgccgcgtgaagcgtaaaagcggtaatatcgatgacttctgccgtcgctggggcagccagtacagctacatggtggtgctggatgctgactcggtaatgaccggtgattgtttgtgcgggctggtgcgcctgatggaagccaacccgaacgccgggatcattcagtcgtcgccgaaagcgtccggtatggatacgctgtatgcgcgctgtcagcagttcgcgacccgcgtgtatgggccactgtttacagccggtttgcacttctggcaacttggcgagtcgcactactggggacataacgcgattatccgcgtgaaaccgtttatcgagcactgcgcactggctccgctgccgggcgaaggttcctttgccggttcaatcctgtcacatgacttcgtggaagcggcgttgatgcgccgtgcaggttggggggtctggattgcttacgatctcccgggttcttatgaagaattgccgcctaacttgcttgatgagctaaaacgtgaccgccgatggtgccacggtaacctgatgaacttccgtctgttcctggtgaagggtatgcacccggttcaccgtgcggtgttcctgacgggcgtgatgtcttatctctccgctccgctgtggtttatgttcctcgcgctctctactgcattgcaggtagtacatgcgttgaccgaaccgcaatacttcctgcaaccacggcagttgttcccggtgtggccgcagtggcgtcctgagctggcgattgcactttttgcttcgaccatggtgctgttgttcctgccgaagttattgagcattttgcttatctggtgcaaaggaacgaaagaatacggcggcttctggcgcgttacattatcgttgctgctggaagtgctgttttccgtgctgctggctccggtacgcatgctgttccatacggtcttcgtcgtcagcgcgttccttggctgggaagtggtgtggaattcaccgcagcgtgatgatgactccacttcctggggtgaagcgttcaaacgccacggctcacagctgctgttagggttagtgtgggctgttgggatggcgtggctggatctgcgtttcctgttctggctggcaccgattgtcttctcgttgatcctgtcaccgtttgtttcggtgatttccagccgtgccaccgttggtctgcgcaccaaacgctggaaactgttcctgatcccggaagagtattcaccgccgcaggtgctggttgataccgatcggttccttgagatgaatcgccaacgctcccttgacgatggctttatgcacgcagtgtttaacccgtcatttaacgctctggcaaccgcaatggcgaccgcgcgtcaccgcgccagtaaggtgctggaaatcgcccgtgaccgccacgttgaacaggcgctgaacgagacgccagagaagctgaatcgcgatcgtcgccttgtgctgctaagcgatccggtgacgatggcccgtctgcatttccgcgtctggaattcccctgagagatattcttcatgggtgagttattacgaagggataaagctcaatccactggcattgcgtaaaccggatgcggcttcgcaataa

SEQ ID NO: 485072 - DNA, 471 bp, Shigella sonnei
atggaagcggataaaaagcttatccattattggcaggatactttgagcaggaaaaacaacaatatcaaaatattgttgctaaatacgcctgaagattacccgtaccgcgacattgaaaactggcctcatatcaacggcgttttttatgccatggaggatcaagaacgtgttgtcaatgggttgcaaggcgtcctgcgcggcgaatgctactttacgcaaaagcttgccagctacttgattacgcattcaggtaactatcgttataacagcacggaatcagccctccttactcatcgggaaaaagagatcctgaataaactgcgtatcggcgcgtctaataacgagatcgctcgttcgttgttcatcagcgaaaatacggttaaaacgcatctttataatcttttcaagaagatagccgtaaaaaaccggacacaagcggtttcctgggcaaacgataacctcaggcgataa

SEQ ID NO: 485073 - DNA, 390 bp, Shigella sonnei
atgaaacgttatttacgctggattgtggcggcagaatttctgttcgccgcagggaatcttcacgccgttgaggtagaagtcccgggattgctaactgaccatactgtttcatctattggccatgatttttaccgagcctttagtgataaatgggaaagtgactatacgggtaacttaacgattaatgaaaggcccagtgcacgatggggaagctggatcactataacggtcaatcaggacgttattttccagacttttttatttccgttgaaaagagacttcgagaaaactgtcgtctttgcactgattcaaactgaagaagcactaaatcgtcgccagataaatcaggcgttattaagtacgggcgatttggcgcatgatgaattctaa

SEQ ID NO: 485074 - DNA, 417 bp, Shigella sonnei
atgcgtgtcaaacatgcagtagttctactcatgcttatttcgccattaagttgggctggaaccatgactttccagttccgtaatccaaactttggtggtaacccaaataatggcgcttttttattaaatagcgctcaggcccaaaactcttataaagatccgagctataacgatgactttggtattgaaacaccctcagcgttagataactttactcaggccatccagtcacaaattttaggtgggctactgtcgaatattaataccggtaaaccgggccgcatggtgaccaacgattatattgttgatattgctaaccgcgatggtcaattgcagttgaacgtgacagatcgtaaaaccggacaaacctcgaccatccaggtttcgggtttacaaaataactcaaccgatttttaa

SEQ ID NO: 485075 - DNA, 834 bp, Shigella sonnei
atgcagcgcttatttcttttggttgccgtcatgttactgagcggatgcttaaccgccccgcctaaagaagccgccagaccgacattaatgcctcgagctcagagctacaaagatttgacccatctgccagcgccgacgggtaagatctttgtttcggtatacaacattcaggacgaaaccgggcaatttaaaccctacccggcaagtaacttctccactgctgttccgcaaagcgccacggcaatgctggtcacggcattgaaagattctcgctggtttataccgctggagcgtcagagtttacaaaacctgcttaacgagcgcaagattattcgtgcggcacaagaaaacggcacagttgccattaataaccgaatcccgctgcaatctttaacggcggcaaatatcatggttgaaggttcgattatcggttatgaaagcaacgttaaatcgggcggtgttggggcaagatattttgggatcggtgcagacacgcaataccagctcgatcagattgccgtgaacctgcgtgtcgtcaatgtgagtaccggtgagatcctctcctcggtgaacaccagtaagacgatactttcctatgaagttcaggccggggttttccgctttattgactaccagcgcttgctggaaggggaagtgggttacacctcaaacgaacccgttatgctgtgtctgatgtcggctatcgaaacaggggtcattttcctgattaatgatggtatcgaccgtggtctgtgggatttgcagaacaaagcagaacggcagaatgacattctggttaaataccgccatatgtcggttccaccagaatcctga

SEQ ID NO: 485076 - DNA, 522 bp, Shigella sonnei
atggccgcgttttctgctatcatgcgcggcatgaacatacttctctctattgcaatcacaacaggcattctctccggtatctggggatgggtggctgtttccctgggcttactaagctgggcgggcttcttgggctgtacggcctactttgcctgcccgcaaggtgggctgaaagggctggcgatctccgctgcaaccctgcttagtggcgtggtgtgggcgatggtcattatttacggtagtgcactggcaccacatctggaaattctcggttatgtcataaccggtattgtggcgtttctgatgtgtattcaggccaaacagctgctgctttcatttgttccggggacgtttataggcgcatgcgcgacgtttgccgggcagggtgactggaaactggtgttaccttcgctggcgcttgggctggtatttggttacgcaatgaaaaacagcggcctgtggctggcggcgcgtagtgcaaagacggctcaccgtgagcaggaaatcaaaaataaagcgtga

SEQ ID NO: 485077 - DNA, 555 bp, Shigella sonnei
atgaacgagttttctatcctctgtcgtgtgctgggttcgctctattaccgccaaccgcaagatcctttactggtgccgctgtttaccctgattcgtgaggggaaactggctgcgaactggccactggagcaggatgagttactgacgcgtttacagaaaagctgtgatatggcgcaagtctctgccgattacaatgcgttgtttatcggcgatgaatgtgcagtgccgccatatcgtagcgcatgggttgaggacgtaacggaagcggaagtgcgcgcttttctttccgaacgagggatgccactggcggatacgccagccgatcacatcggcacattgctgcttgcggcttcctggctggaagatcagtcaacggaagatgagagcgaagcactggaaacactgttcagtgagtatctgttaccctggtgtggtgcgttcctcggcaaagtggaggcccatgcaaccacgcctttctggcgcaccatggcaccgctaacccgtgatgccattagtgcaatgtgggacgagctggaagaagattctgaagagtaa

SEQ ID NO: 485078 - DNA, 738 bp, Shigella sonnei; identical to SEQ ID NO: 460989

SEQ ID NO: 485079 - DNA, 939 bp, Shigella sonnei
atggatatcatcttttatcacccaacgttcgatacccaatggtggattgaggcactgcgcaaagctattcctcaggcaagagtcagagcatggaaaagcggagataatgactctgctgattatgctttagtctggcatcctcctgttgaaatgctggcagggcgcgatcttaaagcggtgttcgcactcggggccggtgttgattctattttgagcaagctacaggcacaccctgaaatgctgaacccttctgttccactttttcgcctggaagataccggtatgggcgagcaaatgcaggaatatgctgtcagtcaggtgctgcattggtttcgacgttttgacgattatcgcatccagcaaaatagttcgcattggcaaccgctgcctgaatatcatcgggaagattttaccatcggcattttgggcgcaggcgtactgggcagtaaagttgctcagagtctgcaaacctggcgctttccgctgcgttgctggagtcgaacccgtaaatcgtggcctggcgtgcaaagctttgccggacgggaagaactgtctgcatttctgagccaatgtcgggtattgattaatttgttaccgaatacccctgaaaccgtcggcattattaatcaacaattactcgaaaaattaccggatggcgcgtatctcctcaacctggcgcgtggtgttcatgttgtggaagatgacctgctcgcggcgctggatagcggcaaagttaaaggcgcaatgttggatgtttttaatcgtgaacccttaccgcctgaaagtccgctctggcaacatccacgcgtgacgataacaccacatgtcgccgcgattacccgtcccgctgaagctgtggagtacatttctcgcaccattgcccagctcgaaaaaggggagagggtctgcgggcaagtcgaccgcgcacgcggctactaa

SEQ ID NO: 485080 - DNA, 843 bp, Shigella sonnei
atgtcagatatcacaatctcccgcccggaactggtcaacggacatacggacgttatctgctcaaccagtatccgccacattctggctgtacgaaagagtgcgctgctgcaaatcgacacacttatccggcaactggctgaaatctcggtactgacggaaagcattggcggtaaaaccgcccgggactgggccatgaaacaggattttcgctgcggctgctggctcatggagaaaccggaaaccgcaatgaaagccatcacccgcaatctcgatcgcgaaatctggcgtggcctgatgcaacgttccgggatgctgtcattaatggatgcgcaggcccgtgatacatggtaccgctcactggagtacgataactttccggaaatcagtgaagcgaacatttggagcacatttgagcaactgcaccagaataaggatgacgtgtttgagcgaggagtgatcaacgtcttcagagtgctgagctggaattacaaaaccaactcaccctgtaaatttggcagtaaaattatcgtcaacaatctggtgaggtgggaccggtggggatttcatctgaacagcgggcaacaggcagatcgacttaccgacctggaaagaatgctgcacctgttcagcggcaaaccgatccccgacaatcgggaaaacatcaccattcatctggatgagcacatccagtctgttcaggggaaagaggactatgaagatgagatgttcagtatcagatactttaagaagggctccgcgtatatcacgttcagaaaaccggaactggttgaccgactgaatgatattattgcagaacactatcctgacatgctgtcagtatag

SEQ ID NO: 485081 - DNA, 198 bp, Shigella sonnei
atgaaatcattaaccacagaaacggcgctggatattctgattgcgtggctgcaggacaatattgactgcgaatcagggattatcttcgacaacgatgaggataaaacggattcagcagcactgctgccctgcattgaacaggccagggaagatatccgtaccctgcgccaacagcagcttctgcaacagaacaggtga

SEQ ID NO: 485082 - DNA, 489 bp, Shigella sonnei; identical to SEQ ID NO: 30832

SEQ ID NO: 485083 - DNA, 384 bp, Shigella sonnei; identical to SEQ ID NO: 30831

SEQ ID NO: 485084 - DNA, 381 bp, Shigella sonnei
gtgtcagacacactccccgggacaacgcttcccgacgacaacaaagaccgcccctggtgggggctgccctgcaccgtgacgccctgtttcggggcacgtctggtgcaggagggtaaccggttgcattaccttgccgaccgcgccggtatcagaggccggttcagcaatgcggatgcataccatctggaccaggcttttccactgctgatgaaacaactggaactcatgctcaccagcggtgaactgaatccccggcatcagcataccgtcacgctgtatgcgaaagggctgacctgcgatgccgacaccctcggctcctgtggttacgtttatctggctgtttatcctgcgaccgaaacggaaagtaaccctccggaatag

SEQ ID NO: 485085 - DNA, 378 bp, Shigella sonnei
gtgtatgccccgcaggaccgtgagcttcatcgtatcgcggatgccctgcaggcggtgcagaagcgtaacttctggcaactgcaggctgaaatccaccaccggggacgttactgccatccgtactgcatggatatcaccgtcacccggaacagtccgactggtcaggctatgacaaccgatgcggaagccgcagtcagcgaagccctgcgcgacctggccttctggttgtaccgtcaactggaaaacgagtacgactggctgacctcagacgccgctgtggatgaggcccttctcatcaacgaatataccttcaccgaagccggtctgcgcgccggctgccccgtcatcgttaaactatcattcaccgattttctgtga

SEQ ID NO: 485086 - DNA, 1659 bp, Shigella sonnei
atgattcttgagcgcgttgaaattgtgggttttcgcggtatcaaccgtttgtcgttgatgctggaacaaaacaacgtcctgattggggagaacgcgtggggtaaatccagcttgctggacgccttaaccctgctgctatcgccagaatcagatctctaccattttgagcgcgacgatttctggttcccgccgggagatatcaacgggcgagaacatcatctgcatattattttgaccttccgcgaatcgctgccaggccgacatcgggttcgccgttatcggccgctggaagcgtgctggacgccatgcaccgatggctatcaccgtattttttatcgtctggaaggggagagtgcggaagacggcagcgtgatgacactgcgcagttttctcgataaagacggacatccgattgatgtcgaggatattaacgatcaggcacgccatctggtgcgtttaatgccggtgctgcgcttgcgtgatgcccgttttatgcgccgtattcgtaacggcacggtgccaaatgtccctaatatggaagtcaccgcgcgccagctcgatttcctcgcccgtgagttatcctcacatccgcaaaatctctctgatgggcagattcgtcagggactttccgcaatggtacagctgcttgagcattatttctctgagcagggggccggacaggcgcgatatcgtttaatgcggcggcgagccagcaatgagcaacgaagctggcgctatctggatatcatcaaccggatgattgaccgacctggtgggcgctcgtatcgggttattttgctcggcctgtttgctactttgttgcaggcaaaaggcacattgcgactggataaagacgcccgtccattgttgctgatcgaagatccagaaacccgtttacaccccattatgctttcagttgcctggcatctgttgaatcttctgccattgcagcgcattgtcaccaccaactcgggtgagttgctttcgttaacgccggtagagcatgtttgccgactggtacgtgagtcctcgcgcgttgccgcctggcgtctggggccgagtggcttgagtaccgaagatagccgacgcatatcctttcacattcgttttaaccgtccgtcatcgctgtttgcacgctgctggttgctggtggaaggggaaacggaaacctgggttatcaatgaactggcgcgtcagtgcggacatcattttgatgccgaagggatcaaggtcattgagtttgcccagtccgggctaaagccactggttaaatttgcccgccgaatggggattgaatggcatgtactggtcgatggcgatgaagcagggaagaaatatgccgctacggtacgcagcctgttgaataacgatcgggaagccgaacgagaacatttaacggcgttaccggcgctggatatggaacattttatgtatcgccagggattttccgatgtgttccaccgcgtggcgcaaatcccggaaaatgtaccgatgaatctacgcaaaattatctcgaaagcgatccatcgctcttccaaacccgatcttgccattgaagtggcaatggaggcaggacgtcgtggtgtggactccgtaccgacgctgctgaaaaaaatgttctcacgcgtgctgtggctggcgcgcggtcgcgcggattaa

SEQ ID NO: 485087 - DNA, 993 bp, Shigella sonnei
atggtgaaatcgacgtcatgtataaccattgatttcatgaatatgtcgcagctaactgaacggacctttacgccatctgaatctctcagcagcctgtcactttttcttagtctggcacgtggacagtgtcggccgggtaaattctggcatcgccgtagttttcgccagaaatttttgctgcgctcgttgattatgccgcgtttaagcgttgagtggatgaacgaactttcccactggcctaatctcaatgtgttgttaacgcgccaaccgcgactgcctgtgcgtctgcatcgcccttaccttgcggcgaatcttagccgtaagcaattgctggaggcgttacgttaccattatgcgttactccgcggatgtatgtcggcggaagaattcagcttatatttgaatacccccgggctgcaactggcgaagctggaaggcaaaaacggcgagcagttcacgcttgagctgaccatgatgatctcaatggataaagaaggtgacagcacaatcctgtttcgcaacagcgaaggtattcctctggcagagatcacgtttaccctgtgtgaatatcaggggaaaagaacgatgtttattggcggactgcaaggcgcaaaatgggaaattccacatcaggaaatccagaatgcgacgaaagcctgccacgggctatttcccaaacgcctcgtgatggaagcggcctgtctgtttgcccaacgtttgcaggtagagcagattattgccgtcagcaatgaaacgcatatttaccgcagcctgcgttatcgcgataaagaaggcaagatccacgctgattacaacgctttctgggaatcggttggcggcgtatgtgatgctgaacgccattaccgccttccagcacagatagcacgaaaagagattgccgaaatcgccagtaaaaaacgggctgaataccgtcggcgctatgagatgctcgacgctattcagccacaaatggccacgatgtttcgcggttaa

SEQ ID NO: 485088 - DNA, 1116 bp, Shigella sonnei
atgaaaaagcggaaaaccgtgaagaagcgttacgttattgcgctggtgatagtcatcgccggactgattacgttatggagaattcttaacgcacccgtgccgacttatcagacactgattgtgcgccccggtgatttacagcaaagcgtgctggcgaccggaaagctggacgcgctgcgtaaggttgacgtgggcgcgcaggtcagcggtcagttgaaaacgctgtcggtggcgattggcgataaagtaaaaaaagaccagcttttaggggtcattgatcctgaacaggctgaaaaccagatcaaggaggtcgaagcaacgctgatggagctacgcgcgcagcggcagcaggcggaagcggagctgaaactggcgcgggtgacgtattcccgtcagcaacgtctggcacaaacgcaggcggtttcacagcaggatctcgacaccgccgcgacggagatggctgtgaaacaggcgcaaattggcaccattgacgcgcaaatcaagcgcaatcaggcttctctcgatacggctaaaaccaatctcgattacactcgcatcgttgccccgatggccggggaagtcacgcaaatcaccactctgcaaggccagacggtgattgccgcacaacaagcaccgaacattctgacgctggcagatatgagcaccatgctggtaaaagcgcaggtttctgaagcggatgtaatccacctgaagccggggcaaaaagcctggtttacggtacttggcgatccactgacgcgctacgaggggcaaatcaaggatgtactaccgacgccggaaaaggttaacgacgctattttctattacgcccgttttgaagtccccaaccccaatggtttgctgcggctggatatgactgcgcaagtgcatattcagctcaccgatgtgaaaaatgtgctgacgatccctctgtcggcgttaggcgatccggttggcgataatcgttataaagtcaaattgttgcgtaatggcgaaacacgcgagcgtgaagtgacgattggcgcacgtaacgataccgatgttgagattgtcaaagggctggaagcgggcgatgaagtggtgattggtgaggccaaaccaggagctgcacaatga

SEQ ID NO: 485089 - DNA, 1947 bp, Shigella sonnei
atgacgcctttgctcgaattaaaggatattcgtcgcagctatcctgccggtaatgagcaggttgaggtgctgaagggcatcagcctcgatatttatgcgggtgagatggtcgcgattgttggcgcttcgggttccggtaaatcgaccctgatgaatattctcggctgcctggataaggccaccagcggcacctatcgcgtagccggtcaggatgttgccacgctggacgccgatgcgctggcgcaactgcgccgcgagcatttcggctttattttccagcgttaccatttgctttcgcatttaaccgccgagcagaacgttgaagtacccgccgtctatgctggtcttgagcggaaacagcgactgcttcgtgcccaggagttgctgcaacggctggggctggaagaccgtacagagtattatccggcacagctttcgggtggtcagcaacagcgcgtcagcatcgcgcgggcattgatgaacggcggtcaggtaattcttgccgatgaaccaaccggcgcactggacagccattctggcgaagaggtgatggcgatcctgcatcagctgcgcgatcgcgggcatacggtgattatcgtcacccacgatccgcaggtcgctgctcaggccgagcgggtgatcgaaattcgcgacggcgaaattgtgcgcaatcctcccgccattgaaaaagtgaatgttgctggcgggacggagcctgttgtcaatacagtgtctggctggcggcagtttgtcagcggttttaacgaggcgctgacgatggcatggcgggcgctggcagcgaataaaatgcgtactttactgaccatgctggggattattatcggtattgcgtcggtggtttccattgtcgtggtgggtgacgccgccaaacaaatggtgctggcggatattcgttctattggtacgaatactattgatgtctatcccgggaaagattttggcgatgacgatccgcaatatcagcaggcgctgaagtacgacgacttaatcgccatccaaaaacaaccgtgggtcgcctcagccacacctgccgtctcgcaaaacctgcgcctgcgttataacaatgttgatgttgctgccagtgccaatggcgtgagcggcgattattttaatgtctatggcatgaccttcagtgaaggaaacacctttaatcaggagcagctgaacggtcgtgcgcaggtcgtggttctcgacagtaatactcgccgccagcttttcccccataaagcagatgtggttggcgaggtgattctggtcggcaatatgcccgccagagtcattggtgtggcggaagaaaaacagtcgatgtttggtagcagtaaagtgctgcgtgtctggctaccttacagcacgatgtccgggcgagttatgggccagtcgtggcttaactccattactgtcagggtgaaagaaggatttgacagcgccgaggcggaacagcaactcacgcgtttactttcactgcgccacggtaagaaggatttctttacctggaacatggacggcgtcttgaaaactgttgaaaagaccacacgtactttacaactgtttctgacgctggtggcggtgatttcgctggtggtgggtggtattggtgtaatgaatattatgctggtgtcagtgaccgagcggacgcgggaaattggcattcgcatggctgtaggtgcgcgagcaagcgatgttttgcaacagttcctgatcgaagccgtactggtttgcctggtcggtggcgcgttgggaataactctgtcactgttaattgctttcaccttgcagcttttcttacccggctgggagattggtttttcaccgttggcactgctgctggcgtttctctgctcgacggccaccgggattttatttggatggttacccgcacgaaatgcggcacgactggatccagtagatgctctggcacgagagtaa

SEQ ID NO: 485090 - DNA, 225 bp, Shigella sonnei
atggaaaagggtactgttaagtggttcaacaatgccaaagggtttggtttcatctgccctgaaggcggcggcgaagatattttcgctcattattccaccattcagatggatggttatagaacgctaaaagctggacaatccgttcagtttgatgtccaccaggggccaaaaggcaatcacgccagtgttattgtgcccgtcgaagtagaagcggcagtcgcatag

SEQ ID NO: 485091 - DNA, 1239 bp, Shigella sonnei
atgagcagcgcaattcatagacttagcgacactcttttacgaaaattaagcggatcaccaaccacaaaaaacgccttttttaatgacggtggcaatcttagcgtaagacattccaccagcggcctgttaacctggtatttcacttacagggccggaactggcaggcaggtatcaccggaacgcctgagactgggcaactatcccgatctgagcctgaaagcagccagggaaaaagcggcacagtgtcgcgcctggctggctgaggggaaaaatccgcgctatgagcttaatcgtgctgtacaggatgcgttagcccccgtgacagttaaggaagcgctcacttactggcttgaatcgtatgcaaaggaaaagcgcactgactacgaatcactgaaaagccggatcaataaacacataatcagccagattggcgctttgccgttggaaaaatgcgagctacggcactggttggcatgttttgaccagatggcaaagcgaagcccagtatctgccggatttttgctacaggtatgcaaacaggcgcttaagtactgccgaaaacgacgatacgcaatcagcaacgttcttgatgatatggttgtcggtgatgtgggaaaaaaagcagaaataagcgagcgcgtactaacaaacaaggagcttggggaattactccgcgccctggatgaaaaaatttacccaccgtactacagcgccctgattcgcctcctgattgtcttcggatgccgtgccactgagctaagacgctctgaggtccaggaatgggattttaaagaaatgctctggaccgtgccgaaagaacacagcaaaacgaaggtagcaatattcaggccaataccggaagcgatcttgccgttcgtaacgaagctggtggagcagaacaggcacacgggattattgctcggagaactgaaagggcaatcatccgtatcagagtacggaagaacggcacacagacgcattaatcaagccccctggacgttgcacgacatccggcacacgtttacaacgatgctgaacgatttaggcgtggatcctcatgtagtggagcagctaaccgcgcaccagttgccaggagtgcaacgagtctataatcactcccgttatctcgatgcaaaacgtgacgctcttaatctatgggttgagcgtctcgagcttctccagaacaatgatgaaaaaatcgttgttatgaccccgcgaatttactcccaaaattcttga

SEQ ID NO: 485092 - DNA, 2931 bp, Shigella sonnei
atgactagtctaaaaactagtattaagactatcacttatttaagtgatactggttgtctggagattcagggggccagtctaattgccgacggaaaaacgctggttattggcaatacagagaatgacggagctgttgactctattgctggtaccgggttgatcaccaaaacaggttccggcgatctggtacttaatgcagataacaatgactttactggtgagatgcagattgaaaacggtgaagttaccctgggccgcagcaactccctgatgaatgtcggcgatacgcattgccaggacgatccgcaagactgctacggtctgacgatagggagtattgataagtaccagaatcaggcagagctaaacgttggctccacccaacaaacctttgtgcactcattgacgggctttcagaatggcactttaaatatcgatgctggtggcaatgttactgttaatcaaggcagttttgctggcaccatcgaaggtgctggtcagctcaccattgcgcaaaacggcagctacgtgctgtcgggggcgcagtcgatggcgctaaccggcgatatagtcgttgatgatggtgcggtgctttcgctggaaggcgacgcggcagatctcgccgctctccaggacgatccgcagtcgatcgtgttaaacggcggtgtgctcgatctctctgatttctccacctggcagagcggcacatcatacaatgatggccttgaagtcagtggcagcagcggaacggttatcggcagtcaggatgtggtagatcttgcaggtggcgacaatttgcatatcggcggcgacgggaaagatggcgtctacgtggtggtcgatgcgagcgacgggcaggtaagtctggcaaacaataatagttatttgggcacaacacaaatcgcctccggtacgctgatggtgagcgacaactcgcagcttggagatacccactataaccgccaggttatctttaccgataagcaacaagaaagcgtgatggagattactgccaatgtcgatactcgctctacgacgactgagcatgggcgtgatattgaaatgcgcgccgacggtgaagtggcagttgatgcgggggtagacacgcagtggggcgcactgatggctgacagcagcgggcagcatcaggatgagggtagcacatttactaaaacgggggcgggtacgctggagctgaccgccagcggtacaacgcagtcggcagtacgtgtcgaagaaggcaccctgaaaggcgatgttgcggatatctttccttatgcttcgtcactgtgggtcggtgatggggcggcgttcgttactggcgcggatcaggatattcagtctatcgatgctacttccagcggcactatcgatatcagcgatggtacggttttgcgtctgaccgggcaggatacttccgtcgcccttaatgcctcattgtttaacggcgatgggacgctggtgaatgctaccgatggcgtgacgttgacaggtgagcttaataccaaccttgaaactgacagcctgacctatcttgccgacgtgacggttaatggtgatctgaccaatacgtccggtgcggttagcctgcaaaatggcgtcgctggcgatacgctgacggtaaacggtgattataccggcggcggtacgctactgctcgatagcgaattaaacggcgatgactcggtaagcgatcaattggtgatgaacggtaatactgctggcaataccacggtggtggttaactctattacagggattggtgagccgacatcgacaggcattaaagtggttgatttcgcagctgatcccacgcagtttcaaaacaatgcgcagttcagtctggcaggcagcggctacgtcaatatgggagcgtatgactacacgctggtggaagataacaacgactggtatctgcgatcgcaagaagtaacgccgccatcgccacctaatcccaacccgactcccgatcctgatcccacaccggatcctgacccaacccccgacccggcccctacgcctgcttaccagccggtgctgaatgccaaagttggcggttatctcaataacctgcgggcggcaaatcaggcgtttatgatggagcgacgcgatcacgctggtggcgatggtcagacgctgaatttacgtgttatcggcggacgttatcattacacggcggcagggcaactggctcagcaggaagacacttctacggtgcagcttagcggcggcttgtttagcgggcgctggggcacggatggcgagtggatgcttggggcggttggtagctacagtgataatcagggcgacagccgctcgaatatgaccggaactcgcgccgataaccagaaccacggttatgccgttgggctgacctcaagctggtatcagcacggtaatcagaagcagggggcctggctggataactggttgcagtacgcgtggtttagcaatgatgtttctgaacatgaagatggcacagatcattaccattcgtcggggattatcgcctcgctggaagccgggtatcagtggttaccggggcgtggtgtggtgattgaaccgcaggcgcaggtgatttatcagggcgtgcagcaggatgattttaccgccgctaaccatgcgcgcgtgtcacaatcgcagggggatgatattcagacgcggctgggtttacacagcgaatggcgtaccgcggttggtgtcacaccaacattagatctgaattattatcacgatccccatgcgacggaaattgaagaagatggcagcactatcagtgacgatgcggtgaagcgacggggtgaaataaaagtgggagtcacgggcaatatcagtcagcgagtgtccctgcgcggcagcgtggcgtggcagaaagggagtgatgattttgcccagacggcagggtttttgtcgatgacggtgaaatggtaa

SEQ ID NO: 485093 - DNA, 723 bp, Shigella sonnei; identical to SEQ ID NO: 473548

SEQ ID NO: 485094 - DNA, 2628 bp, Shigella sonnei
atgagcgaccttgcgagagaaattacaccggtcaacattgaggaagagctgaagagctcctatctggattatgcgatgtcggtcattgttggccgtgcgctgccggatgtccgagatggcctgaagccggtacaccgtcgcgtactttacgccatgaacgtactaggcaatgactggaacaaagcctataaaaaatctgcccgtgtcgttggtgacgtaatcggtaaataccatccccatggtgactcggcggtttatgacacgatcgtccgtatggcgcagccattctcgctgcgttacatgctggtagacggtcagggtaacttcggttccatcgacggcgactctgcggcggcaatgcgttatacggaaatccgtctggcgaaaattgcccatgaactgatggccgatctcgaaaaagagacggtcgatttcgttgataactatgacggcacggaaaaaattccggacgtcatgccaaccaaaattcctaacctgctggtgaacggttcttccggtatcgccgtaggtatggcaaccaacatcccgccgcacaacctgacggaagtcatcaacggttgtctggcgtatatcgatgatgaagacatcagcattgaagggctgatggaacacatcccggggccggacttcccgacggcggcaatcattaacggtcgtcgcggtattgaagaagcttaccgtaccggtcgtggcaaggtgtacatccgcgcccgtgctgaagtggaagtcgacgccaaaaccgggcgtgaaaccattatcgtccacgaaattccgtatcaggtaaacaaagcgcgcctgatcgagaagattgcggaactggtaaaagaaaaacgcgtggaaggcatcagcgcgctgcgtgacgagtctgacaaagacggtatgcgcatcgtgattgaagttaaacgcgatgcggtcggtgaagttgtgctcaacaacctctactcccagacccagttgcaggtttctttcggtatcaacatggtggcattgcaccatggtcagccgaagatcatgaacctgaaagatatcatcgcggcgtttgttcgtcaccgccgtgaagtggtgacccgtcgtactattttcgaactgcgtaaagctcgcgatcgtgctcatatccttgaagcactagccgtggcgctggcgaacatcgacccgatcatcgaactgatccgtcatgcgccgacgcctgcagaagcgaaaactgcgctggtggctaatccgtggcagctgggcaacgttgccgcgatgctggaacgtgctggcgacgatgctgcgcgtccggaatggctggagccagagttcggcgtgcgtgatggtctgtactacctgaccgaacagcaagctcaggcgattctggatctgcgtttgcagaaactgaccggccttgagcacgaaaaactgctcgacgaatacaaagagctgctggatcagatcgcggaactgttgcgtattcttggtagcgccgatcgtctgatggaagtgatccgtgaagagctggagctggttcgtgaacagttcggtgacaaacgtcgtactgaaatcaccgccaacagcgcagacatcaacctggaagatctgatcacccaggaagatgtggtcgtgacgctctctcaccagggctatgttaaatatcagccgctttctgaatacgaagcgcagcgtcgtggcgggaaaggtaaatctgccgcacgtattaaagaagaagactttatcgaccgactgctggtggcaaacacgcacgaccatattctgtgcttctccagccgtggtcgcgtctattcgatgaaagtttaccagttgccggaggccactcgtggcgcgcgcggtcgtccgatcgtcaacctgctgccgctggagcaggacgaacgtatcaccgcgatcctgccagtgaccgagtttgaagaaggcgtgaaagtcttcatggcgaccgctaacggtactgtgaagaaaaccgtcctcaccgaattcaaccgtctgcgtaccgccggtaaagtggcgatcaaactggttgaaggcgatgagctgatcggcgttgacctgaccagcggcgaagacgaagtaatgctgttctccgccgaaggtaaagtggtgcgctttaaagagtcttctgtccgtgcgatgggctgcaacaccaccggtgttcgcggtattcgcttaggtgaaggcgataaagtcgtctctctgatcgtgcctcgtggcgatggcgcaatcctcaccgcaacgcaaaacggttacggtaaacgtaccgcagtggcggaatacccaaccaagtcgcgtgcgacgaaaggggttatctccatcaaggttaccgaacgtaacggtttagtggttggcgcggtacaggtagatgactgcgaccagatcatgatgatcaccgatgccggtacgctggtacgtactcgcgtttcagaaatcagcatcgtgggccgtaacacccagggcgtgatcctcatccgtactgcggaagatgaaaacgtagtgggtctgcaacgtgttgctgaaccggttgacgaggaagatctcgataccatcgacggcagtgccgcggaaggggacgatgaaatcgctccggaagtggacgttgacgacgagccagaagaagaataa

SEQ ID NO: 485095 - DNA, 1455 bp, Shigella sonnei
gtggtgcacaacaatctgcaaatcgatctcaatgagccggacctctttctcgacagcgactctctgagccagcttcccaaagatctcctcaccattccgtttctccacgatgttctgagtgaagatttcgttttctattatcagaatcatgccgatcgtctgggcattgaaggcagcattcgtcgcattgtctatgaacacgatctcacgctgaaagataaactcttttcgtcactcttagatcagcccgcgcaggctgcgctatggcacgataaacaaggccatctttcacattacatggtgctgatccagcgcagtggtttaagcaaactgctggagccattgttgtttgccgctaccagcgacagccagttaagcaaaacggaaatcagtagcatcaagataaatagtgaaactattcctgtttatcagttgcgctataacggcaataacgccctgatgttcgcgacttatcaggacaagatgctggtgttttccagcacggatatgttgtttaaagatgatcagcaggataccgaagccacggcgatcgcaggtgatttgttgagcggcaaaaaacgctggcaagcaagctttggcctggaagagcgtgctgctgaaaaaacgccagtacgccagcgcatcgtggtcagcgccaggttgctgggttttggctaccagcggttaatgccttcttttgctggcgtacgcttcgaaatgggtaacgacggctggcacagttttgtggcgttaaatgatgaatccgccagcgtagataccagtttcgattttacgccggtctggaacagtatgcctgccggggccagcttctgtgtggtggtgccgtattcacacggtattgccgaagagatgctttcgcacatcagccaggaaaacgacaagctgaatggggcgttagacggtgccgcggggctgtgctggtatgaagactcaaaattgcaaaccccgctgtttgtcggtcagtttgatggcactgccgaacaggcgcaattgccagggaaactgtttacgcaaaatattggtgcgcacgaaagcaaagcgccagaaggtgttttgccgataagccagactcagcagggcgaagcgcaaatctggcgtcgcgaagtgagttcccgatacggtcagtatccgaaagcgcaggcggcgcaacccgatcaattaatgtcggattattttttccgcgtgtcgctggcgatgcaaaacaaaacgctgcttttctccctcgatgacacgctggttaataacgccctgcaaacactgaataaaaaccgcccggcaatggtggatgtaatacccactgatggcatcgttccgctctatatcaattcacaaggcgtggcgaaactgctgcgtaacgaaacgttgaccagtctgccgaagaatctcgaaccggttttttataacgccgcacaggtgatgctgccaacttactga

SEQ ID NO: 485096 - DNA, 1461 bp, Shigella sonnei
atgggaaataatttgttatcagcaaaagcgacactccctgtttatgatcgtaataacctggccccaagaattattcatttaggctttggtgcatttcaccgtgcgcatcagggcgtgtatgccgatattcttgctacagaacatttcagtgactggggatattatgaggtcaacttaatcggcggcgaacagcaaattgccgatttacaacagcaagataatctttataccgttgcggaaatgtcggccgatgcgtggacggctcgcgtcgttggcgtcgttaagaaagccttgcacgtacagatggatggcttagaaaccgtgttggctgcgatgtgtgaaccgcaaatcgcgattgtctctctgacaatcaccgaaaaagggtatttccactctccggcgaccggacagttaatgctcgatcacccgatggtcgctgccgacgtgcaaaatccccaccagccgaaaacagcaacaggggtgattgttgaggcgctggcccgccgtaaagcggcaggacttcccgcatttaccgtcatgtcatgtgacaacatgccagaaaacggtcatgttatgcgtgacgttgtcacttcatacgcgaaagctgttgatgtaaaactggcacaatggatcgaagataacgtgactttcccatcaacaatggtggaccgtattgtgcccgcagtgacagaggatacgctggcgaaaatcgaacaacttaccggtgtgggcgatcctgcgggcgttgcctgtgaacctttccgccagtgggtaatagaagataactttgttgccggacgtccagaatgggaaaaagcgggagccgaactggttagtgatgtgctgccttatgaagagatgaagttgcgcatgctcaacggcagtcattcattcctggcgtatttgggttatcttgctggatatcagcacattaatgactgcatggaagatgaacattatcgttatgcggcgtatggcttgatgttgcaggaacaagcgccgacgctgaaagtgcagggcgttgatttgcaagattacgctaaccgattaattgaacgctatagcaacccggcgttacgtcatcgaacctggcagattgcgatggatggcagccagaaattgccacagcggatgttggattctgttcgctggcatctggcgcatgacagcaagttcgatctgctggcactgggcgtcgcgggttggatgcgttatgtcggtggtgttgatgaacagggaaatccgattgaaatcagtgacccactgttacctgttattcagaaggctgtacaaagtagtgctgaagggaaagcgcgcgtccagtcattgctggcgattaaggcgatctttggtgatgatttgccagacaatagtttgtttactgcaaaagtgacggaagcgtacttgtctttattagcgcatggcgcgaaagcgaccgtggcgaaatattccgtgaagtaa

SEQ ID NO: 485097 - DNA, 204 bp, Shigella sonnei; identical to SEQ ID NO: 260735

SEQ ID NO: 485098 - DNA, 687 bp, Shigella sonnei
atgaccgtcgaaacgcaacttaatcccacacagcctgtcaatcagcaaatttatcgtattcttcgtcgcgacattgtccattgcctgattgcaccaggcacaccgttgtcggaaaaagaagtttctgttcgtttcaatgtgtcacgccagccggttcgtgaagcctttattaaactggcggaaaacggcctgattcaaattcgtccgcagcgtggcagctacgtcaacaaaatttccatggcccaggtgcgcaatggcagttttatccgtcaggccattgagtgcgcggtggcgcgtcgggcggcgagcatgattaccgaaagccagtgctaccaactggaacaaaatcttcaccagcaacgcattgccattgagcgcaagcaactggatgatttttttgaacttgatgacaacttccatcaactcctgacgcagattgccgactgtcaactggcgtgggataccattgagaacctgaaagcgaccgttgatcgcgtgcgctatatgagtttcgaccacgtttctccaccagaaatgctgttacgccagcatcttgatattttctctgccctgcaaaaacgtgatggcgatgcggtagaacgtgcaatgacgcaacatttgcaggaaatcagcgaatccgtgcgccagatccgccaggaaaatagcgactggtttagcgaagagtaa

SEQ ID NO: 485099 - DNA, 747 bp, Shigella sonnei
atgatcgttttagtaactggagcaacggcaggttttggtgaatgcattactcgtcgttttattcaacaagggcataaagttatcgccactggccgtcgccaggagcggttgcaggagttaaaagacgaactgggagataatctgtatatcgcccaactggacgttcgcaaccgcgccgctattgaagagatgctggcatcgcttcctgccgagtggtgcaatattgatatcctggtaaataatgccggcctggcgttgggcatggagcctgcgcataaagccagcgttgaagactgggaaacgatgattgataccaacaacaaaggcctggtatatatgacgcgcgccgtcttaccgggtatggttgaacgtaatcatggtcatattattaacattggctcaacggcaggtagctggccgtatgccggtggtaacgtttacggtgcgacgaaagcgtttgttcgtcagtttagcctgaatctgcgtacggacctgcatggtacggcggtgcgcgtcaccgacatcgaaccgggtctggtgggtggcaccgagttttccaatgtccgctttaaaggcgatgacggtaaagcggaaaaaacctatcaaaataccgttgcattgacgccagaagatgtcagcgaagccgtctggtgggtgtcaacgctgcctgctcacgtcaatatcaataccctggaaatgatgccggttacccaaagctatgccggactgaatgtccaccgtcagtaa

SEQ ID NO: 485100 - DNA, 2046 bp, Shigella sonnei
atgacaacaatgaatcctttccttgtgcaaagcacactaccgtatctggctccccattttgatcaaattgccaatcatcactatcgcccggcattcgatgagggaatgcagcaaaagcgggcagaaattgctgccatcgcgcttaacccgcaaacgcctgatttcaacaatactattctggcactggaacaaagcggagaattacttacccgcgttaccagcgtcttttttgcgatgactgcggcgcataccaatgatgaattacagcgtcttgatgaacagttttccgctgaactggcggaactggctaatgatatctatctgaacggtgaattattcgcgcgggtagatgctgtctggcagcgccgtgaatccctggggcttgatagtgaatccatccgcctggtggaggtgattcatcaacgttttgtccttgccggagccaaacttgcgcaagctgataaagcaaaattaaaagtactgaatacagaagctgcgaccctgaccagccagtttaaccagcgattactggcagcaaataaatccggcggtctggttgtgaacgatatcgcgcagctggcaggaatgagtgagcaagagattgcgctggcggcagaggcggctcgcgagaaaggtctggataacaaatggctgattccgctgctgaataccacccaacaaccggcgcttgccgaaatgcgcgatcgtgcgacgcgtgaaaaactgtttattgcgggctggacgcgagcggaaaaaaatgatggcaatgatacccgcgctatcattcaacgtctggtagagattcgcgcacagcaggcgaaactgcttggttttcctcattatgccgcatggaaaatcgccgatcagatggcaaaaacgccagaagcagcactcaactttatgcgggaaattgttccagcggcgcgtcaacgtgcgagcgatgaattagcctccatacaggcggttatcgataagcagcagggcgggtttagcgcgcagccgtgggactgggcattttatgcggaacaggtacggcgggagaaatttgatcttgatgaagcgcagctcaagccatattttgaattaaacacggtgttgaatgaaggtgtattctggaccgcgaatcagctcttcggtattaagtttgtcgaacgttttgatattcctgtctaccatcctgacgttcgggtgtgggaaatttttgatcataatggcgtggggctggcgttattttacggtgatttcttcgcccgtgattcaaaaagcggcggtgcatggatgggcaattttgttgagcaatcaacgcttaatgaaacgcatccggtaatttataacgtctgcaattatcagaaacccgctgccggtgagcctgcgttgttactctgggatgatgtaataaccttattccatgaatttggtcatacgctgcacggcctttttgcccgccagcgttatgccacgctttccggcaccaacacgccgcgtgattttgtcgaatttccgtcgcaaatcaacgaacactgggcaacgcatccgcaggtattcgctcgctacgcccggcattatcagagcggggcagcaatgcctgacgaactgcaacagaaaatgcgtaatgccagcctgttcaacaaagggtatgagatgagcgaactgcttagcgccgcacttctcgatatgcgctggcattgcctggaagaaaacgaagcaatgcaggatgtcgatgattttgaattgcgggcgctggtggcggaaaatatggatcttcctgctataccgccacgctatcgcagcagttatttcgcccatatttttggtggcggatatgctgcaggttattacgcttatctgtggacgcaaatgttggccgatgatggttaccagtggtttgttgagcagggcggattaacgcgtgaaaatgggcagcgttttcgcgaggcgatcctttccagaggtaacagcgaagatctggaacgcctgcatcgacaatggcgcggtaaggctcctcagattatgccgatgctgcaacatcgtggcttgaacatataa

SEQ ID NO: 485101 - DNA, 519 bp, Shigella sonnei; identical to SEQ ID NO: 473993

SEQ ID NO: 485102 - DNA, 393 bp, Shigella sonnei
atgaaatttcagtccattgtattagcaagttttcttgtcatgccttatgcgttggcagatgaccagggcggtttaaaacaggatgcagcgccaccgccgcctcatgcaatagaagatggctatcgcggaaccgatgatgcaaaaaaaatgaccgttgatttcgcaaaaaacatgcacgatggcgcttcggtttcactacgcggtaatttgatttctcacaaaggagaggaccgttacgtttttcgcgataagagcggtgaaattaatgttgttattcctgcggccgtctttgatggacgagaagttcagccggaccagatgatcaacattagcggcagtctggataagaaaagcgcgccggccgtcgttcgggtcactcatttgcagaaataa

SEQ ID NO: 485103 - DNA, 891 bp, Shigella sonnei
atgatcaagaagacaacggaaattgatgccatcttgttaaatctcaataaggctatcgatgcccactaccagtggctggtgagtatgtttcacagcgtggtcgcgagagatgccagtaagccagaaataacggataaccattcttatggactgtgccagtttggtcggtggattgatcatctggggccactcgataacgatgaattaccttacgttcggctaatggattctgcccatcaacatatgcataactgtggtcgggaattaatgctggctattgttgaaaatcactggcaggacgcgcatttcgacgcctttcaggaggggttgctttcttttactgcggcattaaccgattacaaaatttatttgctgacgatccgtagcaatatggatgttttgacgggattgccggggcgtcgggttcttgatgaatcctttgatcatcagttacgcaacactgatcctctgaatctttatttaatgttgttggatattgaccgatttaaattggttaatgatacctacgggcatttaatcggcgatgtagtattacgcaccctggcaacttacttagccagttggacgcgtgattacgaaacggtttatcgctacgggggcgaagaatttatcattattgttaaagcggctaatgatgaagaagcatgtcgtgcaggtgtcagaatttgccagttagtcgataaccatgccatcacacattctgaagggcatatcaacattaccgtgacagcaggtgtgagtcgcgcatttcctgaagagcctctggatgtggtcattggaagagcagaccgggcaatgtatgagggtaagcaaaccggaagaaatcgctgcatgtttattgacgaacaaaatgtgattaaccgagtttaa

SEQ ID NO: 485104 - DNA, 498 bp, Shigella sonnei
ttgttaacctctgaatatgaacaatttagtggcgttcatggaattggcgtagcgaaatttgcccagttaaaggggattgctgaactggcgcggcgttactacaacgtgcggatgcgtgaagaaagccctttactcagcccggagatgacgcgggaatttttacaaagccagctcacgggtgaggagcgggagatctttatggtgatctttctcgactcacaacaccgggttataacgcatagccgtcttttttccggcacgctaaaccatgttgaagtccatcctcgggaaattatccgggaagcgataaaaataaacgcctcggcgctgatccttgcacataatcacccttcgggttgtgctgaacccagtaaagcggataaactcattactgaacggataataaagagttgtcagttcatggatttacgcgtgctcgaccatatcgtgattgggcgtggagagtatgtttcttttgccgaacgcggctggatttaa

SEQ ID NO: 485105 - DNA, 237 bp, Shigella sonnei
atgtcccgagtctgccaagttactggcaagcgtccggtgaccggtaacaaccgttcccacgcactgaacgcgactaaacgccgtttcctgccgaacctgcactctcaccgtttctgggttgagagcgaaaagcgttttgtcaccctgcgcgtatctgctaaaggtatgcgtgtaatcgataaaaaaggcatcgatacagttctggctgaactgcgtgcccgtggcgaaaagtactaa

SEQ ID NO: 485106 - DNA, 168 bp, Shigella sonnei; identical to SEQ ID NO: 1746

SEQ ID NO: 485107 - DNA, 810 bp, Shigella sonnei
atgcctgaattacccgaagttgaaaccagccgtcgcggcatagaaccgcatctcgttggtgcaaccattcttcatgcggtggtgcgcaacggacgcttgcgctggccggtttcagaagagatctaccgtttaagcgaccaaccagtgcttagcgtgcagcggcgggctaaatatctgctgctggagctgcctgagggctggattatcattcatttggggatgtctggcagcctgcgcatccttccagaagaacttccccctgaaaagcatgaccatgtggatttggtgatgagcaacggcaaagtgctgcgctacaccgatccgcgccgctttggtgcctggctgtggaccaaagagctggaagggcacaacgtgctggctcatcttggaccggagccgcttagcgacgatttcaatggtgagtatctgcatcagaagtgcgcgaagaaaaaaacggcgattaaaccgtggctgatggataacaagctggtggtaggggtagggaatatctatgccagcgaatcactgtttgcggcggggatccatccggatcggctggcgtcatcactgtcgctggcagagtgtgaattgttagctcgggtgattaaagcggtgttgctgcgttcgattgagcagggtggtacaacgctgaaagattttctgcaaagtgatggtaaaccgggctatttcgcgcaggaattgcaggtttacggacgaaaaggtgagccgtgtcgggtgtgcggtacgccgattgtggcgactaaacatgcgcagcgggcaacgttttattgtcggcagtgccagaagtaa

SEQ ID NO: 485108 - DNA, 480 bp, Shigella sonnei
atgcaaaaacgggcgatttatccgggtactttcgatcccattaccaatggtcatatcgatatcgtgacgcgcgccacgcaaatgttcgatcacgttattctggcgattgccgccagccccagtaaaaaaccgatgtttaccctggaagagcgtgtggcgctgacacagcaggcaaccgcgcatctggggaacgtggaagtggttgggtttagtgatttgatggcgaacttcgcccgtaatcaacacgctacggtgctgattcgtggcctgcgtgcggtggcggattttgaatatgaaatgcagctggcgcatatgaatcgccacttaatgccggaactggaaagtgtgtttctgatgccgtcgaaagagtggtcgtttatctcttcatcgttggtgaaagaggtggcgcgccatcagggcgatgtcacccatttcctgccggagaatgtccatcaggcgctggtggcgaagttagcgtag

SEQ ID NO: 485109 - DNA, 1278 bp, Shigella sonnei
atgctcgaattgctttacaccgcccttctctaccttattcagccgctgatctggatacggctctgggtgcgcggacgtaaggctccggcctatcgaaaacgctggggtgaacgttacggtttttaccgccatccgctaaaaccaggcggcattatgctgcactccgtctccgtcggtgaaactctggcggcgatcccgttggtgcgcgcgctgcgccatcgttatcctgatttaccgattaccgttacaaccatgacgccaaccggttcggagcgcgtacaatcggctttcgggaaggatgttcagcacgtttatctgccgtatgacctgcccgatgcgctcaaccgtttcctgaataaagtcgaccccaaactggtgttgattatggaaaccgaactatggcctaacctgattgcggcgctacataaacgtaaaattccgctggtgatcgctaacgcgcgactctctgcccgctcggccgcaggttatgccaaactgggtaaattcgtccgccgcttactgcgtcgtattacgctgattgctgcgcaaaatgaagaagatggtgcacgttttgtggcgctgggcgcaaaaaataaccaggtaaccgttaccggtagcctgaaattcgatatttctgtaacgccgcagttggctgctaaagccgtgacgctgcgccgccagtgggcaccacaccgcccggtatggattgccaccagcactcacgaaggtgaagagagtgtggtgatcgccgcacatcaggcattattacagcaattcccgaatttattgctcatcctggtaccccgtcatccagaacgcttcccggatgcgattaaccttgtccgccaggctggactaagctatatcacacgctcttcaggggaagtcccctccaccagcacgcaggttgtggttggcgatacgatgggcgagttgatgttactgtacggcattgccgatctcgcctttgttggcggttcactggttgaacgtggagggcataatcctctggaagctgccgcacacgctattccggtattgatggggccgcatacttttaatttcaaagacatttgcgcgcggctggagcaggcaagcgggctgattaccgttaccgatgccactacgcttgcaaaagaggtttcctctttactcaccgacgccgattaccgtagtttctatggccgtcatgccgttgaagtactgtatcaaaaccagggcgcgctacagcgtctgcttcaactgctggaaccttacctgccaccgaaaacgcattga

SEQ ID NO: 485110 - DNA, 1059 bp, Shigella sonnei
gtggataagccatttcgaagaattttgctcattaagatgcgttttcatggggatatgttattaactactcccgtcattagttcgctgaaaaaaaattaccctgacgcaaaaatcgatgtgctgctttatcaggacaccaccccgatcctgtctgaaaatccagagattaacgcgctctacggcataaaaaataaaaaagcaaaagcctcagaaaaaattgccaacttttttcatctcatcaaggtattacgtgccaataagtatgaccttatcgtcaatcttaccgatcaatggatggttgctatactggttcgcttattaaatgcccgtgtgaaaatttcccaggattatcatcatcggcagtctgctttttggcgtaaaagtttcacccatttagtgccgttgcagggtggaaatgtggtggaaagtaacttatccgtgctgacaccattgggacttgattcgttggtgaagcagacaaccatgagttacccgcctgcaagctggaaacgtatgcgtcgcgaacttgatcacgctggtgttggacaaaattatgtggttatccaacctacggcgcggcaaatcttcaaatgctgggacaacgccaagttttccgctgtgattgatgccttacatgctcgtggttatgaagtcgttctgacgtccggcccagataaagacgatctggcctgcgtcaatgaaattgcgcagggatgccagacgccaccagtaacggcgctggctggaaaggtgaccttcccggaacttggtgcgttaatcgatcatgcgcagctgtttattggcgttgattccgcaccggcgcatattgccgctgcagttaatacgccgctgatatcgctgtttggtgcgacagaccatattttctggcgtccttggtcaaataacatgattcaattctgggcgggagattaccgggaaatgccaacgcgcgatcagcgtgaccgaaatgagatgtatctttcggttattccggcggcagatgtcattgctgctgtcgataaattactgccctcctccacgacaggtacgtcgttatga

SEQ ID NO: 485111 - DNA, 1125 bp, Shigella sonnei
atgatcgttgctttttgtttatataaatattttccctttggcggtttgcagcgcgattttatgcgtattgctcagacagtcgccgcccgaggtcatcatgttcgggtttatacccagtcgtgggaaggcgaatgccctgatgtatttgaactgatcaaagtgccggttaaatcgcataccaatcacgggcgcaatgcggagtattttgcctgggtgcaaaaacatttacgcgaacatcccgtcgataaagtcgttggattcaacaaaatgccggggctggacgtttattatgccgctgatgtttgttatgccgagaaagtcgcgcaggaaaaaggctttttctatcacctgacgtcacgttatcgccattatgccgcctttgagcgggcaaccttcgaacagggcaagccgacacagctgctgatgctgacagataagcaaatcgccgatttccagaaacattatcagactgaagcggagcgttttcatattctgccaccggggatttatcctgatcgtaaatatagccagcagccagctaatagccgtgaaatcttccgtaagaagaatggaataaccgaacaacaatatttattgttgcaggtcggttcagacttcacgcgtaaaggtgtcgatcgttccattgaagcacttgcttcgttaccggattcgctgcgccacaacacattgctatatgttgttggacaggataagccgcgaaaatttgaggcgctggcagaaaaacgcggcgtgcgcagtaatgttcacttcttctcggggcgcaacgatgtctcggaattaatggcggcggcggatttattactgcatcctgcctaccaggaagcagcgggaattgtgctactggaagcgattactgcaggattaccggtactaacaacagccgtttgtggctatgcgcattatattgtcgacgccaattgcggcgaggctattgctgagccattccgccaggaaacattgaatgagattttacgcaaagcgttaacgcaatcttcattgcgccaggcctgggcggaaaatgcgcgacattatgctgatacacaagatttatacagtctgccagagaaagcggcggatatcataacgggtggtctggatggttga

SEQ ID NO: 485112 - DNA, 798 bp, Shigella sonnei
atggttgaacttaaagagccgtttgccacgttatggcgcggtaaagatccttttgaggaagttaaaaccttgcagggtgaggtttttcgtgaactggaaactcgccgcactctgcgatttgaaatggcgggcaaaagctattttctcaaatggcatcgcggcacgaccctgaaagagataatcaaaaatttactctcattgcggatgccagtattaggcgcagaccgcgaatggaatgcgattcatcgactgcgggatgtcggcgttgatactatgtatggggtggcatttggcgaaaaaggtattaatccgctgagcagaacctcgtttattattaccgaagatctgaccccaaccatcagtctggaagattactgtgctgactgggcgaccaacccaccagatgttcgcgtaaagcgtatgcttattaagcgtgtcgcgacgatggtgcgcgatatgcatgctgtgggcattaaccaccgtgactgttatatctgtcatttcctgctgcacttgcctttttccggtaaggaagaggagttaaaaatttcggtaattgacctgcaccgggcgcagcttcgcacgcgcgttccacgtcgttggcgcgataaagatcttattgggctttatttttcttcgatgaatatcggcctgactcagcgggatatctggcggtttatgaaagtgtattttgtcgccccgcttaaagacattctcaagcaggaacaaggactgctgtcgcaagcagaagcaaaagccacaaaaatcagggaaagaacgattcgaaaatcgttgtaa

SEQ ID NO: 485113 - DNA, 1017 bp, Shigella sonnei
atgagtgcccactattttaatccacaagagatgatcaataagacaatcatcttcgatgaaaggccagcggcgtcagtggcatcatcattccatgttgcttatggcattgataaaaactttctttttggttgtggtgtttcaatcacgtcagttttgttacataacaacgacgtgagttttgttttccacgtttttattgatgatatccctgaagccgatatccagcgtttagcccaattggcgaaaagctatcgtacctgtatccagatccatctggtaaattgtgaacggcttaaggcattaccgacgaccaaaaattggtctattgccatgtatttccgttttgtaattgcagattactttattgatcaacaagataagatcctttacctggatgctgatatcgcctgtcagggaaacttaaagccgctgataacaatggatcttgccaataacgttgctgctgttgttactgaacgcgatgctaactggtggtcgttacggggtcaaagtctgcagtgtaatgaacttgaaaagggttactttaattcaggtgtcctgttaattaatacactagcgtgggcgcaggagtccgtttctgctaaagcgatgtcgatgcttgctgataaagccgtcgtttcccgtttaacctatatggatcaagatatacttaatcttatcctgtcagggaaagttaaattcattgatgctaaatacaatactcaatttagtttaaattatgaattaaaaaaatcatttgtttgtccaattaatgatgaaaccgtattaattcattatgtcggcccgacaaaaccctggcattactgggccggttatccaagtgcgcaaccttttatcaacgccaaagaagcatcgccctggaaaaatgaaccgtttatgcggccaattaattcaaactatgctcgttattgcgccaagcataattttaaacaaaatgaaccaattaacgggataatgaattatatttattatttttatttaaagataataaaatga

SEQ ID NO: 485114 - DNA, 234 bp, Shigella sonnei
gtgcggattcgtgatgccgaagggcgaattgcggcagaaggggcgttgccttatccacctggcgtgctttgcgtggttcccggggaagtctggggtggggcggttcaacgttatttccttgcgctggaagaaggcgtgaatttgttgccgggattttcgccggagttgcaaggtgtctatagcgaaaccgatgcggatggcatgaaacgattgtacggttatgtgttgaagtaa

SEQ ID NO: 485115 - DNA, 1257 bp, Shigella sonnei; identical to SEQ ID NO: 473438

SEQ ID NO: 485116 - DNA, 1080 bp, Shigella sonnei
atgaaaaaatatctcgcgctggctttgattgcgccgttgctcatctcctgttcgacgaccaaaaaaggcgatacctataacgaagcctgggtcaaagataccaacggttttgatattctgatggggcaatttgcccacaatattgagaacatctggggattcaaagaggtggtgatcgccggtcctaaggactacgtgaaatacaccgatcaatatcagacccgcagccacatcaacttcgatgacggtacgattactatcgaaactatcgccgggacagaacctgccgcgcatttgcgccgggcaattatcaaaacgttgctgatgggtgacgatccgagttcggtcgatctctattccgacgttgatgatattacgatttcgaaagaacctttcctttacggtcaggtggtggacaacaccgggcagccgattcgctgggaaggtcgcgcaagcaacttcgcggattatctgctgaaaaaccgtctgcaaagccgcagtaacgggctgcgtatcatctacagcgtcaccattaacatggtaccgaaccaccttgataaacgtgcgcacaaatatctcggcatggtccgccaggcgtcacggaaatatggcgttgatgagtcgctgattctggcaattatgcagaccgaatcttcctttaacccgtatgcggtcagccgttccgatgcgctgggattaatgcaggtggtacaacatactgccgggaaagatgtgttccgctcgcaggggaaatccggcacgccgagccgcagtttcttgtttgatcctgccagcaatattgataccggcaccgcgtatctggcgatgctgaacaatgtttatctcgacggaattgataacccaacatcgcggcgttatgccgtcatcaccgcctataacggcggcgcaggcagcgtgctgcgagtcttttcgaatgataagattcaggctgccaatattattaacaccatgacgccgggcgatgtttatcagacgctgacgacccgccatccctctgcggaatctcgccgttatctttataaagtgaataccgcgcaaaaatcctaccgccgccgataa

SEQ ID NO: 485117 - DNA, 276 bp, Shigella sonnei
atgagcagaacgattttttgtactttcctgcaacgtgaagcagaaggtcaggattttcagctgtaccccggcgagctgggaaaacgcatctataacgagatctccaaagaagcctgggcgcagtggcagcacaagcaaaccatgctgattaatgaaaagaaactcaacatgatgaatgccgagcaccgcaagctgcttgagcaggagatggtcaacttcctgttcgagggtaaagaggtgcatatcgagggctatacgccggaagataaaaaataa

SEQ ID NO: 485118 - DNA, 1053 bp, Shigella sonnei
atgcaagcgtcgcaattttcagcccaggttctggactggtacgataaatacgggcgaaaaacgctgccctggcaaattgacaagacgccctacaaagtatggctctcagaagtgatgttgcaacaaactcaggttgcgaccgttatcccctattttgaacgctttatggcgcgcttcccgacggtgaccgatctcgccaatgcgccgctcgacgaagttctccacttgtggaccgggcttggctattacgcccgcgcgcgcaatctgcataaagcggcacaacaagtggcgaccttacacggcggtaaattcccggaaacctttgaagaagtcgcggcgttaccgggcgtcgggcgttccaccgcaggcgcgattctctcgctttctctgggtaagcactttccgattctcgacggtaacgtcaaacgcgtgctggcgcgctgctatgctgtaagcggctggcctgggaaaaaagaggtcgagaataaattatggagtttgagcgagcaggtgacgcccgcggtcggcgtggaacggtttaatcaggcgatgatggatttgggcgcgatgatttgtacgcgctcgaagccgaaatgttcgctctgtccgctacaaaacggatgtattgccgccgccaataatagctggtcgctttatccgggcaaaaaaacgaaacagacgctgccggagcgcaccggctactttttgctgttacagcacgaagatgaagtattgctggcgcagcgtccgccgagcggattgtggggcggtttatactgtttcccgcagtttgccgacgaagaaagtttgcggcagtggctggcgcaacggcagattgctgtcgataacctgacgcaactgaccgcgtttcggcataccttcagccatttccacttagatattgtgcctatgtggcttcccgtgtcgtcattcaccggctgcatggatgaaggcaatgcgctctggtataacttagcgcaaccgccgtcagttggcctggcggctcccgtggagcgtttgttacagcagttacgcactggcgcgccggtttag

SEQ ID NO: 485119 - DNA, 720 bp, Shigella sonnei
atgaaaaacgacgtcatttcaccggaatttgatgaaaacggccgcccactgcgccgtatccgtagttttgtgcgccgccaggggcgactgaccaaaggccaggaacatgcgctggaaaactactggccggtgatgggcgttgagttcagcgaagatatgctggatttccccgcgctttttggccgtgaagcgccggtgacgcttgagattggttttggcatgggggcgtcgctggtggcaatggctaaagatcgccctgagcaggacttcctcggcattgaagtgcattcaccgggcgttggtgcgtgcctggcttctgcgcatgaagaaggtttaagcaacctgcgcgtgatgtgtcacgatgcggttgaagtgctgcataaaatgattcctgacaattcattgcgcatggtgcagctctttttccctgacccgtggcacaaagcgcgccataataaacgccgtatcgtacaggtgccgtttgccgaactggtaaaaagcaaactgcagctggggggtgtattccatatggcgaccgactgggaaccttatgcggaacatatgcttgaagtgatgtcttctattgacggttataaaaacctgtcagagagcaatgattacgtgccgcgtccggcatcacgtccggtgacgaaatttgaacaacgtggtcatcgtcttggtcacggagtatgggacttaatgttcgagagggtgaaataa

SEQ ID NO: 485120 - DNA, 327 bp, Shigella sonnei; identical to SEQ ID NO: 458460

SEQ ID NO: 485121 - DNA, 720 bp, Shigella sonnei
atgatgcgcaaaatgctgctggcggcagcactttcagtgacggcaatgaccgctcacgccgactaccagtgcagcgtcacgccgcgtgacgatgtgattgtcagcccgcaaaccgtgcaggtgaagggcgaaaacggcaatctggtgatcacgccagacggcaacgtgatgtataacggtaagcaatattccctgaatgccgcccagcgcgagcaggcgaaggattatcaggctgaactacgcagcacgctgccgtggattgatgaaggcgcgaaaagccgcgtcgaaaaagcccgtattgcgctggataaaattatcgttcaggagatgggcgaaagcagcaaaatgcgcagccgtctgaccaaacttgatgcgcagctgaaagagcagatgaaccgcattatcgaaacgcgcagcgatggcctgacgtttcactataaagccattgatcaggttcgcgccgaaggccagcaattagtgaatcaggcaatgggtggaattttacaggacagcattaatgaaatgggcgcgaaagcggtgctgaaaagcggcggtaacccattacagaatgtgctgggaagcctgggggggctgcaatcctcaatccaaacagagtggaaaaagcaggaaaaagatttccagcagtttggcaaagatgtttgtagccgcgttgtgactctggaagatagccgcaaagccctggtcgggaatttaaaataa

SEQ ID NO: 485122 - DNA, 1047 bp, Shigella sonnei
atggagtttttcaaaaagacggcacttgccgcactggttatgggttttagtggtgcagcattggcattacccaatatcaccattttagcaaccggcgggaccattgccggtggtggtgactccgcaaccaaatctaactacacagcgggtaaagttggcgtagaaaatctggttaatgcggtgccgcaactaaaagacattgcgaacgttaaaggcgagcaggtagtgaatatcggctcccaggacatgaacgataatgtctggctgacactggcgaaaaaaattaacaccgactgcgataaaaccgacggcttcgtcattacccacggtaccgacacgatggaagaaaccgcttacttcctcgacctgacggtgaaatgcgacaaaccggtggtgatggtcggcgcaatgcgcccgtccacgtccatgagcgcagacggtccattcaacctgtataacgcggtagtgaccgcagctgataaagcctccgctaatcgtggcgtgctggtggtgatgaacgacaccgtactggacggtcgcgatgtcaccaaaaccaacaccaccgacgtagcgaccttcaagtctgttaactacggtcctctgggatacattcacaacggtaagattgactaccaacgtaccccggcacgtaagcacaccagcgatacgccattcgatgtctctaagctgaatgagctgccgaaagtcggcatcgtttataactacgctaacgcatccgatcttccggctaaagcactggtagatgcgggctatgatggcatcgttagcgctggtgtgggtaatggtaacctgtataaatccgtgttcgacaccctggcaaccgccgcgaaaaacggcactgcagtagtgcgttcttcccgcgtaccgacgggtgctaccactcaggatgctgaagtggatgatgcgaaatacggcttcgtcgcctctggcacgctgaacccgcaaaaagcgcgcgtcctgctgcagctggctctgacgcaaaccaaagatccgcagcagatccagcagatcttcaatcagtactaa

SEQ ID NO: 485123 - DNA, 480 bp, Shigella sonnei
gtgaaaaagcaatggattgttggcacggcactgcttatgttgatgactggtaatgcctgggcagatggcgaaccgccaactgaaaatatcttaaaagatcaattcaaaaagcagtatcacggcattctcaagcttgatgctatcaccttaaaaaatcttgatgctaagggtaatcaggccacctggtcagcggaaggcgatgtctcttccagtgacgatctctatacctgggtcggtcagttggcagattacgaactgctcgaacagacctggacgaaagataaaccggtaaaattctcggcgatgttaaccagtaaaggaacgcccgcgtctggctggtcggtgaacttttactcttttcaggcggcagccagcgatcgtgggcgggtggtcgacgatatcaaaacgaataataaatatctgatcgtgaatagcgaagatttcaattatcgcggtgatgctgccaacttactgatttag

SEQ ID NO: 485124 - DNA, 522 bp, Shigella sonnei
atgtctgaccgcgccactaccacagcttccttaacattcgagtcgctttatggcacacatcacggctggttgaaaagctggctgacgcgcaaactccagtctgcttttgatgcagatgacattgcccaggacacttttttgcgggtaatggtcagcgaaacgctctcgacgatccgcgatcctcgctccttcctctgcactatcgccaaacgcgtgatggtggacctgtttcgccgaaacgcgctggaaaaagcgtatctggagatgctggcgcttatgccggaggggggagcgccttcacctgaggaacgcgaaagccaactcgagaccctacaactcctcgacagcatgctggacgggctaaacggcaaaacacgtgaagcgtttctgctttcgcaactggatggtctgacatacagcgagattgcgcacaaactcggtgtttccatcagctccgtgaaaaaatacgtggcgaaagccgtcgagcactgcctgctgttccgtctggagtatgggttatga

SEQ ID NO: 485125 - DNA, 954 bp, Shigella sonnei
atgaatcctttgttaaccgattcccgccgtcaggcgctgcgttcagcttcccactggtatgccgtgctaagcggcgagcgcgtcagcccacaacaggaagcgcgctggcaacagtggtatgaacaggatcaggataaccagtgggcctggcagcaggttgaaaacctgcgcaaccagcttggcggtgtgcctggcgacgttgccagccgggcgttgcacgatacccgcctcacccgccgtcacgtgatgaaaggattactgctgttgctcggcgctggcggaggctggcagctctggcagtcggaaaccggcgaaggtctgcgggcagattaccgcaccgccaaaggcacagtcagccgtcagcaactggaagatggctccctgctcacgctgaatacccaaagcgcggcggatatgcgttttgatgcgcatcagcgcaccgtccggctctggtacggtgaaatcgccattactaccgcgaaagatgccctgcaacgccccttccgtgtcctgacccgtcagggccagctcactgctttagggacagaatttaccgtccgccagcaggataatttcacgcagcttgacgtgcagcagcacgccgtggaagtgcttctcgccagtgcccccgcgcaaaaacgcatcgtgaacgctggtgaaagcctgcagttcagcgcctctgagtttggcgcagtgaaaccgctggatgacgagagtacaagctggacgaaggacatcctgagcttcagcgataaaccgctgggtgaggtgatagccacgctaacccgttaccgcaacggcgtgctgcgctgcgatcccgccgttgccgggctgcgcctgagcgggacgttcccgctgaaaaataccgatgcgatcctgaacgttatcgcgcaaacgcttcccgttaaaattcagtctattacgcggtactggataaacatttcaccactgtaa

SEQ ID NO: 485126 - DNA, 2325 bp, Shigella sonnei
atgacgccgttacgcgtttttcgtaaaacaacacctttggttaacgccattcgcctgagcctgctgccgctggccggtctctcgttttccgcttttgctgcacaggttaatatcgcaccgggatcgctcgataaagcgctcaatcagtatgccgcacacagcggatttaccctctcggttgacgccagcctgacgcgcggcaagcagagcaacggcctgcacggcgattacgacgtcgagagcggcctgcaacaactgctggacggcagcggactgcaggtaaaaccgctgggaaataacagctggacgctggagcccgcgcccgcaccaaaagaagatgccctgaccgtggtcggcgactggctgggtgatgcgcgtgaaaacgacgtatttgaacatgctggcgcgcgtgacgtgatccgccgtgaggatttcgccaaaaccggcgcaaccaccatgcgtgaggtacttaaccgcatccctggcgtcagcgcgccggaaaacaacggcaccggcagccacgacctggcgatgaactttggcatccggggcctgaacccgcgcctcgccagccgctcgaccgtcctgatggacggcatccccgtccccttcgccccttacggtcagccgcagctttcactggctcccgtttcgctcggcaacatgaatgccattgacgtggtacgcggtggtggtgcggtgcgttacggaccgcagagcgtgggcggcgtggtgaactttgttacccgtgccattccgcaggactttggtatcgaggcgggcgtggaaggtcagctcagcccaacctcttcacaaaacaacccgaaagagacgcacaacctgatggtgggcggcacagcggacaacggttttggcaccgcgctgctctactccggcacgcgcggcagtgactggcgcgagcacagcgccacccgcatcgacgacctgatgctgaaaagcaaatatgcgccggatgaggtgcacaccttcaacagcctgctgcaatattacgacggtgaagccgacatgcccggtggcctgtctcgcgcggattacgacgccgatcgctggcaatccacccgcccgtatgaccgcttctggggtcgtcgcaagctggcgagcctgggctaccagttccagccagacagccagcataaattcaacattcaggggttctacacccaaaccctgcgcagcggctacctggagcaaggcaaacgcatcaccctctcgccgcgtaactactgggtgcgcggtattgagccacgctacagccagatctttatgatcggcccttccgcgcacgaagtgggcgtgggctatcgctatgtgaatgaatcaacgcatgaaatgcgttactacaccgccaccagcagcgggcagttgccgtccggctcaagcccttacgaccgcgatacgcgttccggcaccgaggcgcacgcctggtatctggatgacaaaatcgacatcggcaactggaccatcacgccgggtatgcgtttcgaacatatcgagtcataccagaacaacgccatcacaggcacgcacgaagaagtgagctataacgcaccgcttccggcgttgaacgtgctctatcacctgactgacagctggaatctttatgcaaacactgaaggctcgttcggcaccgtacagtacagccagattggcaaggctgtgcaaagcggcaatgtggaaccggaaaaagcgcgaacctgggaactcggtacccgctacgacgacggcgcgctgacggcggaaatggggctgttcctgattaactttaacaatcagtacgactccaaccagaccaacgacaccgtcactgcacgtggcaaaacgcgccataccgggctggaaacgcaggcacgttacgatctgggtacgctaacgccaacgcttgataacgtttccatctacgccagctatgcgtatgtgaacgcggaaatccgcgagaaaggcgacacctacggcaatctggtaccattctccccgaaacataaaggcacgctgggcgtggactacaagccaggaaactggatgttcaatctgaacagcgatttccagtccagccagtttgcggataacgccaatacggtgaaagagagcgccgacggcagtaccggccgcattcccggcttcatgctctggggcgcacgcgtggtgtatgactttggcccgcagatggcagatctgaacctggcattcggtgtgaaaaacatcttcgaccaggactacttcatccgctcttatgacgacaacaacaaaggcatctatgcaggccagccgcgcacgctgtatatgcagggggcgttgaagttctga

SEQ ID NO: 485127 - DNA, 903 bp, Shigella sonnei
atgttggcatttatccgttttctttttgcaggcctgctgctggtgatcagccacgcctttgccgccacggttcaggacgaacacggcacgtttacactcgaaaaaacgccacaacggattgtggtgctggaactctcgttcgccgatgcgctggccgccgtggacgtcagcccgatcggtattgccgacgataacgatgcaaaacgcatcctgcccgaagtgcgtgcgcacctgaaaccgtggcagtccgtcggaacgcgcgcgcagccgagcctggaagccattgccgctctgaaaccagacctgatcattgccgacagcagtcgccatgcgggggtttacatcgccttgcagcaaatcgcgtcggtactgctgcttaagtcccgcaacgaaacctacgctgaaaatttgcaatctgcggctatcatcggcgaaatggtgggtaaaaagcgagagatgcaggcacgtctggaacaacataaagagaggatggcgcagtgggccagccagcttcccaaagggacacgcgtggcctttggcacatcacgcgaacagcaattcaacctgcatactcaggagacctggaccggcagcgtgctggcctctctggggctgaacgttcccgctgcgatggcgggtgcgtccatgccgtccatcggcctggagcaactgctggcggtcaatcctgcctggctgctggttgcccactatcgcgaagagagcattgttaaacgctggcaacaagatccgctctggcagatgttaaccgccgcgcagaagcagcaggttgcttcggtcgacagtaacacctgggcgcggatgcgcggtatttttgctgcagagcgtattgccgctgacacggtaaaaatcttccaccatcagccgcttaccgttgtgaaatga

SEQ ID NO: 485128 - DNA, 999 bp, Shigella sonnei
atgaccgcgataaaacacccggtgctgctgtgggggcttcccgttgcagcacttattattattttctggctgagtctgttttgctactcggccattcctgtttccggagcagatgcaacccgcgccctgctgcctggacacacgccaacgctaccagaagcgctggtgcaaaaccttcgtttgccacgaagcctggtcgccgttctgatcggcgcaagcctggcgctcgcgggcacgctgctgcaaaccctgacccacaacccaatggcctctccttcactgctcggcattaacagcggcgcggcgctggctatggcgcttaccagcgcgctgagtccgacgccgattgcaggctattctctgtcgttcatcgcggcatgcgggggcggcgtgagctggctgctggtcatgaccgcaggaggcggatttcgtcatacccatgacagaaacaaactgatcctcgcgggtatcgcgctgtcggccttttgtatgggccttacccgcatcaccctgctgctggccgaagatcatgcttacggcatcttttactggctggctggcggagtgtcccacgcccgctggcaggatgtctggcagctcttgccggtggtggtcactgcagtccctgtcgtgttgctgctggcgaatcaactgaacctgctcaacctcagcgacagcaccgcccatacgctgggagtgaacctgacgaggctacgtttggtcatcaatatgttagtgctgcttctggttggtgcgtgcgtcagcgtggcaggtccggtggcgtttatcggtctgctggtgccacatctggcgcgcttctgggcaggcttcgatcagcgcaacgtactgccagtgagcatgctgctgggggccacgctgatgctgctggcagatgtactcgcacgcgcgctggccttccccggagatctgcccgcaggcgcagtgctggcgctgattggcagcccttgctttgtctggcttgtgaggaggcgaggatga

SEQ ID NO: 485129 - DNA, 957 bp, Shigella sonnei
atgaaaattgcgctggttattttcatcacccttgccctggcgggctgtgcgctgttatcactccatatgggagtgatccccgtgccgtggcgcgcgctgctgaccgactggcaggccggacgcgagcattattatgtattgatggagtaccgactgccgcgcttgctgctggcactgtttgtcggtgcagccctcgccgtggcgggcgtgctgatacaggggattgtgcgcaaccctctggcatcaccggatattctcggcgttaaccatgccgccagcctggcctctgtgggggctctacttcttatgccgtcactgcccgtgatggtgctgccgctgctggcctttgcgggcggcatggcggggttgatattgctgaagatgctggcaaagacccaccagccgatgaagctggcactcaccggcgtggcgctttctgcatgctgggccagcctgacggattatctgatgctctcgcgcccgcaggatgtgaacaacgccctgctgtggctgaccggcagcttatggggccgtgactggagctttgtgaagattgccatcccgctgatgattttatttctgccgctgagcctgagtttttgccgcgatctcgacctccttgcactcggcgatgcgcgcgccaccacgctcggtgtgtcggtgccctatacccgattctgggctttgttactagctgtcgccatgacatctaccggcgtggccgcctgcggcccgattagctttattggtctcgtggtgccgcatatgatgcgtagcatcaccggtggacgtcaccgcagactgctgcctgtttcggccctgacaggtgcgttgctgttggtggttgccgatctgctggcgagaattattcatcccccactggagctcccggttggcgtgctgaccgccattatcggtgcgccgtggtttgtctggttgcttgtgagaatgcgataa

SEQ ID NO: 485130 - DNA, 768 bp, Shigella sonnei
atgactttacgaactgaaaatctgacggtcaattacggaacagacaaggtacttaacgacgtttcactctcactgccaacggggaagatcaccgccctgatcggtcctaacggttgcgggaaatcgacgctgttaaactgtttttcgcggcttttaatgccgcagtctggcaccgtatttctcggcgataatcccataaatatgctctcatcgcgccagttggcccgcaggctttcgctgctgcctcagcaccatttaacgccagaggggatcacagtccaggagctggtttcgtatggtcgtaatccctggctgtcactctgggggcgtctctccgctgaagacaatgcacgagttaatgtcgccatgaaccagacccggatcaatcatcttgccgttcgtcggttaaccgagctttccggcggtcagcgccagcgcgcatttctggcaatggtcctggcccagaatacgcccgttgtattacttgatgagccaaccacctatcttgatatcaatcaccaggtggacctgatgcggttgatgggcgaactccggactcaggggaaaacggtggtcgctgtgctgcacgaccttaatcaggctagccggtactgcgatcaactggtggtaatggcaaacggacatgttatggcgcaaggcacaccagaagaggtgatgaccccaggattgctgagaacagtattcagcgtggaagcggaaatacaccccgagccggtatctggcaggccgatgtgcctaatgaggtag

SEQ ID NO: 485131 - DNA, 342 bp, Shigella sonnei
atgttccaggttaattttgttagttcaacacaaaacgccacaatctcctgggattatttactaaaaataacgcctgttttaataagcattagcgatatgtattctgaagaaaaaatcaagtttgtcgaaagttgtttaaatgagcttggagacattaccgaagaacaattaaaaattatgagatttgcaattataaaatctataccaagggcaactcttacagataaattagaaaatgaattaacaaaagaaatatataaaagctcatcgaaaatcaacaattgcttgaacagaattaaattaccagagatgaaagaattctcatcagaaaaaaatatatga

SEQ ID NO: 485132 - DNA, 1146 bp, Shigella sonnei
atgaaaatcgtaatcgccccagactcttataaagaaagtttatctgccagcgaggttgcgcaggcgatagaaaaaggatttcgggaaatttttcctgatgcacagtatgtttctgttccggttgccgacggtggtgaaggaacggtggaagcgatgattgcagccacccagggggctgaacgtcacgcctgggttacagggccgctgggcgagaaagtgaatgccagttgggggatctccggcgatggcaaaaccgcgtttattgaaatggcggcggccagtgggctggagctggtacctgcggaaaaacgcgatccactcgtaaccacttcacgcggcacaggcgagttaatcctgcaggcgctggagagcagtgcaacaaacattattatcggcattggcggcagcgctacaaatgatggcggcgcaggcatggtacaggcgctgggggcgaaattatgcgacgccaacggcaatgaaattggttttggcggcggtagtcttaatactctgaatgatattgatatttccggcctcgatccgcgcttaaaagattgcgtcattcgcgtcgcttgtgatgtcaccaatccgctggtgggcgataacggcgcatcgcgcatctttggcccacaaaagggagccagtgaagcgatgattgttgagctggacaataacctctctcactatgccgatgtcattaaaaaagcgctgcatgttgatgtgaaagatgtccccggcgcaggagctgcgggcggtatgggcgcggcgctgatggcgtttcttggtgcggaactgaaaagtggtattgaaatcgtcactacggcgctgaatctggaagaacatattcacgattgtacgctggtgatcaccggtgaagggcgtattgacagccagagtattcacggcaaggtaccgattggcgttgcaaacgtggcgaagaagtaccataaaccggtgattggcattgcgggtagcctgaccgatgatgttggcgttgtacatcagcatggcatcgatgcggtcttcagcgtattgaccagcataggtacgttggacgaagcattccgcggggcttatgacaatatctgccgtgcttcacgtaatatcgccgcgacactggcgattggaatgcgcaacgcggggtga

SEQ ID NO: 485133 - DNA, 891 bp, Shigella sonnei
atgactatgaaagttggttttattggcctggggattatgggtaaaccaatgagtaaaaaccttctgaaagcaggttactcgctggtggttgctgaccgtaacccagaagctattgctgacgtgattgctgcaggtgcagaaacagcgtctacggctaaagcgatcgctgaacagtgcgacgtcatcataaccatgctgccaaactcccctcatgtgaaagaggtggcgctgggtgagaatggcattattgaaggcgcgaagccaggtacggtattgatcgatatgagttctatcgcaccgctggcaagccgtgaaatcagcgaagcgctgaaagcgaaaggcattgatatgctggatgctccggtgagcggcggtgaaccgaaagccatcgacggtacgctgtcagtgatggtgggcggcgacaaggctattttcgacaaatactatgatttgatgaaagcgatggcgggttccgtggtgcataccggggaaatcggtgcaggtaacgtcaccaaactggcaaatcaggtcattgtggcgctgaatattgctgcgatgtcagaagcgttaacgctggcaaccaaagcgggcgttaacccggacctggtttatcaggcaattcgcggtgggctggcgggcagtaccgtgctggatgccaaagcgccgatggtgatggaccgcaacttcaagccgggcttccgcattgatctgcatattaaggatctggcgaatgcgctggatacttctcacggcgtcggcgcacaactgctgctcacagctgcggttatggagatgatgcaggcactgcgtgcagatggtttaggaacggcggatcatagcgccctggcgtgctactacgaaaaactggcgaaagtcgaagttactcgttaa

SEQ ID NO: 485134 - DNA, 771 bp, Shigella sonnei
atgaataacgatgttttcccgaataaattcaaagccgcactggctgcgaaacaggtacaaattggttgctggtcagcactctctaacccgattagcactgaagttcttggtttggctgggtttgactggctggtgctggatggcgaacatgcgccaaacgatatttccacgtttattccgcagttaatggccctgaaaggcagcgccagcgcgccagtagtgcgagtgccgaccaacgagccggtaattattaagcgtcttctggatatcggtttctataacttcctgattccttttgtagaaacaaaagaggaagcagagcaggcggtggcatcaactcgttacccgccggaaggcattcgcggcgtctccgtttctcaccgcaccaatatgtttggcaccgtggcggattatttcgctcagtcgaacaagaacattactattctggtccagatagaaagtcagcagggcgtagataacgtcgatgctattgccgctaccgaaggtgtagacggtatcttcgtcggccccagcgatctggctgcggcattgggccatctcggcaatgcctcgcatccggatgtacaaaaagcaattcagcatatttttaaccgtgccagcgcgcacggcaaacccagcggtattctcgcgccggtcgaagccgatgcgcgtcgttatctggaatggggcgcgacgtttgtggctgtcggcagcgatcttggcgtcttccgctctgccactcagaaactggctgatacctttaaaaaataa

SEQ ID NO: 485135 - DNA, 1335 bp, Shigella sonnei
atgattctggacaccgttgacgtaaaaaagaaaggcgtgcataccagctatttaatattactgattatttttattgttaccgccgttaactacgccgatcgtgcaacgctgtctattgctggtaccgaagtggcaaaagagttgcagttaagtgcggtttcgatgggttacatcttctctgcttttggctgggcctacttgctgatgcaaatccccggcggctggttgcttgataagtttggctcgaaaaaagtttacacctacagcctctttttctggtcgctgttcaccttcctgcaaggctttgttgatatgttcccgctggcctgggcagggatctccatgttctttatgcgctttatgctggggttctcggaagcgccatcattcccggcgaacgcccgtattgtcgccgcctggttcccgacgaaagaacgtggtactgcctccgccatctttaactcggcgcaatatttctcgctggcgctcttttcgccgctgcttggctggctgactttcgcttggggctgggagcacgtcttcaccgttatgggggggattggttttgtgctgacggcgctgtggatcaagttgattcataacccgacagatcacccacgtatgtctgcggaagagctgaagtttatctctgaaaatggcgcggtggtcgatatggaccacaaaaagccgggcagcgcggcagcaagcggtcccaaactgcattacatcaagcaattgctctctaaccgcatgatgttgggcgtatttttcggacaatattttatcaacaccatcacctggttcttcctcacctggttcccgatttatctggtgcaggaaaaaggcatgtcgattctgaaagtgggtctggtcgcctcgattccggcactgtgtggttttgcgggcggcgtgctgggaggtgtcttctcggattatctgatcaaacgcggtttatccctgaccctggcacgtaagctaccgattgtgctgggaatgttgctggtttccaccatcatcttatgtaactacaccaacaacaccacgctggtggtcatgctgatggcgctggctttttttggcaaaggatttggtgctctgggctggccggtgatttctgacaccgcgccgaaagagattgttggcctctgtggcggcgtctttaacgtctttggcaatgttgcctccattgtcactccactggtgattggctacctggtaagtgaactgcactccttcaatgcagcactggttttcgtgggatgttcagcgctgatggcgatggtctgctacctcttcgtagttggcgacattaaacgtatggaattgcagaaataa

SEQ ID NO: 485136 - DNA, 1572 bp, Shigella sonnei
atggccaacatcgaaatcagacaagaaacgccaactgcgttttatataaaagttcacgacacagataatgtggcaattattgttaatgataatggcctgaaagcaggaacgcgttttccggatgggctggaattaattgaacatactccccaggggcataaagtcgcattgctggacattccagctaatggtgaaattattcgttatggcgaagtgattggttacgccgtgcgcgcaatcccacgcggaagctggatcgacgaatcaatggttgtactaccggaagcgccgccgttacacacgctgccactggcaaccaaagtcccggcccccttaccgccgctggaaggatacacctttgagggctatcgcaatgccgatggcagcgtgggcaccaaaaacctgctcggcatcaccaccagcgtccactgtgtggcaggcgtggtggactatgtagtaaaaatcattgaacgcgatctgctaccgaaatacccgaacgtcgatggcgtggtggggctgaatcatttgtacggctgtggcgtggcgattaacgcaccggcggcagttgtgcctattcgtaccatccacaatatttcgctgaaccctaactttggcggcgaagtaatggtgattggtctgggttgtgaaaagttgcagcctgagcgcctgctggtcggcacggatgatgtgcaagctattccagtagaaagcgccagcattgtcagtttgcaggatgaaaagcatgtcggctttcagtccatggtcgaggatattttgcaggtcgccgaacgccatctacaaaaactgaatcaacggcagcgagaaacctgcccggcttcagaactggtcgttggtgtgcagtgcggtggcagcgatgcgttttctggtgtaacggcaaacccggcggttggctatgcgtctgatctactggtgcgctgcggcgcaacggtgatgttttcagaagtaacggaagtgcgtgacgcgatccatctgctgacaccacgcgcagtgaacgaagaggtcggcaaacggctgctggaggagatggagtggtacgataactatctcaatatgggaaaaaccgaccgcagcgccaacccttcgccgggcaacaagaaaggcggtctggcaaatgtggtggagaaggcactcggctccattgctaaatcgggtaaaagtgcaattgttgaagtgctgtcgcccggtcaacgcccgactaaacgcggattaatttacgccgcgacgccagccagcgattttgtctgtggcacgcaacaggtggcttcgggtatcaccgtacaagtgtttacgaccggccgtggtacgccgtacggcctgatggcggtacccgtaattaaaatggcaacccgcaccgagctggcgaaccgctggtttgatttaatggatattaacgcgggcactatcgctaccggcgaagagagcattgaagaggtgggctggaagttgttccactttattctcgacgtcgccagcgggaagaagaaaaccttctcggatcaatgggggctgcataaccagctggcggtgtttaacccggcaccggtgacctga

SEQ ID NO: 485137 - DNA, 696 bp, Shigella sonnei
atggataatcggagcgaatttttgaataacgttgctcaggcactgggtcgcccgctgcgacttgaaccgcaagcagaagatgcgccgcttaacaactatgctaacgagcggcttacccaacttaaccaacagcagcgctgtgacgcgtttattcagtttgccagcgatgttatgttgacgcgctgtgagctgaccagcgaggcgaaggcggcagaagctgcaatacgtctgtgtaaagagctgggagatcagtcggtcgtgattagcggtgacacgaggctggaggaattggggattagtgaacgtttgcagcaggaatgcaatgccgttgtttgggatccggcgaaaggtgccgagaatatctcgcaggcagagcaggctaaagtgggtgtcgtgtatgctgaatatggtttaaccgaatcgggaggcgtggttcttttttccgccgtcgagcgcgggcgttcattgagcctgctcccggaatcttctctttttatcctgcgtaaaagcacaatcctgccgcgtgtagcgcaactcgcagaaaaattgcatcagaaagcgcaggccggtgaacgaatgccgtcatgtattaacatcatcagtggtcccagctcaacggcggatattgagcttatcaaagtcgtcggggttcatggtccggtgaaagcggtgtatctgattattgaggattgctga

SEQ ID NO: 485138 - DNA, 1428 bp, Shigella sonnei
atgtcgatcaaaaccagtaatacagattttaagacacgcatccgtcagcaaattgaagatccgatcatgcgcaaagcggtggcaaacgcgcagcagcgtattggggcaaatcggcaaaaaatggtcgatgaattggggcactgggaggagtggcgcgatcgggccgcccagatacgtgatcatgttctgagtaatctcgacgcttatctgtaccagctctcagaaaaagtgacgcaaaacggcggtcacgtctggtttgcaaaaaccaaagaagacgctacccgctacattttacaggttgcccaacgcaaaaatgcccggaaggtggtgaaatctaaatcgatggtgaccgaagagattggtgtcaatcatgtgttgcaggatgctggcattcaggtgattgaaaccgatctgggtgaatatattctccagctggatcaagatccgccatctcatgttgtggtcccggcaattcataaagatcgccatcagatccgtcgagtgctacacgaacgtctgggctatgaggggccggaaacgcctgaagcgatgaccttattcatccggcaaaaaatccgcgaagatttcctcagtgctgaaataggtattaccggctgtaatttcgcggtggcagagacaggttcggtatgcctggtgaccaatgaaggtaatgcgcgaatgtgtaccacgctgcctaaaacgcatattgctgtgatgggaatggagcgtattgcccccacgtttgccgaggtagatgtattgatcaccatgctggcgcgcagtgccgttggtgcacgtttgacgggatacaacacctggctgacaggaccgcgcgaagcggggcacgttgatggtcctgaagagtttcatctggttattgtcgataacgggcgttctgaggtgctggcctctgaatttcgggatgtgctgcgctgtattcgctgcggggcttgtatgaatacttgtccggcatatcgccatattggcggtcatggatatggctctatttatccagggccaattggtgcggtgatttctccgctacttggcggctataaagattttaaagatttaccctacgcctgctctttatgcactgcttgtgacagcgtgtgtccggtgcgtattccgctgtcaaaactgattttgcgtcatcgtcgggtgatggctgaaaaagggatcaccgcaaaagcagagcaacgggcgataaaaatgttcgcttatgccaatagtcatccaggattgtggaaagtcgggatgatggccggcgctcatgcggcaagctggtttatcaatggcggcaaaacaccactcaaatttggcgcgattagcgactggatggaagcacgcgatcttcctgaagctgacggagagagtttccgtagttggtttaagaaacatcaggcgcaggagaaaaagaatggataa

SEQ ID NO: 485139 - DNA, 720 bp, Shigella sonnei
gtgaatgtcaatttctttgtcacctgtattggtgacgccctgaaatcaagaatggcacgagactccgtgctgctactggaaaaactcggctgtcgcgtaaatttcccggagaaacagggatgctgcggtcagcctgcgatcaatagcggttatatcaaagaagcgattccagggatgaaaaatctgatcgccgcactggaggataacgacgatcccattatttcaccggctggctcttgcacctatgccgtaaaaagttacccgacgtatctggcggatgaacctgaatgggcatcacgtgccgaaaaggttgccgcgcgtatgcaggatctcacctcttttattgttaataaattaggggtagtcgatgtaggtgccagtttgcaagggagagctgtgtatcacccatcttgtagcctggcccgtaagctgggagtgaaggacgagccacttacgctgctgaaaaatgtgcgtggactggagctgttgacctttgctgaacaggatacctgctgcggatttggcggcacgttctcggtcaaaatggccgaaatatccggcgagatggtgaaagaaaaggttgtgcacctgatggaagtccgccctgagtatttaattggtgctgacgtgagttgcctgctgaacatcagtgggcgattacaacgggaagggcagaaagtcaaagtgatgcatattgctgaagtgttgatgagccgctga

SEQ ID NO: 485140 - DNA, 855 bp, Shigella sonnei
atggatgcccttagccgtttgttgatgcttaacgctccacaaggaacgatcgataagaattgcgtgttaggaagtgactggcagcttcaacatggtgccggggaattatcggttattcgttggcatgcgttaacgcaaggagcggcgaagctggaaatgccgacgggagagatttttacattacgcccgggaaatgtggtcctgctaccacaaaattcagctcatcgcctgagtcatgtcgataatgaatcgacctgtattgtctgcggcactcttcggttgcaacattcggcgcgttattttttaacgtctttgccggaaacgctgtttttagcaccggttaaccacagcgtggaatataactggctgagggaggcgatcccgtttttacaacaggaatccagatcggcgatgccgggagtggatgcactgtgtagccagatctgcgctacattctttaccctcgcggtgcgtgagtggattgcacaggttaatacagagaaaaacattctcagtttgcttctgcatccacgtcttggtgcggtaatacagcaaatgctggaaatgccaggacacgcctggaccgtcgaatcgctggccagcatcgcccacatgtctcgggcaagttttgcccagcttttccgtgatgtttccggaaccacgccgctggctgtattaacaaagttgcgtctacaaatagcggcccagatgttttcccgggaaatgctccctgttgtggtgatcgctgagtcagtaggctatgccagtgaatcatcttttcacaaggcgtttgtccgcgagtttggttgtactccgggagaatatcgggaaagggtcagacagcttgcaccctga

SEQ ID NO: 485141 - DNA, 1326 bp, Shigella sonnei
atgaataaatatcaggcagttattattggttttggcaaggctggaaaaacattagccgtcacgctggcaaaagcaggttggcgagtggctctcatcgaacaatcaaatgcaatgtatggcgggacctgtattaatatcggctgcatcccaaccaaaacattggttcatgacgcacagcagcacacagattttgtccgtgccatacagcgtaaaaatgaagtggttaattttttacgtaataagaattttcataatcttgcggatatgcccaatatcgacgtgatcgacggccaggcggagtttatcaataatcatagcctgcgtgttcatcggcctgagggaaatctggaaattcatggcgagaaaatttttattaataccggtgcacaaaccgtggttccgccaattcctggaattaccaccacgcctggtgtatatgacagcaccggattacttaatctaaaagaattgcctgggcatttaggtattttgggcggcggatatattggcgttgagttcgcctctatgttcgctaattttggcagcaaggtaaccattttagaagcagcttcgctgtttttgcctcgggaagatcgggatattgctgataatatcgcgacgattttacgcgatcagggcgtcgatattatcctcaatgcccatgtggagcgaatcagtcaccatgaaaatcaagtgcaagtgcatagcgagcacgcccaactggcggtggatgcactgttaatagcttccggtcgtcaaccggctaccgcttcgttacatccagaaaatgccggtatcgcagtaaacgagcgcggggcaattgtcgttgacaagcaattacataccaccgcagacaatatttgggcgatgggagatgttaccggcgggctgcaatttacttatatttcactggatgattaccgcattgtgcgtgatgagttgctgggagaaggcagacgtagtactgatgatcggaaaaatgtgccttattccgtattcatgacaccgccactgtccagggttggtatgacagaagaacaggccagagagagtggtgctgatattcaggtggtgacattgcctgtagctgcaattccgcgtgccagagtgatgaatgatactcgtggggtattaaaagcgattgttgataataaaacccaacgtatattaggggcatcactgctgtgtgttgactcccacgagatgatcaatatagtgaaaatggtgatggatgccgggctgccttatagcatattacgcgatcagatatttactcatccgtcgatgagcgaatcactcaatgatctattttcattagtcaaataa

SEQ ID NO: 485142 - DNA, 594 bp, Shigella sonnei
atggaaaaatacctgcacctgttaagtcggggagataaaattggcctgtcattgattcgtctgagtattgcgattgtttttatgtggattgggttattaaagtttgtcccttacgaggcagacagcattacaccattcgtcgcaaacagtccactaatgtcgttcttttatgaacacccggaagactataaacagtatctgactcacgaaggcgaatacaaaccagaagcaagggcatggcaatcggccaataatacctatggtttttccaacggtcttggcgtcgtggaggtgattattgctctgctggttttggctaatcctgtcaatcgctggttaggtttattgggaggactgatggcatataccacgccgctggtaacactctcatttttaatcaccaccccggaggcatgggtacccgcattgggtgacgctcatcatggtttcccttatttatccggtgctggtcgcttggtattgaaagatactctgatgctggcaggtgctgtcatgataatggcagattcggcgcgggaaattcttaaacaacgcagtaatgaatccagttcaacgttaaaaactgaatattga

SEQ ID NO: 485143 - DNA, 870 bp, Shigella sonnei
gtggaattttccgtattaagtaacaatctgaaaatgccgatgatgggatttggtgtttttcaggttaccgataaaaacgtgtgcaaacagtcagtgttgaacgctatccgcacgggttatcgactcatcgacactgcagcggtatacggtaatgaagatgccgtcggtgaagccgttcgtgaagctatatctgaaggtttatgtacccgagatgagttatttataacgtctaaattgtgggggcaggatatgttgaatcaggatacggcagcagcaggtattgaagcatcattaaaaaaatcgggactagagtacttcgacctctatttattgcaccaggctatgcgcgattatttcagtgtgtggcgtgcactcgaagatgcctatgaagagggcaaattaaaagcaattggggtttccaatttctatcctcatgttctggcgaacttttgtgaaacggtaagagttaaaccgatggtcaaccaggtcgagttgcatccctattttgcccaaccagaggcgctggcaaccatgaagtattataacgtgcagcctgaagcatgggctccgttaggtggtggacgacataaaccctttgaaaataatctgcttcagagtattgcagatgcccatcaaaaatcgatttctcaagtcattctgcgttggaatattcaacggggagtggtcgttattccgaaatcgacacatcaacagcgtatcgaagaaaattttgctatctgggatttctcactgacagagaaagaaatggcacaaattagttcgcttgatttgggttatgttggggagtcggtaaaacattttaatcctgaatttgttcgtggttgtcttgctgtaaaaatacatgattga

SEQ ID NO: 485144 - DNA, 261 bp, Shigella sonnei
gtgcagagtttctttaccaccctgtctaacacggttaaacaagcgaataaagatatcgatgccgccaaattgaaattaaccaccgaaatagccgccatcggagagataaaaacggaaactgaaaccaccagattctacgttgattatgatgatttaatgctttctttgctaaaagaagcggccaaaaaaatgattaacacctgtaatgagtatcagaaaaaacacggtaaaaagacactctttgaggtacctgaagtctga

SEQ ID NO: 485145 - DNA, 447 bp, Shigella sonnei
atgagcgatgtacctttctggcaaagtaaaaccctggacgaaatgagcgatgcggaatgggagtcgttgtgtgatggttgcggtcagtgttgcctgcataaactgatggatgaagacaccgacgaaatctacttcactaacgtcgcctgtcgccagctcaatattaaaacttgtcaatgtcggaactacgaacgtcgtttcgagtttgaacccgactgcattaaattaacccgtgaaaatctgccaacattcgaatggctgccaatgatctgcgcttatcgtttgctggcggaaggtaaagatttacctgcgtggcatccgctacttactggttcgaaagcggcaatgcatggtgaacgtatctctgtgcgtcatatcgcagtgaaagaatcagaagtgattgactggcaggatcatatcttaaataaacctgactgggcgcagtga

SEQ ID NO: 485146 - DNA, 660 bp, Shigella sonnei
atgtatcaacatcacaactggcaaggtgcgctgctggattatccggtgagtaaagtagtctgtgttggcagtaactatgccaaacatattaaagagatgggcagcgcagtgcccgaagagccagtgctgtttattaaaccagaaacggcactgtgcgatctgcggcagccattggcgatcccatccgatttcggttcagttcatcatgaagtcgaactggcggtgttgattggcgcgacgctgcgtcaggcaacggaagagcatgtccgcaaagccattgccggttacggcgtggcgcttgatctgacattgcgtgatgttcagggaaaaatgaagaaagccgggcagccgtgggaaaaggctaaagcgtttgataactcttgtccgctttccgggtttatctccgcggcggaatttaccggcgatccacaaaatacaacgctgggcctgagcgtaaacggcgaacaacgccagcaaggtacgactgcggacatgatccataaaatcgttccgttgatcgcttatatgagcaagttttttaccctcaaggccggtgacgttgtgttgacaggcacgcctgatggcgtcggcccgttgcaaagcggtgatgagctgacagtcactttcgatgggcattctttgacaactcgcgttttgtaa

SEQ ID NO: 485147 - DNA, 294 bp, Shigella sonnei
atgttttgtgtgatttatcgaagcagcaagcgtgaccagacctatttatatgtcgaaaaaaaagacgatttttcgcgtgttcctgaggaactgatgaaaggttttggtcagcctcagttagcgatgattctgccgttggatgggcggaagaaactggtcaatgctgatattgaaaaggttaaactggcattaaccgagcaaggttactatttgcagttaccgccaccacctgaagatttgctgaagcaacatctttccgtcatggggcagaaaacagacgacactaacaaataa

SEQ ID NO: 485148 - DNA, 402 bp, Shigella sonnei
atgaaaatcaagagcatcagtaaggctgtattgctgcttgcactgctaacctccacgagctttgctgcgggtaaaaatgtcaatgttgagttcagcaaaggccatagcagcgctcagtactccggcgaaataaagggatacgattacgatacatataccttctatgccaaaaaaggtcagaaagtgcatgtgagtatctctaatgaaggcgctgatacttatctcttcgggccaggaatcgatgattctgttgatttatccagatattccccagaactcgatagtcacggacaatactcactccctgcttctggcaaatatgagctgcgagtgctgcaaactcgaaacgacgcccgtaaaaacaaaactaaaaaatataacgtcgatattcaaattaagtaa

SEQ ID NO: 485149 - DNA, 369 bp, Shigella sonnei
atgaatatgatgcgtattatttatatcggattgtcaggtgtggggatgatgttctcatcaatggcgtctggacatgacgctggcggacttcaatctccggcgtgcggcgttgtttgcgacccgtatatttgtgtgaactcagatggcatttccccagagttaacaaggaaatatctcggcgaaaaagccgctgaaaacttacaatcattacaaggctacgatcccagcgaatttacattcgctaacggtgtattttgcgatgttaaagaaaaattatgtcgtgatgatcgttattttggtgtagatggtaagcggagtggaaaaatcaatcaaaccaccacaaagatgttatttatgtgtcgtgagtga

SEQ ID NO: 485150 - DNA, 696 bp, Shigella sonnei
atgtcaaacacgccaatcgagcttaaaggcagtagcttcactttatctgtggttcatctgcatgaggcagaacctaaggttatccatcaggcgctggaagacaaaatcgctcaggcccccgcatttttaaaacatgcccccgttgtactcaacgtcagtgcactggaagacccggtaaactggtcagcgatgcataaggcggtttcggcaaccggtttgcgggttattggcgtaagtggctgcaaagacgcgcaacttaaagccgaaattgaaaaaatggggctgcctatcctgacggaaggaaaggaaaaagcgccacgtccagctcccgcaccacaggctccagcgcaaaataccacgccggtcacaaaaacgcgtttaatagataccccggtgcgttccggtcagcgtatttatgctccacaatgtgatctgattgttacaagccacgttagcgctggggccgaattgattgccgatgggaacattcatgtctatggcatgatgcgcggtcgtgcgctggcaggggcaagtggtgaccgggaaacgcaaatattttgtacgaacctgatggcggaattggtgtccatcgcaggtgaatactggctgagtgatcaaatcccagcagaattttatggcaaagcggcgcgactgcagttagtcgaaaacgctttgaccgttcaaccgttaaattga

SEQ ID NO: 485151 - DNA, 813 bp, Shigella sonnei
atggcacgcattattgttgttacttcgggcaaagggggggttggtaagacaacctccagcgcggccatcgccactggtttggcccagaagggaaagaaaactgtcgtgatagattttgatatcggcctgcgtaatctcgacctgattatgggttgcgaacgccgggtcgtttacgatttcgtcaacgtcattcagggcgatgcaacgctaaatcaggcgttaattaaagataagcgtactgaaaatctctatattcttccggcatcgcaaacacgcgataaagatgccctcacccgtgaaggggtcgccaaagttcttgatgatctgaaagcgatggattttgaatttatcgtttgtgactccccggcagggattgaaaccggtgcgttaatggcactctattttgcagacgaagccattattaccaccaacccggaagtctcctcagtacgcgactctgaccgtattttaggcattctggcgtcgaaatcacgccgcgcagaaaatggcgaagagcctattaaagagcacctgctgttaacgcgctataacccaggccgcgtaagcagaggtgacatgctgagcatggaagatgtgctggagatcctgcgcatcaaactcgtcggcgtgatcccagaggatcaatcagtattacgcgcctctaaccagggtgaaccggtcattctcgacattaacgccgatgcgggtaaagcctacgcagataccgtagaacgtctgttgggagaagaacgtcctttccgcttcattgaagaagagaagaaaggcttcctcaaacgcttgttcggaggataa

SEQ ID NO: 485152 - DNA, 267 bp, Shigella sonnei; identical to SEQ ID NO: 461004

SEQ ID NO: 485153 - DNA, 285 bp, Shigella sonnei
atggcggatatgaaccgcaccacgaaaggtgcattgctaggcgcaggcgttggattacttactggcaatggtgttaatggcgtactgaaaggtgcagctgttggcgctggtgttggtgcagtaacagaaaaaggccgcgacggtaaaaatgcacgtaaaggtgcaaaagtgggtgccgccgttggtgctgtcactggcgttctgaccggcaatggcctcgaaggggcgattaaaggtgccgtgattggcggtacgggtggtgcaattctgggtaaaatgaaataa

SEQ ID NO: 485154 - DNA, 330 bp, Shigella sonnei
atgaaaaaatttgctttactggcgggcctgtttgttttcgcaccaatgacctgggcgcaggactacaatattaaaaacggtttgccgtcagaaacctatattacttgcgcagaagccaacgaaatggcaaaaactgacagcgcacaggttgcagaaattgttgcggtgatgggtaatgccagcgttgccagccgtgatttaaaaattgagcaatctccggaactgagcgccaaagtggtagaaaaactgaatcaggtttgcgctaaagacccgcaaatgctgttgatcacggcaattgatgacaccatgcgtgctatcggcaaaaaataa

SEQ ID NO: 485155 - DNA, 381 bp, Shigella sonnei; identical to SEQ ID NO: 35582

SEQ ID NO: 485156 - DNA, 285 bp, Shigella sonnei
atggaacaaatcattaatgtaaacaggctatttcgcttagcgatttatcatcgctcaaatatgcccatcctgtgtgagatgattgagcaactgtgggtcaggatggggcctggtttacattatctctatgaagcgattaatccagcggaattacgggagcatatagaaaactatcatctgttactcgctgcgttaaaagcaaaagacaaagagggatgcagacattgtcttgctgaaattatgcaacaaaatattgctattttataccagcaatacaatcgttaa

SEQ ID NO: 485157 - DNA, 2103 bp, Shigella sonnei
atgaagattttttccgtccgacagaccgttttgcccgcactacttgccctttcccccgttgtttttgccgctgatgaacagaccatgattgtcagtgccgcaccgcaggtggtttcagaactggataccccagcagcagtaagcgtggtggatggcgaggagatgcgcctggcaacaccgcgcattaacttgtccgaatcactgaccgacgtgcctggtttgcaggtacaaaaccggcagaactatgcgcaagatttacagctgtcgattcgcggatttggctcccgctccacttacggtattcgcggtattcgcctgtatgtggacggtattcccgccaccatgcccgacgggcaagggcaaacatccaacatcgatttaagcagtgtgcaaaatgtggaagtgctgcgtggccccttctctgccctgtatggcaacgcgtctggtggggtaatgaatgtcaccacccagaccggacaacagccaccaaccattgaagccagtagttactacggcagttttggcagctggcgctatgggctgaaagcaacgggcgcaacgggagacggcacacagcctggcgatgtcgattacaccgtctcaaccacgcgttttacgacccacggctatcgtgaccatagtggcgcacagaaaaatttagccaatgccaaactgggcgtacgcattgatgaagccagcaaattaagtctgattttcaatagtgtggatatcaaagcagatgacccgggtgggctaaccaaagcagaatggaaggctaatccacaacaagcgcctcgtgcagaacagtacgacacgcgaaaaaccatcaagcaaactcaggctgggttgcgctatgagcgtagcctgagcgcgcaagatgatatgagtgtgatgatgtatgccggagagcgagaaacgacccagtaccagtcaatacccatggcaccacaacttaacccgtcacatgcgggcggcgtgattaccctgcaacgccattaccaggggatagacagccgctggacacaccgtggtgaactgggcgttccggtcacgttcactaccggcctgaactacgaaaacatgagtgaaaaccgcaagggctacaataacttccgcctgaatagcggcatgccggagtacgggcaaaaaggtgagttgcgtcgcgacgaacgcaatctgatgtggaacatcgatccctatttacagacgcagtggcagctgagcgaaaaactgtcgctggatgctggcgtgcgctacagctccgtgtggtttgattccaacgaccattacgttactccgggtaacggcgatgacagcggtgatgccagttatcataaatggctacctgccggttcgttaaaatatgcaatgaccgatgcctggaatatctatctggcagccgggcgaggttttgaaacgccgacgattaatgagctgtcttatcgtgctgatgggcaaagcggtatgaactttggtttaaaaccatccaccaacgatacaattgagatcggcagtaaaacgcgtattggtgatgggctgcttagtctcgcattgtttcagaccgacactgatgatgaaattgttgtcgatagcagtagcggtgggcgtacgacttacaaaaatgccggaaagacccgtcgtcaaggcgctgaactggcatgggatcaacgtttcgcaggagattttcgcgtaaacgcgtcctggacctggcttgatgcgacctatcgcagcaatgtttgcaatgaacaggattgtaacggtaatcggatgccagggatcgcccgtaatatgggctttgcgtcgataggttatgtaccggaagatggttggtatgcaggcacggaagcgcgttatatgggcgatattatggcagatgatgaaaatacggcaaaagcgccgtcttatactctcgtcggcttattcaccgggtataaatacaattaccacaatttaactgtggatttatttggtcgtgtcgataatttattcgataaagaatacgttggttctgtcattgtcaatgagtcaaacgggcgatattacgaaccttcgcccggacgaaattatggtgtcggcatgaatattgcgtggagatttgagtaa

SEQ ID NO: 485158 - DNA, 1062 bp, Shigella sonnei
atgcatttacgtcatctgttttcatcgcgcctgcgtggttcattactgttaggttcattgcttgttgcttcatcattcagtacgcaggccgcagaagaaatgctgcgtaaagcggtaggtaaaggtgcctacgaaatggcttatagccagcaagaaaacgcgctgtggctcgccacttcgcaaagccgcaaactggataaaggcggcgtggtttatcgtcttgatccggtcactctggaagtgacgcaggcgatccataacgatctcaagccgtttggtgtcaccatcaataacacgactcagacactgtggtttggtaacactgtaaacagcgcggtcacggcgatagatgccaaaacgggcgaggtgaaaggccgtctggtgctggatgatcgtaagcgtacggaagaggtgcgcccgctgcaaccgcgtgagctggtagctgacgatgccacgaacaccgtttacatcagtggtattggtaaagagagcgtgatttgggtcgttgatggcgagaatatcaaactgaaaaccgccatccagaacaccggtaaaatgagtaccggtctggcgcttgatagcaaaggcaaacgtctttacaccactaacgctgacggcgaattgattaccatcgacaccgccgacaataaaatcctcagccgtaaaaagctgctggatgacggcaaagagcacttctttatcaacattagccttgataccgctaggcagcgtgcatttatcaccgattctaaagccgcagaagtgttagtggtcgatacccgtaatggcaatattctggcgaaggttgcagcaccggaatcactggctgtgctgtttaacccagcgcgtaatgaagcctacgtaacgcatcgtcaggcaggtaaagtcagtgtgattgacgcgaaaagctataaagtagtgaaaacgttcgatacgccgactcatccaaacagcctggcgctgtctgccgatggcaaaacgctgtatgtcagtgtgaaacaaaaatccactaaacagcaggaagctacccagccagacgatgtgattcgtattgcgctgtaa

SEQ ID NO: 485159 - DNA, 1500 bp, Shigella sonnei
atgagtaaacacgacaccgacacttcagatcaacacgccgcgaaacgccgctggcttaatgcccacgaagaggggtatcacaaagcgatgggcaatcgccaggtacagatgatcgccattggcggcgcgattggcaccggcttgtttttaggtgcaggagcccgactgcaaatggcgggtccagcactggcactggtttatttaatttgtggcttgttttcgttttttattctgcgtgcattgggtgagctggttctacaccgcccttccagtggcagttttgtctcttatgcccgtgagtttttgggtgagaaagccgcttatgttgctggctggatgtacttcatcaactgggcgatgacggggattgttgatattaccgccgtcgctctgtatatgcattactggggtgcgtttggcggcgtgccgcagtgggtctttgcgctcgctgcacttaccatcgttggcaccatgaatatgatcggtgtgaaatggtttgcggagatggagttctggtttgcgcttattaaagtgctcgccattgtgacctttttggtcgtgggtacagtgttcctcggtagtggtcagccgctggatggcaacaccactggctttcatttaatcaccgataatggcggcttcttcccccacggtttgctgcctgcgctggtgttgattcagggcgtagtgtttgcttttgcctccattgaaatggtgggtacagctgccggagaatgtaaagatccgcagaccatggtgcctaaagccattaacagtgtgatttggcgtattggcctgttttacgtcggctccgtggtgttgctggttatgttattgccgtggagcgcgtatcaggcggggcaaagtccgttcgtgacgtttttctctaaactgggtgtgccatatatcggcagcattatgaacattgtggtgctgaccgctgccctctccagcctgaactcaggtctgtactgcaccgggcgtattctgcgctcgatggcgatgggcggttccgcaccgagttttatggcgaaaatgagtcgtcagcatgtgccgtatgccgggattctggcgacactggttgtgtatgtcgtcggcgtattcctcaactatctggtgccgtcgcgcgtatttgagattgtgttgaacttcgcgtcgctgggaatcatcgcttcatgggcgtttatcatcgtgtgccagatgcgcctgcgtaaagcgattaaagaaggcaaagcagcggatgtcagttttaaactgcctggcgcgcccttcacttcctggctgacattactgtttttactgagtgtccttgtgctgatggcgttcgattacccgaacgggacttatactatcgcggcgctgccgattatcggtattctgctggttataggctggtttggtgtgcgcaaacgcgttgctgaaattcacagcactgcgccagtcgtcgaggaagatgaagaaaaacaggaaattgtgtttaagcctgaaacggcgagctaa

SEQ ID NO: 485160 - DNA, 618 bp, Shigella sonnei
atgattaaggtgtatggcgtacccggatggggctctacaatcagtgagctgatgctaacactggctgatattccttatcagttcgttgatgtcagtggttttgaccacgagggaacttcacgcgagttattgaaaaccctgaacccgttgtgtcagattccgacactggcgctggaaaatgacgagattatgacggagacagcggcgattgcattgatggttctcgatcgtcgcccggaccttgcgccaccggttgggcgcgccgaacgtcagcagtttcaacggctattggtctggctggttgctaatgtctatccaacattcactttcgccgattaccctgagcgttgggctcctgacgcacctgaacagttaaagaagaatgttattgaatatcgtaaatcgctttatatctggctgaattcacaattgaccgctgaaccttatgcgtttggtgagcaactaacgctggtggactgttatctttgcactatgcgcacatgggggtctgggcatgaatggtttcaggataatgccacgaatatcagtgcgattgctgatgctgtatgtcagttaccgaaattacaagaagtattaaaaaggaatgaaattatttga

SEQ ID NO: 485161 - DNA, 213 bp, Shigella sonnei
atgttatgttttttgatttatatcactctccccttcagtcagcttgtctatttcatttcctctgaaaagaaactaactattcacattgtgcagatgtttcacttgttatcacaggtattctataatctcaaaaagtttttaatgatggatatgctcggagttggagatgcaattaatattaatgcaaataaaaatatccggcaggtatgctaa

SEQ ID NO: 485162 - DNA, 573 bp, Shigella sonnei
ttgtgcgctgtagcgaaactggctgatgcagagggtacttacctcggtacgggtgttcgggttccaggggatctcaaaggactccggcagataacgcacggtgtcgcacaggaccaggctctggtcggtacttttttgcgcgtgctcctcataaaagaagatgccttcctccgccgccatccggcacaggaaatcgtaatcagtttcgccgtactggacacaaaactcacgggaaggatgcggctcgctgaacagcggactccactcggtcacaccgttttccttcaggatcgtcgcgaggatgctttcgatgtcctcattctggaagatacggaagttctggcgcagccctatgcgccacagcggtgggcataccttcatgctgtacagcatctggtttttgtcgttctcccccagttcaaaccaggtcaccacacctttcacccggcgctgtacgtcatcgccctgccataccgtcaggtaggccattttgtccagcacctgcgcaaattcaagggagagaaactgctggctgaccagagagagatcgagggaaaagagcgaagagagtga

SEQ ID NO: 485163 - DNA, 714 bp, Shigella sonnei
atgaagatttttttggagaatctttatcattctgattgctatttcctgccgataagagataaccagcaagtccttgtcggcgttgagttaattacccatttctccagtgaagatggcacggtgcgtatcccgacgagtcgggttatagcgcaacttaccgaggagcaacattggcaattattttcagagcagttggaattactaaaatcatgccaacatttttttattcaacataaactctttgcctggcttaatttaacgccacaagtggctacattattattagagagggataattacgcaggcgaactattaaaatatccgtttattgaactgttgattaatgagaattacccgcatctcaatgaaggaaaagataatcgcggtcttttatccttatcgcaagtgtatccccttgtgttaggtaatttgggagcaggcaatagcacaatgaaagcggtttttgatggtcttttcacccgcgtcatgctggataaaagttttattcagcaacaaatcacgcaccgctccttcgaaccgtttattcgtgcgatccaggcgcaaatttccccttgttgcaattgcatcattgcgggaggcattgatacggcagaaatattggcacagattacccccttcgatttccatgctctccagggatgcctgtggcctgccgttcccataaatcagataacgacgttggttcagcgataa

SEQ ID NO: 485164 - DNA, 1437 bp, Shigella sonnei
atgaccctgtcttttgttacccgctggcgcgatgaattgccagaaacctatacagcactttcccctacgcctttaaataatgcccggctgatttggcataataccgaactggctaacacgctgagtattccatcgtcgctgtttaaaaatggcgcaggtgtctggggcggcgaagccctactgcctggtatgtcaccactggcgcaggtttacagtggtcatcagttcggcgtctgggcgggccaactgggtgatgggcgcggcattttactcggcgaacaactgcttgctgatggcactacaatggactggcatctgaaaggtgctggcctgacgccttattcgcgaatgggtgatggacgggcggttttacgttcgacgatacgagaaagtctcgccagtgaggcgatgcattatctgggcattccgacgacccgcgcgttaagtatcgtcaccagcgattcgccagtgtatcgggaaacggcggagccaggcgcgatgctgatgcgtgtggcaccaagtcatctgcgctttggtcatttcgaacatttttactaccgccgcgagtcggaaaaggttcgtcagttagctgactttgctattcgtcattactggtcacatcttgaagatgatgaggacaaataccgtctctggtttagcgatgttgtcgcacgtaccgcgtcgttaattgcccaatggcagacggtcggctttgcacatggggtgatgaataccgacaacatgtcgctgctgggactgacgcttgattacgggccgtttggttttcttgatgattacgaacccggttttatttgtaatcactcggatcatcaagggcgttatagttttgataatcaacctgctgtcgcgttgtggaatttacagcgtctggcgcagacattgtcaccatttgttgccgtagatgccctgaatgaggccctggacagctatcagcaggttttgttgacgcattatggacaacggatgcggcagaaactgggcttcatcacggagcaaaaagaggataacgcgctactgaatgaattattcagtctgatggcgcgagagcgcagcgattatacccgcacattccgcatgctgagtctgaccgagcagcacagcacggcgtcaccgctacgtgatgagtttattgatcgtgcggcatttgatggctggtttgcccgttatcgggggcgtttgcaacaagacgaggttagcgatagtgagcgtcagcagttgatgcaaagcgttaaccccgctctggtattgcgcaactggttggcgcaacgggcgattgaagcggcagaaaagggtgatatgacggaattgcaccgcctgcatggggcgttgcgaaatcctttcagcgatagagatgatgactatgtcagtcgtccacctgactggggtaaacggctggaagtcagctgctcgagttaa

SEQ ID NO: 485165 - DNA, 192 bp, Shigella sonnei
atgcgttatacggatagcagaaaactcacgcctgaaacggacgccaatcacaaggccgcttccccgcagcccatccggcgaattaccagccagacactgttaggtccggatggcaaactgattatcgatcatgacgggcaagaatatctgctccgtaaaactcaggctggcaagctgctgttaactaagtag

SEQ ID NO: 485166 - DNA, 1047 bp, Shigella sonnei
atgaacagaactgacgaactccgtactgcgcgtattgagagcctggtaacgcccgccgaactcgcgctacggtatcccgtaacgcctggcgccgccacccatgtcaccgactcccgccgcagaattgaaaaaatactcaatggtgaagataagcgactgttggtcattattggcccctgctcgatccacgatctcaccgctgcaatggagtacgccccccgtctgcagtcgctgcgcaaccagtaccagtcacggctggaaatcgtaatgcgcacctattttgaaaaaccacgaactgttgtcggctggaaaggactaatctccgatccagatttaaacggcagctatcgggtaaatcacggtctggagctggcgcgcaaattacttttacaggtaaatgagctgggcgtcccaaccgcgactgagttcctcgatatggtgaccggtcagtttattgctgatttaatcagttggggcgcgattggcgcacgtactaccgaaagtcagatccaccgtgaaatggcttcggcactctcctgtccggtaggttttaaaaatggtaccgatggcaatacgcggattgctgtggatgctatccgcgcagcccgcgccagccatatgttcctctcgccagacaaaaatggtcagatgaccatctatcagaccagcggcaacccgtatggccacattattatgcgtggcggcaaaaaaccgaattatcatgccgatgatatcgccgcagcctgcgatacgctgcacgagtttgatttacctgaacatctggtggtggatttcagccacggtaactgccagaagcagcaccgtcgccagttagaagtttgtgaggatatttgtcagcaaatccgcaatggctctacggcgattgctggaattatggcggaaagtttcctgctcgaaggaacgcaaaaaatcgtcggcagtcagccgctcacttacggtcaatccattaccgacccgtgtctgggctgggaagataccgaacgcctggtcgaaaaactcgcctctgcggtagatacccgcttctga

SEQ ID NO: 485167 - DNA, 834 bp, Shigella sonnei
atggataatgctgttgatcgccacgttttttatatttctgatggtacggcaataactgcggaggtattaggacacgcagtaatgtcacaatttcccgtcactatcagcagcattacgctgccgtttgtcgaaaatgagagccgtgcacgggcagtgaaggatcagattgacgcaatttatcaccagacaggtgtgcgcccgctggtcttctactccatcgtgttgccggagattcgcgccatcatcttgcaaagtgaaggcttttgccaggatatcgttcaggcgctggttgccccgctacaacaagagatgaaactggatccaacgccgattgctcatcgtacccatggccttaaccctaataatctcaataaatatgatgcgcgcattgcggcgattgattacaccctcgcccacgatgacggcatttcgttgcgcaatctggatcaggctcaggtgatcctgctcggtgtttctcgctgtggtaaaacccccaccagtctttatctggcaatgcaatttggtatccgcgcggcaaactacccctttattgccgacgatatggataatctggtgctacccgcgtcgctcaaaccgcttcagcataaattgttcggcctgactatcgacccggaacgtctggcggcgattcgcgaggaacgtcgggagaacagtcgctatgcctcgcttcgtcagtgcaggatggaagtcgcggaagtggaagcgttgtaccgtaaaaatcagatcccgtggattaacagtaccaattattcggtagaagagattgccaccaagatcctcgatatcatgggccttagtcgccgaatgtactag

SEQ ID NO: 485168 - DNA, 2379 bp, Shigella sonnei
atgtccaacaatggctcgtcaccgctggtgctttggtataaccaactcggcatgaatgatgtagacagggttgggggcaaaaatgcctccctgggtgaaatgattactaacctttccggaatgggtgtttccgttccgaatggtttcgccacaaccgccgacgcgtttaaccagtttctggaccaaagcggcgtaaaccagcgcatttatgaactgctggataaaacggatattgacgatgttactcagcttgcgaaagcgggcgcgcaaatccgccagtggattatcgacactcccttccagcctgagctggaaaacgccatccgcgaagcctatgcacagctttccgccgatgacgaaaacgcctcttttgcggtgcgctcctccgccaccgcagaagatatgccggacgcttcttttgccggtcagcaggaaaccttcctcaacgttcagggttttgacgccgttctcgtggcagtgaagcatgtatttgcttctctgtttaacgatcgcgccatctcttatcgtgtgcaccagggttacgatcaccgtggcgtggcgctctctgccggtgttcagcggatggtgcgctccgacctcgcatcttctggcgtgatgttctccattgataccgaatccggctttgaccaggtggtgtttatcacttccgcatggggccttggggaaatggtcgtgcagggtgcggttaacccggatgagttttacgtccataaaccgacactggcggcgaatcgcccggctatcgtgcgtcgcaccatggggtcgaaaaaaatccgcatggtttacgcgccgacccaggagcacggcaagcaggttaaaatcgaagacgtaccgcaggaacagcgtgacatcttctcgctgaccaacgaagaagtgcaggaactggcaaaacaggccgtacaaattgagaaacactacggtcgcccgatggatattgagtgggcgaaagatggccacactggcaaactgttcattgtgcaggcgcgtccggaaaccgtgcgctcacgcggtcaggtcatggagcgttatacgctgcattcacagggtaagattatcgccgaaggccgtgctatcggtcatcgcatcggcgcgggtccggtgaaagtcatccatgagatcagcgaaatgaaccgcatcgaacctggtgacgtgctggtcactgacatgaccgacccggactgggaaccgatcatgaagaaagcatctgccatcgtcaccaaccgtggcggtcgtacctgtcacgcggcgatcatcgctcgtgaactgggcattccggcggtagtgggctgtggtgatgcaacagaacggatgaaagacggtgagaacgtcactgtttcttgtgccgaaggtgataccggttacgtctatgcggagttgctggaatttagcgtgaaaagctccagcgtagaaatgatgccggatctgccgttgaaagtgatgatgaacgtcggtaacccggaccgtgctttcgacttcgcctgcctgccgaacgaaggcgtgggccttgcgcgtctggaatttatcatcaaccgtatgattggcgtccacccacgcgcactgcttgagtttgacgatcaggaaccgcagttgcaaaatgaaatccgcgagatgatgaaaggttttgattctccgcgtgaattttacgttggtcgtctgactgaagggatcgcgacgctgggtgccgcgttttatccgaagcgcgtcattgtccgtctctctgattttaaatcgaacgaatatgccaacctggtcggtggtgagcgttacgagccagatgaagagaacccgatgctcggcttccgtggcgcgggacgctatgtttccgacagcttccgcgactgcttcgcgctggagtgcgaagcagtgaaacgtgtgcgcaacgacatggggctgaccaacgttgagatcatgatcccgttcgtgcgtaccgtagatcaggcgaaagcggtggttgaggaactggcgcgtcaggggctgaagcgtggtgagaacgggctgaaaatcatcatgatgtgtgaaatcccgtccaacgccttgctggccgagcagttcctcgaatatttcgacggcttctcaattggctcaaacgatatgacgcagctggcgctcggtctggaccgtgactccggcgtggtgtctgaattgttcgatgagcgcaacgatgcggtgaaagcactgctgtcgatggctatccgtgccgcgaagaaacagggcaaatatgtcgggatttgcggtcagggtccgtccgaccacgaagactttgccgcatggttgatggaagaggggatcgatagcctgtctctgaacccggacaccgtggtgcaaacctggttaagcttggctgaactgaagaaataa

SEQ ID NO: 485169 - DNA, 249 bp, Shigella sonnei
atgcccgatgaacgtttaggtgaacgatcatgcgcttatgtcgtgctgaaagcgccgcatcattcattatcgctggaagaggtggtggctttttttagccgtaaacgggtcgcaaaatataaatatcctgaacatatcgtggtaatcgaaaaactaccgcgtactgcctcaggtaaaatacaaaagtttttgttaagaaaagatattatgcggcggttaactcaggatgtctgtgaagagattgaataa

SEQ ID NO: 485170 - DNA, 1815 bp, Shigella sonnei
atgatggagaaacacggagctgaattgctgttacagcggatgttaagtaacaccagcgctactttcagggaagggcaatgggaagctatagatgcggtggttaatcagcggcgaaaactgctggttgtccaacgcactggctgggggaaaagtgccgtgtacttcatcgccagtaaaatcttccgcgatcgcggcgctggcccgacaattatcatctctcctttgcttgccctgatgcgtaaccaggttgccgccgctgaacggttaggtattacggctgaaacgttgaattctacaaacagggaagaatggcagcgcattagcgataagttgctgcggggtggtgtagattgtctgctgatttcacctgaacggttggcgaatcaggattttcttgaaactgcgaatacccctgttctgggtacaaccgcgacagcgaataatcgtgtcgttgaggatatccgtcagcaattgggtgacattgtgattcagcgtggaacgctggctcgcgaaagtttggcgcttgatgccttagtcttaggtgaacagtcatcccgtctggcatggttagcaacggttatccctcagttttccaaatcgggaattgtttataccctgactactcgcgatgccgaacttgtcgccgagtggttaaggacaaatggtatcagtgcatttgcttactacagcggcgtgacttgtgaaggcgcggaagattctaatactgccagggaatatctggagcaggcgctgctggcaaataaaatcaaagtgctggtcgcgacgacggcattaggtatggggtttgataaacctgatttaggtttcgtcattcattatcaaatgccggggtctattgtcggttactaccaacaggtagggcgtgccgggcgtgctatagattccgcagttggcatattgctttgtggtggtgaagaccgcgctattcataaattcttccgtgaaagcgcctttcctgcggaggcgcaaattcatgaaatactcaacgtacttagcgagaatgacggtcttaccctacgaggcattgaacaacggacgaatctccgttatgggcaaatagaaaaagcactgaaattattggtagctgaaaatccatcgcctgtggtgtataccgagaaattatggcgcagaactatcgtcagtttctctcctgaccatgaacgaattaaccatttgatgaatcagagaaaaaatgagctggcagatgttgaaagctatatcacgaccaaggagtgcaaaatgcaatttctgcgccgcgcactcgatgagccaagtgccgaacgttgtggtaaatgtagcagttgtcttcagcatccgttgttgtcgcccgatattgatagcggcttactccatgcggcaaatttatttattaaacacgctgacctgccattaaatctcaataaacaggtagcatctggagcttttacgcaatacggatttaaagggaacttgcctgcgggtttacaaggatctacggggcgagtcctttctcgttggggagattccgggtggggaaagcaggtagcacaggagaaaaaaacggggcgattcagtgatgagctggtggaggcatgtgcggaaatggttcgccaacgctggaatccgcatcctgaaccaacctgggtatgctgcgttccttcattaaagcacctcgacctggttcctgattttgcccggcgactggcggcgaaacttggcttaccttttattgatgccattgaaaaagtcgtggacaatccaccgcagaaaatgcagcaaaaccgtttcggtgatgctgccaacttactgatttag

SEQ ID NO: 485171 - DNA, 1341 bp, Shigella sonnei
gtgactacattaacgcttgttttaacagcagtagggtctgttttactgctgctgtttttagtcatgaaggcgcgtatgcacgctttcctggctttgatggtggtgtccatgggggctggccttttttccggtatgccgctcgataaaatcgcagcgacgatggaaaaagggatgggaggcaccctcggcttcctggcggtggttgtcgccctgggagctatgtttggcaagatcttacatgaaaccggcgcagtcgatcagattgccgtcaaaatgctcaaatccttcggtcacagccgcgcgcattatgccatcggccttgcggggctggtctgtgcgctaccgctgttctttgaagtggcgattgttctgctgattagcgttgctttctcaatggcgcgccacaccgatacgaacctggtgaagctgataatcccattattcgcaggcgtggcggcagcggcggcgttcctggtgccagggccagcgccaatgctgctggcatcgcagatgaacgccgattttggctggatgatcctgattggcctgtgtgcggcaattccgggaatgattattgccgggccgctgtggggtaacttcatcagccgttacgttgagctgcatattcctgacgacatcaacgagccgcatctcggcgaaggtaaaatgccatctttcggattcagcctgtcgctgatcctgttgccgctggtgctggtggggctgaaaaccattgccgcgcgttttgtgccagaaggctctaccgcttacgaatggttcgagtttattggtcatccgtttaccgcgattctggttgcttgtctggtagcgatttatggcctggcaatgcgtcagggcatgccaaaagacaaagtgatggagatttgcggtcacgcgctgcaaccggcggggatcattctgctggtgattggtgcaggcggcgtgttcaaacaggtgctggttgactctggcgtaggtccggcactgggcgaagcgttaaccggcatgggcctgccgattgctatcacctgcttcgtgctggcagctgcagtgcgcatcattcaggggtctgccaccgttgcctgtttaacggcggtggggctggtgatgccggtcattgaacaactgaacaattccggtgcgcaaatggcggcgctgtcgatttgtatcgccggtggttcgattgttgtcagccacgttaacgacgctggtttctggttgttcggtaaatttaccggcgcgaccgaagccgaaacgctgaaaacctggaccatgatggaaaccatcctcggcactgttggtgccattgttgggatgattgcgttccagctgttgagttaa

SEQ ID NO: 485172 - DNA, 528 bp, Shigella sonnei
ttgagcacgactaaccatgatcaccacatttacgtcttgatgggcgtatcgggcagcggcaaatctgcggtcgccagtgaagtggcgcatcaacttcatgccgcgtttcttgatggcgatttcctccatccacggcgcaatatcgaaaaaatggcgtctggcgaaccgctgaatgacgacgatcgcaaaccctggttgcaggcgctgaacgacgccgcgtttgctatgcagcgcactaataaagtgtcactgatcgtctgttctgcattgaaaaaacactatcgcgacttgctgcgtgaaggtaatccgaatctctctttcatctacctgaaaggcgattttgacgtgattgaaagccgcctgaaagcgcgcaaaggccatttctttaaaacccaaatgttggtgacgcagtttgaaacgctgcaggagccgggtgcggacgaaaccgatgtactggtggtggatatcgatcaaccgctggaaggtgttgtggcaagcaccattgaggttattaaaaaaggcaaataa

SEQ ID NO: 485173 - DNA, 996 bp, Shigella sonnei
atgaaaaagaaaagacccgtacttcaggatgtggctgaccgtgtaggcgtgaccaaaatgacggtcagccgttttttacgcaacccggagcaggtttccgtcgctctacgcggcaagattgccgccgctcttgatgaactgggctatattcccaatcgtgcgcccgatatcctctctaacgccaccagccgggcgattggcgtcctgttaccttctctcaccaaccaggttttcgcggaagtattacgcggaatcgaaagcgtcaccgacgcgcacggttatcagaccatgctggctcactacggttataaaccggaaatggagcaagaacgtctcgaatccatgctctcctggaatatcgacggactgatcctcaccgaacgtacccacacgccgcgcaccttaaagatgattgaagtggcggggatcccggtggtggaactcatggacagccagtcgccgtgcctcgatatcgccgtcggttttgataactttgaagcggcacgccagatgaccaccgccattattgctcgcgggcattgccacattgcctatctcggcgcgcgtctcgacgaacgtactatcatcaaacagaagggatacgaacaggcgatgctggatgcaggtctggtgccgtatagcgtgatggttgagcaatcttcttcttactcttccggtattgaactgattcgccaggcgcggcgggaatatccgcagctggatggcgtgttctgtaccaacgatgacctggcggtcggcgcggcgtttgaatgtcagcgtctgggattgaaggttcctgacgatatggcgattgccggtttccacggtcatgacattggccaggtgatggagccgcggttagcgagcgtgctgacgccgcgtgagcggatgggcagtattggcgctgaacgcctgctggcgcgtattcgtggcgaatctgtgacaccgaaaatgttagatttaggtttcaccttgtcaccgggcggatctatttaa

SEQ ID NO: 485174 - DNA, 696 bp, Shigella sonnei
atgatctacttacgcaaagcaaatgaacgtggtcatgcaaatcatggctggctggactcctggcatactttctcttttgccaactattacgatccgaactttatgggcttctccgcgctgcgcgtgattaacgacgacgtgattgaagcagggcagggcttcggcactcacccgcataaagatatggaaattttgacctacgtgctggaaggtactgttgagcatcaggacagcatgggcaataaagagcaggttccggcgggtgagttccagattatgagtgcgggtacgggtattcgtcactcagagtacaacccaagcagcaccgagcgtctgcatctgtatcagatctggatcatgcctgaagaaaacggtattacgccgcgttatgaacagcgtcgcttcgatgccgtacagggcaaacagctggtgctctcgccggatgcgcgagatggttcattgaaagtgcatcaggatatggaactgtaccgctgggcgttgctgaaagatgagcagtcggtgcatcagattgccgctgaacgccgcgtctggatccaggtggtgaaaggcaatgtcaccattaacggcgtgaaagcctcgaccagcgatggtctggcaatctgggatgagcaggcaatctccatccatgcggatagcgacagcgaagtgttactgttcgatctgccgccggtttaa

SEQ ID NO: 485175 - DNA, 1038 bp, Shigella sonnei
atggtcatcaactgcgcctttattggcttcggcaaaagcaccacccgttaccatctgccgtatatacttaaccgcaaggatagctggcatgtcgcgcatatttttcgtcgccatgcgaagccggaagaacaggctcccatttactctcatatccatttcaccagcgatctcgacgaagtgctaaacgatcccgatgttaagttggttgttgtctgcacccatgcggacagccacttcgagtacgcgaagcgcgcgctggaagccgggaaaaatgtgctggtcgaaaaaccgttcactccgacacttgcgcaggcgaaagagctgtttgcactggcgaaaagcaaagggctgaccgtcacgccatatcagaatcgtcgctttgattcctgcttcctgacggcgaaaaaagcgattgaaagcggtaagctgggagagattgttgaagtggaaagccattttgactattaccgcccggtggcagaaaccaaacctgggttgccgcaggatggcgcgttctatggccttggtgtgcatacgatggaccagattatttctctgttcggtcgcccggatcacgtcgcttatgacatctgcagcctgcgtaataaagccaatcctgacgacacctttgaagcgcaactgttttatggcgacctgaaagccatcgtcaaaaccagccatctggtgaaaatcgattatccgaaatttatcgttcacggtaagaaaggttcgtttattaaatacggtatcgaccagcaggaaaccagcctgaaggctaatattatgccgggcgaaccgggattcgcagcggatgattcggtcggtgtgctggagtatgtcaatgacgagggcgtgacggtcagagaagagatgaagccggagatgggcgattacgggcgcgtttatgatgcgttgtatcaaaccatcacccacggtgcgccaaattacgtcaaggaatctgaagttcttaccaatctggaaatccttgaacgcggatttgagcaagcctctccctccacagtgactctcgcgaagtaa

SEQ ID NO: 485176 - DNA, 465 bp, Shigella sonnei
atgagtgagatagtaatacgccacgcagaaacacgggattacgaggccatcaggcagattcacgcccagccggaggtgtattgcaacacactacaggtgcctcatccttccgatcatatgtggcaggagcgactcgccgatcgtcccggcatcaagcaactcgtcgcctgtattgatggagacgtcgtgggccatctcaccattgacgtgcaacagcacccacgccgcagtcatgttgccgattttggtatctgtgtcgactctcgttggaagaaccgcggcgtcgccagcgccctgatgcgagagatgattgaaatgtgcgacaactggttgcgggtagatcgcattgaactaaccgtgtttgtcgataacgccccggcaattaaggtctataaaaaatacggctttgaaattgaagggactggtaagaagtacgcattgcgggtgatgctgccaacttactga

SEQ ID NO: 485177 - DNA, 1338 bp, Shigella sonnei
atgatggctgaaatgggagctgcttatcgcaaagaagaaggtggtatctattcctggatgaataatagtgtcggaccacgttttgccttcattggtacgtttatgtggttttcctcttatatcatctggatggtgagtacctccgcgaaagtttgggtaccgttctcaacattcctctatggtagcgacatgacccagcactggcgtattgccggactggagcctacgcaggtggttggtctgctggcagtagcatggatgattctggtcaccgtcgttgcttcaaaggggattaataaaattgcccgcattactgcggtgggcggtattgcagtaatgtgtctgaatttagtattgctgttagtaagcattactattttgttattaaatggtgggcatttcgcgcaggatattaatttccttgcatcaccgaacccgggttatcagtccggtctggcaatgctatcgtttgtggtatttgctatttttgcctatggcggaattgaagcggttggtggtctggtcgataaaacggaaaatccagaaaagaactttgccaaaggtattgtttttgccgctattgttatttcaatcggttattcgctggcaatatttttatggggcgtcagcacaaactggcagcaggtattaagtaatggttccgttaaccttggcaatattacctatgtgctgatgaagagcctcggggtgacgctgggtaacgcactgcatttgtcacctgaagcgtcattgtcgctgggcgtatggtttgcgcgtattaccggactttcgatgttcctcgcttataccggtgcgttctttacgctttgctattcaccgctgaaagccatcatccaggggacgccgaaagcgttgtggccggaaccgatgacgcgcctgaatgcgatggggatgccgtctatcgccatgtggatgcagtgcgggttggttactgtcttcatcctgctggtttcgtttggtggcggtaccgcatccgcgttctttaacaagctgacgctgatggcgaacgtgtctatgacgcttccttacctgttcctcgcgctggctttcccattctttaaagcacgtcaggatctcgacagaccatttgtgattttcaaaacgcgtatgtcggcaatgattgcgatggtggttgtcgtactggtggtgacatttgcgaacgtcttcaccattattcagcctgtggttgaagccggagactgggacagcacattgtggatgattggcggccctgtcttcttctcgctgttagcgatggcgatttaccagaactattgcagtcgcatggcgaataaacctgagttagctctcgactga

SEQ ID NO: 485178 - DNA, 3324 bp, Shigella sonnei
gtgcgcctgattatcacttttctgatggcctggtgcctcagttggggggcgtacgccgcgacggcccccgatagcaaacaaatcactcaggaactggagcaggcaaaagcggcgaaacccgcacagccggaagtcgtagaggcgcttcagtctgccttaaatgcgcttgaggaacgaaaaggttcccttgagcgcatcaaacaatatcagcaagttatcgataattatccgaaactctccgctactctgcgcgcacaattaaacaacatgcgtgacaagccgcgcagcgtgtcgccgggaatgtctaccgacgcgctgaatcaggaaattctccaggtcagcagccagttgctggataaaagccgtcaggcccagcaagagcaggagcgcgcccgcgagattgccgattcgctgaatcaactgccgcaacagcaaaccgacgcccgccgtcagttaaatgagatcgagcgccgcctgggaacgcttaccggcaatactccgctcaatcaggcacaaaatttcgcgttgcagtctgactctgcacgtcttaaggcgctcgttgatgaactggagctggcgcagctgtctgccaataaccgccaagaattagcgcgcttacgctcagagcttgcggaaaaagagagccagcaactggatgcgtatttgcaggccttacgtaatcagttgaatagccaacgtcagcttgaggcggagcgggcgctggaaagtaccgaattactggcagaaaacagtgccgatttgccgaaagatatcgtcgcgcaattcaaaattaaccgcgaactatcggcagcgctgaatcaacaggcgcagcggatggatctcgttgcctcgcaacagcgtcaggctgccagccagacgttacaggtccggcaggcgttgaatacgctgcgtgaacagtcgcaatggctgggatcgtccaatctgctcggtgaagcgttgcgagcgcaggtggcacggctaccagaaatgccaaaaccacaacagcttgataccgaaatggcgcagttgcgtgtgcaacggttacgttatgaggatctgcttaataaacagccgctgctacggcaaatccatcaggccgacggtcagccgctgaccgccgagcaaaaccgtattctggaagcacaactgcgcactcagcgtgagttgctgaactcattgttgcagggtggcgacacgctactattggaactgaccaagctgaaagtctccaacgggcaactggaggatgcgctgaaagaggtgaacgaagcaacgcaccgctatctgttctggacctctgacgtgcgtccgatgaccatcgcctggccgctggaaatcgcccaggatctgcgtcgtctcatttcgctggacaccttcagtcagttgggcaaagccagtgtgatgatgctgaccagcaaagagacaattttgccgctgtttggcgcgttgattctggtcggttgcagtatttactcgcgccgctatttcacccgttttcttgaacgttcggcggcgaaagttggcaaagtgactcaggatcacttctggctgacgttgcgcactcttttctggtcgattctcgtcgcgtcaccgttaccggtgctgtggatgacgctgggttacggcttgcgcgaggcgtggccttatccgctggcggtcgcgattggcgatggtgtaacggccaccgtgccgctgctgtgggtagtgatgatttgcgccacctttgcccgcccgaacggcttgtttatcgctcattttggctggccgcgcgaacgcgtatctcgtgggatgcgctactacctgatgagcatcgggcttattgtgccgctgattatggcgctgatgatgttcgataacctcgacgaccgtgaattctccggttcgctgggaaggctttgctttatcctcatttgcggtgcgctggcggtggtcaccctcagcctgaaaaaggccgggattccgctgtatctcaacaaagaaggcagcggcgacaacattaccaaccatatgctgtggaacatgatgattggcgcgccgttggttgccattctggcgtcggctgtgggttatctggcaacggcacaggcgctgttagcgaggcttgaaacctcggttgccatctggttcctgctactggtggtttatcacgttatccgccgctggatgctgatccagcgccgcaggctggcgtttgaccgggcgaagcatcgccgggcagagatgttagcgcaacgtgcgcgtggcgaagaggaagcgcatcatcacagtagcccggaaggagcaattgaagtcgatgaaagcgaagtcgatctcgatgccatcagtgcgcaatccttgcggctggtgcgctcaattttgatgttgatcgccctgctttctgtcattgtgctgtggtcagaaatccattccgctttcggcttcctcgaaaatatttcgctgtgggatgtcacctccacggtacagggcgtagaaagtctggagccaattaccctcggtgcggtgctgattgccattctggtgtttatcatcaccacgcagctggtgcgcaacctgcccgcgctgctggaactggcgattttgcagcacctggatttaacgccgggtacgggctacgccatcaccaccatcaccaaatatctgctgatgctgattggcgggctggtcggcttctcgatgattggtattgagtggtcgaaattgcagtggctggtcgccgcgctcggtgttggtctcggttttggtttgcaggaaattttcgccaactttatctctggtctgattatcctgttcgaaaaaccgattcgcattggcgatacggtgacaattcgcgatctcaccggtagcgtgacgaaaattaacacccgcgccaccaccatcagcgactgggaccgtaaagagataatcgtgccgaacaaggcgtttattaccgagcagtttatcaactggtcgctctctgactcggtcacgcgcgtagtgttgacgattccggcccctgctgatgccaacagtgaagaagtgacggaaatcctgctcaccgcagcgcgtcgctgctcgctggtgatcgacaacccggcaccggaagtcttcctggtggatctgcaacaagggattcagattttcgagctgcgtatttatgccgctgagatgggtcaccgtatgccgctacgccatgagatccaccagctgattctggctggcttccatgcccacggtatcgatatgccattcccgcccttccagatgcgtctggaaagcctcaacggtaaacaaacggggagaacgctgacgtctgcgggcaaaggtcgtcaggcgggaagtttgtaa

SEQ ID NO: 485179 - DNA, 969 bp, Shigella sonnei
ttgttaaattcatttaaactttcgctacagtacattctgccgaaactatggcttactcgcctggcgggttggggcgcaagcaagcgggcaggatggttgacaaaactggttatcgatctgttcgttaaatactacaaggtcgacatgaaagaggcgcaaaagccggacaccgccagctaccgcacctttaacgaattctttgtccgtccgctgcgtgacgaagtacgcccaatcgataccgatccgaatgtactggtcatgcctgccgatggcgttatcagccagttgggtaaaatcgaagaagataaaatcctgcaagccaaaggccacaactacagcctcgaagccctgctggcaggcaactatctgatggcggacctgttccgcaacggtacgtttgtgaccacttacctctccccgcgtgactaccaccgcgtacacatgccgtgcaacggtattctgcgtgagatgatctacgtgccgggcgatctcttctccgttaaccatctcacggctcagaacgtgccgaatctgtttgcccgtaacgaacgcgtgatttgccttttcgataccgaatttggcccaatggcgcagattctggtcggagcgacgattgttggcagcattgagacggtctgggcgggcaccattacgccgccgcgcgaaggtatcatcaagcgctggacctggcctgccggggaaaacgacggttctgtggcactgctgaaaggccaggaaatgggtcgctttaaactcggttccaccgttatcaacctgtttgcaccgggtaaagtgaatctggttgagcaactggaaagcctgtctgtcacgaaaatttgccagccgctggcagtatctaccgaaacctttgttacgccagacgctgaacctgccccgcttcctgctgaagagatcgaagcagaacacgacgccagcccattggttgacgacaaaaaagaccaggtctaa

SEQ ID NO: 485180 - DNA, 1053 bp, Shigella sonnei
ttgagtaaaaataaactctccaaaggccagcagcgccgcgtgaacgccaatcaccagcgtcgtcttaaaacgtctaaggagaagcccgactacgacgacaatctgtttggcgagcctgatgaaggtatcgtcatcagccgctttggtatgcacgctgatgtggaatccgccgatggcgacgttcaccgctgcaatattcgccgtaccatccgttcgctggtaaccggcgaccgcgtagtctggcgtccgggtaaaccggcggcggaaggcgtaaatgtcaaagggatcgtggaagcggtgcatgagcgtacctcggtgttgacgcgtccggatttctacgacggcgtaaaacctattgccgccaacatcgaccagattgtcattgtctccgccattttgccggagctgtcgctcaatattatcgaccgttacctagtggcctgcgaaaccttgcagattgagccgattattgtgctcaacaagatagacctgctggacgacgaaggcatggcgttcgtcaacgagcagatggatatctaccgcaatatcggttatcgcgtattgatggtttccagccatactcaggatgggctaaaaccgctggaagaggcgttgaccgggcgcatcagcatttttgccgggcagtctggcgtcggcaaatccagcctgctgaacgcgttgctggggctgcaaaaagagatcctgaccaacgatgtctctgacaactcggggcttggtcagcacaccacgaccgccgctcggctgtatcacttcccgcacggcggtgatgtgattgattcccctggtgtgcgtgagttcggcctctggcacctggagccggaacaaatcactcagggctttgtcgaattccatgactatttaggtctgtgtaaatatcgcgattgcaaacacgataccgatccgggctgcgctatccgggaagcggttgaggaagggaaaatcgcggaaacccgtttcgaaaactatcaccgtattctggaaagcatggcgcaggtaaaaacgcgtaaaaacttttctgatacggatgactga

SEQ ID NO: 485181 - DNA, 546 bp, Shigella sonnei
atgagtgccaatgaaaacaacctgatttggatcgatcttgagatgaccggtctggatcccgagcgcgatcgcattattgagattgccacgctggtgaccgatgccaatctgaatattctggcagaagggccgaccattgcagtacatcagtccgatgaacagctggcgctgatggatgactggaacgtgcgcacccataccgccagcgggctggtagagcgcgtgaaagcgagcacgatgggcgatcgggaagctgaactggcaacgctcgaattcttaaaacagtgggtgcctgcgggaaaatcgccgatttgcggtaacagcatcggacaggaccgtcgtttcctgtttaaatacatgccggagctggaagcctacttccactaccgttatctcgatgtcagcaccctgaaagagctggcgcgccgctggaagccggaaattctggatggttttaccaagcaggggacgcatcaggcaatggatgatatccgtgaatcggtggcggagctggcttactaccgcgagcattttatcaagctgtaa

SEQ ID NO: 485182 - DNA, 423 bp, Shigella sonnei
atggcggatctgtacagtcatcgctgggaaatcgaactgggatacagggagataaaacagacgatgcaactgagcaggctgacgctgagaagtaaaaagccggagcttgtggagcaagagctgtggagtgtcttactggcttataatctggtgagatatcagatgattaaaatggcggaacatctgaaaggttactggccgaatcaactgagtttctcagaatcatgcggaatggtgatgagaatgctgatgacattgcagggcgcttcaccgggacgtataccggagctgatgcgcgatcttgcaagtatgggacaacttgtgaaattaccgacgagaagggaaagggccttcccgagagtggtaaaggagaggccctggaaataccccacagccccgaaaaagagccagtcagttgcttaa

SEQ ID NO: 485183 - DNA, 984 bp, Shigella sonnei
atggcaacattaaaagacatcgcaatcgaagctggcgtatccctggcgacagtatccagggtcttaaatgacgatccgacattgaatgtgaaagaagagacgaaacatcgcattctcgagatcgccgaaaagctggagtacaagaccagtagcgcccgtaaactacagacaggcgcagtcaaccaacaccatattctggctatctacagctaccagcaggagctggagatcaacgatccttactatctggcgatccgccacggcattgaaactcagtgcgaaaagctggcgatcgaactgaccaactgttatgaacacaacggattaccagacattaaaaacgtcaccggtattttaattgtcggcaaacccacgcccgccctgcgcgccgctgccagcgcgttgaccgacaatatctgttttatcgactttcacgaacccggcagcggttacgatgcggtggatatcgatctggcacgcatcagtaaagaaatcatcgacttctatatcaaccagggcgttaatcgtattggttttattggcggtgaagatgagcctggcaaggcggatattcgtgaggtcgcctttgcggaatatggccgactgaaacaagtggtacgcgaagaggatatctggcgcggcggtttttccagttcgtcgggttatgaactggcaaaacaaatgctggcgcgggaagactatccgaaggcactgtttgttgcttccgattccattgctatcggcgtactgcgggcaattcatgaacgtggcctgaacatcccacaggatatttcgcttttcagcgttaacgatatccccaccgcgcgatttacctttccgccgctctccaccgtgcgcatccattccgagatgatgggaagtcagggcgttaacctggtgtatgaaaaagcccgcgatggtcgcgcgctgccgctgctagtcttcgttcccagcaaattaaaactgcgcggcacgacccgttaa

SEQ ID NO: 485184 - DNA, 333 bp, Shigella sonnei
atggaaaccgtggcttacgctgattttgcacgtctggaaatgcgcgtcggaaagattgtggaagtgaaacgccatgaaaacgccgacaagctgtacatcgtacaggttgatgtgggggaaaaaacactgcaaaccgtgaccagcctggtgccgtactacagcgaagaggagctgatgggaaaaacggtggtggtcttatgcaatctgcaaaaagcgaaaatgcgtggtgaaacgtcggaatgcatgctgttgtgtgcggaaaccgatgacggcagtgaaagcgtgctgttaacgccggagcggatgatgcctgcgggcgtacgcgtcgtataa

SEQ ID NO: 485185 - DNA, 1491 bp, Shigella sonnei
atgataaccgaatttgtgtttatcccgattttcgcgatcgcagccggagtggcgcaatccctgcaatacttaaatcggtatcatgtgatacgcgagcctccggagcatattttgaacaggttaccttcgagcgcatcggctttagcgtgcagcgcccacgccctgaatctcattgagaagcgaacgctggatcatgaggagatgaaagcacttaaccgagaggtgattgaatacttcaaagagcatgtcaatccggggtttttagagtatcgcaaatctgttaccgccggcggggattacggagccgtagagtggcaagcgggaagtttaaatacgcttgtcgacacccagggacaggagtttatcgactgcctgggaggttttggaattttcaacgtggggcaccgtaatccagttgtggtttccgccgtacagaatcaacttgcgaaacaaccgctgcacagccaggagctgctcgatccgttacgggcgatgttggcgaaaacccttgctgcgctaacgcccggtaaactgaaatacagcttcttctgtaatagcggcaccgagtccgttgaagcagcgctgaagctggcgaaagcttaccagtcaccgcgcggcaagtttacttttattgccaccagcggcgcgttccacggtaaatcacttggcgcgctgtcggccacggcgaaatcgaccttccgcaaaccgtttatgcagttactgccgggcttccgtcatgtgccgtttggcaatatcgaagccatgcgcacggctcttaacgagtgcaaaaaaaccggtgatgatgtggctgcggtgatcctcgaaccgattcagggtgaaggtggcgtaattctgccgccgccgggctatctcaccgccgtacgtaagctatgcgatgagttcggcgcactgatgatcctcgatgaagtacaaacgggcatggggcgcacgggcaagatgttcgcctgcgagcatgagaacgtacagccggatatcctctgccttgccaaagcgctcggcggcggcgtgatgccgattggcgcgaccatcgccactgaagaggtgttttcagttctgttcgacaacccattcctgcataccaccacctttggcggcaacccgctggcctgtgcggcggcgctggcgaccatcaatgtgttgctggagcagaacttaccggctcaggctgatcaaaaaggcgatatgttgctggacggtttccgtcaactggcgcgggaatatcccgatctggtacaggaagcgcgtggtaaagggatgttgatggcgattgagtttgttgataacgaaatcggctataactttgccagcgagatgttccgccagcgcgtactggtggccggaacgctcaataacgccaaaacgatccgcattgaaccgccactgacactgaccattgaacagtgtgaactggtgatcaaagcggcgcgtaaggcgctggcggccatgcgagtaagtgtcgaagaagcgtaa

SEQ ID NO: 485186 - DNA, 1521 bp, Shigella sonnei
atgtcttctcatccgtatgtcacccagcaaaataccccgctggcggacgataccactctgatgtccactaccgatctgcaaagctatatcactcatgctaatgacacttttgtgcaggtgagcggctttaccttgcaagagttacaagggcagccgcacaacatggtgcgtcacccggatatgccaaaagcggcgtttgcggatatgtggttcaccctgaaaaaaggggagccctggagcggcatcgtgaaaaatcgccgcaaaaatggcgaccattattgggtgcgggccaatgcggtaccgatggtgcgcgagggaaaaatcagtggctatatgtcgattcgtacccgggcgacggatgaagagattgcggcggtggagccgctgtacaaagcgctgaacgccggacgtaccagtaagcgtattcataaaggcctggtggtgcgtaaaggctggctgggtaaactgccttcattaccgcttcgctggcgggcgcgtggagtgatgaccctgatgtttatcttgctggcggccatgctttggtttgttgctgccccggtggtgacgtatttcctctgtgtgttagtggtattgttggcaagcgcttgttttgaatggcagattgtgcgcccgatagaaaatgtcgcccgtcaggcactgaaggtggcgaccggagagcgtaatagtgttgagcacctgaatcgcagcgatgagctggggctgacattacgcgcggtagggcagcttggcctgatgtgccgttggctaattaacgatgtctcaagccaggtgtccagtgtcagaaatggcagtgagacgctggcgaaaggcaccgatgaactgaacgaacatacccagcagacagttgataacgttcagcaaacggtggcgaccatgaaccaaatggcggcgtcggtgaaacagaactctgccacggcgtcggctgccgataaactttctatcaccgccagtaatgcggcagtgcagggtggggaggcgatgaccacggtgatcaagacaatggacgatatcgccgacagtacccagcgcattggcaccattacttcgctgattaacgatattgcgtttcagaccaatattctggccctgaatgcggcggtggaagcggcgcgtgccggcgaacagggcaaaggttttgcagtggtggcaggggaagtgcgtcatttagccagccgcagcgctaatgctgccaacgatattcgcaagctgattgatgccagtgctgataaggtgcaatccggttcgcagcaggtacacgccgccggacggacgatggaagatattgtggcacaggtgaaaaacgtcacccagttgatcgcccagattagccattcaacgctggaacaggccgatgggctttccagcctgacccgtgcagtggatgagcttaacctgatcacccagaaaaatgctgagctggtggaagagagtgcgcaggtgtcggcgatggtgaaacaccgcgccagccgactggaagacgcggtgacggtgctgcattaa

SEQ ID NO: 485187 - DNA, 624 bp, Shigella sonnei
atgagccatcatcacgaagggtgttgtaaacatgaaggccagccacgccatgagggctgctgcaaaggtgagaagtcagaacacgagcactgcggacacggtcaccagcatgaacacggtcaatgctgcggtggtcgccacagtcgcggcggcggtcgtcggcaacgtttctttggtcacggtgaattgcgtctggtgattctggatattctctcgcgcgatgacagccacggttacgaattgattaaagcgattgagaatctaacccaggggaattacaccccaagcccgggcgtcatctacccaacgctggattttctgcaggagcagtcgctgattaccatccgcgaagaggaaggtggtaagaagcagattgcgctgaccgaacaaggcgcgcagtggctggaagaaaaccgcgaacaggtggagatgattgaagaacgcatcaaagcgcgttgcgttggtgctgcgctgcgccagaacccgcaaatgaagcgggcgctggataattttaaagcggtgctggatttacgcgtcaaccagagcgatatcactgatgcacaaataaaaaagatcattgcggtgatcgaccacgccgcttttgatattacccaactggattaa

SEQ ID NO: 485188 - DNA, 765 bp, Shigella sonnei
atgaataactccccccgctacccgcagcgcgttcgcaatgatctgcgcttccgtgaactgactgtgttacgcgttgagcgcatcagcgccggttttcagcgcattgtcctcggcggcgaggcgctggacggttttacatcgcgcggctttgacgatcacagcaaactcttctttcctcaacctgacgctcactttgtgccgccaacggtaacggaagagggcatcgtctggccggaaggaccacgcccaccgtcgcgtgactatacgccgctgtatgacgaactacgccatgaactggcgatcgatttctttattcacgacggtggggtcgccagcggctgggcgatgcaggcgcaaccgggcgataaacttacggttgcaggtccgcgcggttcgctggtggtgccggaagattacgcgtatcagctgtatgtctgcgatgaatccggaatgcccgcactgcgccgccgtttggaaacgttgagcaaacttgccgttaaaccgcaagttagtgcgctggttagcgtgcgggataacgcctgtcaggattatctcgcgcaccttgatggttttaatatcgaatggctggcacatgatgagcaggcggtagatgcgcgtctggcgcagatgcaaatccctgccgatgattacttcatctggataaccggcgaaggtaaagtcgttaagaatttaagccgccgctttgaagcggaacagtatgacccacagcgggtacgtgcagcggcttactggcacgcaaagtaa

SEQ ID NO: 485189 - DNA, 507 bp, Shigella sonnei
atggttgaggatattttggctccagggttacgggtcgtattttgcggtatcaaccctgggctttcatccgccgggactggttttccctttgctcatccagcaaatcgcttctggaaggtgatatatcaggccgggtttaccgaccgtcagttgaagccgcaggaggcacagcatctgctggattatcgttgtggcgtcaccaaactggtagaccgtccaacggtgcaagccaatgaagtttcaaagcaggagctgcacgcaggtgggcgtaagctgattgaaaaaattgaagattatcagccgcaggcgttggcgattctgggcaaacaagcatatgaacagggattcagccagcgcggtgcacagtgggggaaacaaacgctcaccattggttcgacgcagatttgggtgctgccaaatcccagcggtttaagtcgcgtttcactagagaaactggttgaagcgtatcgcgagctggaccaggcgctggtagtgcgtgggcgataa

SEQ ID NO: 485190 - DNA, 225 bp, Shigella sonnei
atgcatggggcggtcaaatatctcggctacgctgatgaacacagtgcagagcctgatcaggtgatccttatcgaagcggggcagtttgaggtgttccctccagaaaagtggcacaacattgaagccatgactgacgatacttatttcaacattgacttcttcgtggctcctgaagtcctgatggaaggtgcgcaacaacggaaagtcattcataacgggaaatga

SEQ ID NO: 485191 - DNA, 183 bp, Shigella sonnei; identical to SEQ ID NO: 461587

SEQ ID NO: 485192 - DNA, 249 bp, Shigella sonnei; identical to SEQ ID NO: 461588

SEQ ID NO: 485193 - DNA, 1026 bp, Shigella sonnei
gtgtcagatcagattatcgcccgcgtctcgcaatcccttgccaaagaacagtcactggaaagtctggtccgacagcttctggagatgctggaaatggtcactgatatggaatcaacctacctgaccaaagtggatgtcgaagcgcgcctgcagcatattatgtttgcccgtaacagccagaaaatgcacatcccggagaattttaccgtctcgtgggattactcgttatgcaaacgcgccattgatgaaaactgctttttcagcgatgaagtccctgaccgttggggcgactgtattgcggcacgcaatcttggcatctccacatttctgagcacaccaattcacttaccggatggatcattctatggcacgctttgcgccgccagcagtgagaagcgccagtggagtgaacgcgcggaacaggttttacagttattcgccggactgattgcacaatatattcaaaaagaggcactggttgaacagttgcgcgaagccaatgctgcgctgattgcgcaatcgtataccgactcgttaaccgggttgccgaatccgcgggcgatttttgaaaatctgacgacgctgttttctctcgcccggcatcttaaccataagataatgatcgcgtttatcgatctggataacttcaaattaatcaatgatcgttttggtcataatagtggcgatctgtttctcattcaggttggcgagcgccttaatacgctccagcaaaatggcgaagttattggtcgtctcggcggtgatgagtttttggttgtttcactaaacaacgagaatgcggatatttcgtcgctgcgagaacgcattcagcagcaaatacgtggagaatatcacttaggtgatgttgatttgtattatcccggtgccagtcttggcatagtagaagtcgatcctgaaacaaccgatgcagacagtgccctgcatgctgccgatattgcgatgtatcaggagaaaaaacacaaacagaaaacaccttttgtcgcgcattcagcgccacattgctga

SEQ ID NO: 485194 - DNA, 255 bp, Shigella sonnei
atgaaaattatcagttttgctttgccttgcttgctggtcctggctggttgttcaacctcttctcagccagaagtacctaaaccgccgcagattggtatggcaaatccggcgtcggtctattgccagcagaagggcgggacgctcattccagtgtcgacagcgcaaggggtcagcaacaattgcaaattaccgggcggtgaaacgattgatgaatgggcattgtggcgacgggaccatccggctggtgaaaaataa

SEQ ID NO: 485195 - DNA, 348 bp, Shigella sonnei
atgaatattcagtgcaaacgcgtttatgatccggctgaacagagcgatggttatcgcgtactggtcgaccgcctctggccgcgcggtatcaaaaaaaccgatttagcccttgatgagtgggataaagaaatcacgccgtcaacggaactgcgcaaagcctttcacggcgaagtcgtcgattttgcaacctttcgcgagcaatatcttgcagaactggcgcaacacgagcaagaaggaaagcggctggcggacatcgccaaaaaacagccgctgaccctgctctacgcagcaaaaaacaccacgcagaaccatgcgctggtgctggccgactggctacgtagcttgtga

SEQ ID NO: 485196 - DNA, 1182 bp, Shigella sonnei
atgacctgttcaacttcattaagcggcaaaaacaggattgtccttatcgctggcattctgatgattgccacaacattacgcgtcacctttatcggcgcagcaccgttactggatacgattcgttccgcttactcgctgacgacagcgcaaaccggcttattgaccaccctgccattattggcctttgcgctaatctcacctttggccaccccggtagcgcgacgttttggtatggaacgtagcctgtttgccgcgttacttttgatctgtgctggtatcgcaattcgctctctcccttcgccttacttattatttggcggtacagcggtcattggcggtgggattgcattaggcaatgtcttactgccaggattaattaaacgcgatttccctcattccgtcgccagacttaccggcgcatattccctgacaatgggagctgcagcggcactgggatcggctatgatagtgccgctggctttgaacggttttggctggcaaggcgcgttgctcatgctgatgtgttttcctctgctggctctttttttatggctgccacagtggcgaagccaacaacatgcaaatttgagtacctcgcgcgccttacatactcggggtatctggcgttcgccgcttgcctggcaggtaacattgtttcttgggatcaactcactgatctattacgtgattattggctggcttccggcgatcctcatcagtcacggctatagcgaagcacaggcgggttcactgcatggtttgctgcaactagccacagcagctcccggtttgctgatccctcttttcttacatcatgtgaaagatcagcgtggtattgcagcgttcgttgccttgatgtgcgcagtgggcgctgttgggctctgctttatgccagcgcacgcgatcacctggactctgcttttcggttttggttccggcgcaacaatgatactggggttgacgttcattggtcttcgggcaagttctgcgcatcaggcggcggcactctcggggatggcacaatccgtcgggtatttgctggcagcctgtgggccgccgctaatgggtaaaatacacgatgctaacggtgactggtccgtaccactgatgggtgttgcaatactttcactactgatggcgattttcggactttgcgccgggagagacaaagaaattcgctaa

SEQ ID NO: 485197 - DNA, 819 bp, Shigella sonnei
atgcacaggttgaatctcaatggctatgaacccgaccgacaccatgaagccgcggtcgcattttgtattcacgccggaacggatgagttaaccagtcctgtacatcagcaccgcaaaggacagctgatactagcattacatggtgcaattacctgtacggtggaaaatgctttatggatggtgccgccgcaatatgcggtttggataccgggcggggtggaacatagcaatcaagtgacagctaacgctgaactctgttttctgtttatcgaacccagcgcagtgacaatgccgacaacatgttgcacattgaaaatatcgcccttatgccgggaattgattttaaccctggcaaacaggacgacgactcagcgtgctgagccgatgacccgcagattaattcaggtcctgtttgatgaactccctcagcagccacaacaacagctgcacctgcccgtttcttctcatcctaaaatccgcacgatggtggagatgatggcgaaagggcccgtcgagtgggggtcattagggcaatgggctggcttttttgcgatgagtgaacgcaatcttgcgcgactgatagtaaaagagacggggttgagttttcgccagtggcgtcagcagttacagctgattatggcacttcagggattagtgaaaggcgatactgtacagaaagttgctcatacgctggggtatgattcaacaacggcctttattactatgtttaagaaaggccaggggcaaacgccaggccgatatattgcgggattaactactgtttccccacaatcagcgaaaccagacccgcggcaataa

SEQ ID NO: 485198 - DNA, 447 bp, Shigella sonnei
atgtttgatgtcactttgctgatcctgctcgggttagctgcgctgggctttatcagtcataacaccactgtcgccgtttcaattctggtgttgatcattgtccgcgtcacaccgttaagcacctttttcccgtggattgaaaaacaggggctaagtatcgggataatcattctgacgattggcgttatggcccccatcgccagcgggacgctaccgccctcaaccttgattcactcgtttctgaactggaaatcgctggtggcaattgcagtaggcgtgattgtctcctggctgggtgggcgcggcgtgaccttaatgggcagccagccgcaactggtcgccgggctgctggtaggcactgttttaggcgtggcgctgtttcgcggcgtaccggtcggcccgcttattgccgcgggtctggtttcgctgattgtggggaaacagtag

SEQ ID NO: 485199 - DNA, 504 bp, Shigella sonnei
atgactgaaatggctaaaggaagcgtgacgcatcagcggttaatcgctttattatcacaagaaggtgctaacttccgcgtcgttacccatgaagcggtaggtaaatgtgaagcggtgtcagaaattcgtggcaccgctttaggccagggagctaaggcactggtatgtaaagtcaaaggcaatggcgtaaatcaacatgttctggcgatcctcgctgccgatcaacaggccgatctgagccaacttgccagccatataggcggattacgcgcttcgttagccagccctgctgaagtcgatgaactcacaggctgtgtcttcggcgcgatcccccctttcagcttccatccaaaactcaaactggttgccgaccctctactcttcgaacgatttgatgaaatcgccttcaatgcagggatgctggataaatccgttattttgaaaaccacggattatttgcgcattgcgcaaccagaactgctcaatttccgccgcactgcgtaa

SEQ ID NO: 485200 - DNA, 1389 bp, Shigella sonnei
atgagtgcctatctgcgctatatcgtgcagaaagcagactcctcctttctttatgataagtatcagaatcagagtattgccgcgcatgtgatgcgcgctctcgctgctgagcagtcggaagtgtcgccagaacagcggcgcgccatctgcgaggcttttgagtctgccaataatacccatggcttaaacctgactgcccataaatacccgggcttacgcggcacactacaaaccgcatccactgactgcgacacaattgtggaagctgcagcactattacccgcttttgatcaggcagtggaaggcaaccgccaccaggatgattacggttcaggtcttgggatggccgaagagaaatttcactattatctcgatctcaatgaccgctatgtctatttttatgagccggttaatgttgaatactttgcgatgaataactggtccttcctgcagtcaggaagtattggcatcgatcgcaaagatattgaaaaggtatttaccgggcgtaccgtattgtcgagcatttaccaggatcagcgtactaaacagaacgtgatgagtttgctgacgccggtatatgtcgcagggcagctaaaagggattgtgctgctggatattaacaaaaacaatttgcggaatatcttttacactcatgaccgccctctcctctggcgttttctcaatgtcacgctaaccgataccgattcggggcgcgacattatcatcaaccagagcgaagataatctgttccagtatgtcagttacgtccatgacttaccgggcggcattcgtgtctcgttatccattgatattctttactttatcacgtcttcgtggaaaagcgttctgttctggattttgacggcgttaattttgctgaatatggtccgaatgcacttccgtttataccaaaatgtgtcgcgagaaaatattagtgatgcgatgactggactgtataatcgcaaaattttaacccctgaactggagcagcggttgcagaaactggtgcaatccggttcttcggtgatgtttattgcaattgacatggacaagttaaagcaaataaatgacaccctcggtcatcaggagggggatttagcgattacgttattagctcaggcgattaaacaatcgattcgtaaaagtgattatgccatccgactcggtggcgatgaattctgcatcattcttgtcgattcgacgccgcaaattgcagcacaactgcctgaacgtatcgaaaaacgtctgcaacatatcgcgccgcagaaagaaatcggcttctcttccggtatttacgcgatgaaagaaaacgatacgttacatgatgcgtataaagcttccgatgagcgtttatatgtcaataagcagaacaaaaacagccgttcatga

SEQ ID NO: 485201 - DNA, 747 bp, Shigella sonnei
ttgacacagagcgatccgcgccgtcagttggtggatacattaacacgttgggatggcatcaatttgcttaatgatgatggtaaaacctggcagcagccaggctctgccatcctgaacgtttggctgaccagtatgttgaagcgtaccgtagtggctgccgtacctatgccatttgataagtggtacagcgccagtggctacgaaacaacccaggacggcccaactggttcgctgaatataagtgttggagcaaaaattttgtatgaggcggtgcagggagacaaatcaccaatcccacaggcggttgatctgtttgctgggaaaccacagcaggaggttgtgttggctgcgctggaagatacctgggagactctttccaaacgctatggcaataatgtgagtaactggaaaacacctgcaatggccttaacgttccgtgcaaataatttctttggtgtaccgcaggccgcagcggaagaaacgcgtcatcaggcggagtatcaaaaccgtggaacagaaaacgatatgattgttttctcaccaacgacaagcgatcgtccggtgcttgcctgggatgtggtcgcacccggtcagagtgggtttattgctcccgatggaacagttgatcagcactatgaagatcagctgaaaatgtacgaaaattttggtcgtaagtcgctctggttaacgaagcaggatgtggaggcgcataaggagtcgcaggaagtgttgcacgttcagagataa

SEQ ID NO: 485202 - DNA, 957 bp, Shigella sonnei
atgaacccgattgcagttaccctactcaccggttttttaggcgcgggcaaaaccaccctgctgcgccatattcttaacgaacaacacggctacgagattgccgtgattgaaaacgaattcggcgaagtctccgttgatgatcaactgattggcgaccgcgccacgcagatcaaaacgctgaccaacggctgcatctgctgttcgcgctccaacgagctggaagacgcactactcgacctgctggataatctcgacaagggcaatattcagttcgaccgtctggtcattgaatgcaccggcatggccgatcccggcccgattattcagaccttcttctcccatgagattttatgccagcgctacctgctggacggggtgattgcgctggtggatgcggtacatgccgatgagcagatgaaccagttcaccatcgcccagtcccaggttggctacgccgaccgtattctgctgacgaaaaccgacgtcgcaggcgaagcagagaaactgcgtgaacgcctggcgcgcatcaacgcccgcgcaccggtctacaccgttacccacggcgatatcgacctgggccttctgttcaacaccaacggttttatgctggaagaaaacgtcgtcagcaccaaaccgcgtttccactttatcgcggacaaacaaaacgatatttcgtcgattgtggtggaactggattacccggtagatatcagcgaagtttcccgggtgatggaaaacctgctgctggaatcggcggataaactgctgcgttacaaagggatgctgtggattgacggcgaacctaaccgcctgctgttccagggcgtccagcgcctctacagcgccgactgggaccgcccgtggggcgatgaaaaaccgcatagcacgatggtgtttatcgggattcagttgccggaggatgagattcgggcggcgtttgcgggactcaaaaagtaa

SEQ ID NO: 485203 - DNA, 204 bp, Shigella sonnei; identical to SEQ ID NO: 2032

SEQ ID NO: 485204 - DNA, 2151 bp, Shigella sonnei
atggatacgaaaaaactattcaagcacataccctgggtgattctcggaatcatcggtgcattctgcctcgcggtagttgcattacgtcggggggagcacgtcagcgccctgtggatcgtggtcgcctctgtgtcggtgtatctggtggcgtatcgctactacagtctgtacatcgcccagaaggtgatgaaactcgaccccacgcgcgcgacgcctgcggttattaacaacgacggtctgaactacgttccgaccaaccgttacgtgttgtttggtcaccacttcgccgctatcgccggtgctggtccgctggtcggtccggttctcgccgcacagatgggccacctgcctggcacgctgtggctgctggcgggggtagtactggccggtgcggttcaggactttatggtgctgtttatctcctctcgccgtaacggcgcatctctcggtgagatgataaaagaagagatgggaccagtaccggggactatcgcgctgtttggctgtttcttaatcatgatcatcatccttgccgtcctggcgctgattgtggttaaagccctggccgaaagtccgtggggtgtcttcaccgtttgctcaaccgtaccgattgcgctgtttatgggtatctacatgcgctttatccgtccggggcgtgtgggtgaagtctctgtcattggtatcgtgctgctggttgcctctatctacttcggtggcgtgattgctcacgatccgtactggggtccggcactgacctttaaagacaccaccattaccttcgcgctgattggctatgcgtttgtttccgcattgctgccggtgtggctgatcctcgcaccgcgcgactatctggcaaccttcctgaaaatcggcgttatcgtcggcctggcgctgggtatcgtggtgctgaacccggaactgaaaatgcctgcgatgacccagtacattgacggtactggcccgctgtggaaaggtgctctgttcccgttcttgttcattaccatcgcctgtggtgcggtatctggcttccacgcactgatctcttccggtacgacgccgaaactgctggctaatgaaaccgacgcgcgtttcattggctacggcgcaatgctgatggagtccttcgtggcgattatggcgctggttgctgcgtccatcatcgaaccgggtctttacttcgcgatgaacaccccgcctgctggccttggcatcaccatgcctaacctgcatgaaatgggtggcgagaacgcgccgatcatcatggcgcagctgaaagacgttaccgcacacgcggcagcgaccgtcagctcttggggcttcgtgatttcgccagagcagatcctgcaaaccgcgaaagacattggtgagccttctgtcctgaaccgtgcaggtggtgcgccaacgctggcggtaggtatcgctcacgtgttccacaaagtgctgccgatggctgacatgggcttctggtatcacttcggtattctgttcgaagccctgttcatcctgaccgcgctggatgcgggtacccgttctggccgttttatgctgcaagacctgctgggtaacttcatcccgttcctgaaaaaaaccgactctctggttgccggtatcatcggtactgcgggctgtgtgggtctgtggggctacctgctgtatcagggcgtggtcgatccgctgggcggcgttaagagcctgtggccgctgttcggtatctccaaccagatgctggcagccgtagcgctggtactgggcaccgttgtgctgattaagatgaagcgcacccaatacatctgggtaactgttgttccggctgtatggctgcttatctgcaccacctgggcgctgggtctgaaactgttcagcaccaacccgcagatggaaggcttcttctacatggcaagccagtacaaagagaagattgctaacggtactgacctgacggcgcagcagattgccaacatgaaccacatcgttgtgaacaactacaccaacgcaggcctgagtattctgttcctgattgtggtgtacagcatcatcttctacggtttcaaaacctggcttgcggtgcgtaacagcgacaaacgtactgacaaagaaactccgtacgttccaatcccggaaggcggcgtgaagatctcttcgcaccactaa

SEQ ID NO: 485205 - DNA, 513 bp, Shigella sonnei
atgcaattagatgaacagcgcctgcgctttcgtgacgcgatggccagcctgtcggcagcggtaaatattatcaccaccgagggcgacgccggacaatgcgggattacggcaacggccgtctgctcggtcacggatacaccaccatcgctgatggtgtgcattaacgccaacagtgcgatgaacccggtttttcagggcaacggtaagttgtgcgtcaacgtcctcaaccatgagcaggaactgatggcacgccacttcgcgggcatgacaggcatggcgatggaagagcgttttagcctctcatgctggcaaaaaggtccgctggcgcagccggtgctgaaaggttcgctggccagtcttgaaggtgagatccgcgatgtgcaggcaattggcacacatctggtgtatctggtggagattaaaaacatcatcctcagtgcagaaggtcacggacttatctactttaaacgccgtttccatccggtgatgctggaaatggaagctgcgatttaa

SEQ ID NO: 485206 - DNA, 1563 bp, Shigella sonnei
atgaaaccagaagatttccgcgccagtacccaacgtccgttcaccggggaagagtatctgaaaagcctgcaggatggtcgcgagatctatatctatggcgagcgagtgaaagacgtcactactcatccggcatttcgtaatgcggcagcgtctgttgcccaactgtacgacgcgctgcacaaaccggagatgcaggactctctgtgctggaacaccgacaccggcagcggcggctatacccataaattcttccgcgtggcgaaaagtgccgacgacctgcgccagcaacgtgacgccatcgctgagtggtcacgcctgagctatggctggatgggccgtaccccagactacaaagctgctttcggttgcgcactgggcgcgaatccgggcttttacggtcagttcgagcagaacgcccgtaactggtacacccgtattcaggaaactggcctctactttaaccacgcgattgttaacccaccgatcgatcgtcatttgccgaccgataaagtgaaagacgtttacatcaagctggaaaaagagactgacgccgggattatcgttagcggtgcgaaagtggttgccaccaactcggcgctgactcactacaacatgattggcttcggctcggcacaagtaatgggcgaaaacccggacttcgcactgatgttcgttgcgccaatggatgccaatggcgtcaaattaatctcccgcgcctcttatgagatggtcgcgggtgctaccggctcgccgtacgactacccgctctccagccgcttcgatgagaacgatgcgattctggtgatggataacgtgctgatcccatgggaaaacgtactgatctaccgcgatttcgatcgctgccgtcgctggacaatggaaggcggttttgcccgtatgtatccgctgcaagcctgtgtgcgcctggcagtgaaactcgacttcattacagcactgctgaaaaaatcactcgaatgtaccggcaccctggagttccgtggtgtacaggccgatctcggtgaagtggtggcgtggcgcaacaccttctgggcattgagtgactcgatgtgttctgaagcgacgccgtgggtcaacggggcttatttaccggatcatgccgcactgcaaacctatcgcgtactggcaccaatggcctacgcgaagatcaaaaacattatcgaacgcaacgttaccagtggcctgatctatctcccttccagtgcccgtgacctgaacaatccgcagatcgaccagtatctggcgaagtatgtgcgcggttcgaatggtatggatcacgtccagcgcatcaagatcctcaaactgatgtgggacgccattggcagcgagtttggtggtcgccacgaactgtatgaaatcaactactccggtagccaggatgagattcgcctacagtgtctgcgccaggcacaaagctccggcaatatggacaagatgatggcgatggttgatcgctgcctgtcggaatacgaccagaacggctggactgtgccgcacttgcacaacaacgacgatatcaacatgctggataagctgctgaaataa

SEQ ID NO: 485207 - DNA, 663 bp, Shigella sonnei
ttgccagtacacctcatacctcatgcgtttattacggagtctgacgccgacggtcatgtgttgacggtacgggaagatctgatctggcccctgctggaagttctttatccaggcactcgggaaaccttcggcctgccggggatttgcctgtcactggcagataaacccgacgaactggcggcgctggaacactattggcaactgatagagcgggaatcggtggaacaactgcctggacgggaacacaccctgacgctactggcacaggcagtgttcaccctactgctgcgtaatgcaaaactcgacgaccatgccgccagcgggatgcgcggagaattaaaactgttccagcgttttaatatgctgattgaaagccattttcatcagcactggacagtaccggattacgctaacgaactgcatatcaccgaatcacgcctcacggacatctgccgccgctttgccaaccgtccgccaaaacggttgattttcgacaggcagctgcgagaagccaagcggctgctgctgttttctgataacgccgtgaacaatattgcctggcaactcggttttaaggatccagcttattttgcgcgcttttttaatcgcttagtcggttgctcgcccagtgcttatcgtgccaaaaaagtacctgtgacgtga

SEQ ID NO: 485208 - DNA, 972 bp, Shigella sonnei
gtgtttaattgtgtgggatgcgttcattacattttcaatgacccgaatctgatcctcgggcagattattctgctgatcagagaagccatgctggcgctgctgccgctgattagcggcgtggtgctggtggcgctcatttctccggtcatgctgggggggctggtatttagcggcaaatccttgcagccgaagttttccaaactcaacccgctaccgggcattaaacggatgttctcggcacagactggcgcggagttgcttaaggcaattttgaaaaccatcctggttggcagcgtgacggggttttatctctggcatcactggccgcagatgatgcgcttaatggccgagtctccgactaccgccatgggtaatgcgatggatctggttgggctatgcgcactgctggtggtgcttggtgtcattccaatggtgggatttgacgtctttttccaaatcttcagccacctgaaaaagctgcgtatgtcgcggcaggatattcgtgatgagttcaaacaaagcgaaggtgaccctcatgttaaagggcggatccgtcagatgcagcgagctgctgcacggcgtcggatgatggccgatgtgccgaaagctgatgtcattgtcaataacccgacccactattcggtagcgttgcagtatgacgaaaacaaaatgagcgcaccgaaagtggtcgctaaaggtgcagggctggtcgcgctgcgcattcgtgaaattggcgctgaaaataacgtcccgacgcttgaagcgccgccgctggcgcgagcgctgtatcgacatgcggagattggtcaacaaatcccgggtcaactgtacgccgcggtggcggaagtgctggcctgggtctggcaactgaaacgctggcgtctggctggtggacagcgccctgtacaacctactcatcttccggtgccggaagccctggattttattaacgagaaaccgacccatgagtaa

SEQ ID NO: 485209 - DNA, 1077 bp, Shigella sonnei
atgagtaatctggccgcgatgctgcgcctgcccgcaaacctgaaatcgacacaatggcagatccttgccggaccgattttgatcctgttgatcttgtcgatgatggtgctgccactgcccgcattcatactcgacctgttgtttaccttcaatattgccttgtcgatcatggtgttgctggtggcgatgtttacccagcgcacgcttgagtttgctgcgtttccgaccattctgttgtttactacgttgttgcgtctggcacttaacgtggcttcaacccgtatcattttgatggaagggcataccggcgcggcggcggcagggaaggtggtcgaagcgttcggtcacttcctcgttggtggcaatttcgctatcggtatcgtggtgtttgtcattctcgtgatcatcaactttatggtcattaccaaaggtgccgggcgtatcgcagaagtgggtgcgcgctttgttctcgatggtatgccgggtaagcagatggcgattgacgccgaccttaacgctggattgattggtgaagatgaggcgaaaaaacgccgctccgaagtgactcaggaagccgatttttacggctcaatggacggggcaagtaagtttgttcgcggcgatgccatcgccgggatcctcatcatggtcattaacgttgtcggcgggttgctggtcggcgtgctgcaacatggcatgagcatgggacacgcggcggaaagttatacgctattgaccattggcgatggtctggtggcacaaattccggcgctggtgatttttaccgccgcgggggtcatcgttacgcgtgtcagcaccgatcaggatgttggcgagcagatggtgaatcagcttttcagtaacccaagcgttatgttgttaagcgccgccgtgctcggtttactcggcctggtgcctggaatgccgaacctggtatttttgctgttcactgccggattgctcgggctggcctggtggatacgcggacgcgaacaaaaagcgcctgccgaacccaaaccggtaaaaatggcagagaataataccgttgtcgaagcgacgtggaacgatgtacattaa

SEQ ID NO: 485210 - DNA, 537 bp, Shigella sonnei
gtgtttaaatttcttgtattaacattaggcattatctcttgccaggcttacgcagaagatacggttatagaaaacgaccatgacatttcagccatcaaagattgttggcaaaaaaattcagatgatgatactgacattaacgtgatcaaatcatgcctgcgacaagaatacaatctcgtcgatgcgcaattaaataaagcctatggtgaagcttatcgttatatagaacaagtgccacgcacaggtgtaaaaaaacctgataccgaacaacttaacttgcttaaaaaatcacagcgagcctggctggattttagggacaaagaatgtgaattaatcctttcaaatgaggacgttcaggatttaatgtacatcgttccacgtcgcttcgacaacggtattattctctgccatttttaccggtttgggttcggcaggcgctttttgttcgcgtccgcgtatccaccaggccagcccgagcaatccggcagtgaacagcaaaaataccaggttcggcattccaggcaccaggccgagtaa

SEQ ID NO: 485211 - DNA, 1737 bp, Shigella sonnei
gtgaatattcaggctcttctctcagaaaaagtccgtcaggccatgattgcggcaggcgcgcctgcggattgcgaaccgcaggttcgtcattcagcaaaagttcagttcggcgactatcaggctaacggcatgatggcagttgctaaaaaactgggtatgacaccgcgacaattagcagagcaggtgctgactcatctggatcttaacggtatcgccagcaaagttgagatcgccggtccaggctttatcaacattttccttgatccggcattcctggctgaacatgttcagcaggcgctggcgtccgatcgtctcggtgtttctacgccagaaaaacagaccattgtggttgactactctgcgccaaacgtggcgaaagagatgcatgtcggtcacctgcgctctaccattattggtgacgcagcagtgcgtactctggagttcctcggtcacaaagtgattcgcgcaaaccacgtcggcgactggggcactcagttcggtatgctgattgcatggctggaaaagcagcagcaggaaaacgccggtgatgaaatggagctggctgaccttgaaggtttctaccgcgatgcgaaaaagcattacgacgaagatgaagagtttgccgagcgtgcacgtaactacgtggtaaaactgcaaagcggtgacgaatatttccgcgagatgtggcgcaaactggtcgacatcaccatgacgcagaaccagatcacctacgatcgtctcaacgtgacgctgacccgtgatgacgtgatgggcgaaagcctctacaacccaatgctgccaggaattgtggcggatctcaaagccaaaggtctggcagtagaaagcgaaggggcgaccgtcgtattccttgatgagtttaaaaacaaggaaggcgaaccgatgggcgtgatcattcagaagaaagatggcggctatctctacaccaccactgatatcgcctgtgcgaaatatcgttatgaaacactgcatgccgatcgcgtgctgtattacatcgactcccgtcagcatcaacacctgatgcaggcatgggcgatcgtccgtaaagcaggctatgtaccggaatccgtaccgctggaacaccacatgttcggcatgatgctgggtaaagacggcaaaccgttcaaaacccgcgcgggtggtacagtgaaactggccgatctgctggatgaagccctggaacgtgcacgccgtctggtggcagaaaagaacccggatatgccagctgacgagctggaaaaactggctaacgcggttggtattggtgcggtgaaatatgcggatctctccaaaaaccgcaccacggactacatcttcgactgggacaacatgctggcgtttgagggtaataccgcgccatacatgcagtatgcttacacgcgtgtattgtccgtgttccgtaaggcagaaattaacgaagagcaactggctgcagctccggtaatcatccgtgaagatcgtgaagcgcaactggcagctcgcctgctgcagtttgaagaaaccctcaccgtggttgcccgtgaaggcacgccgcatgtgatgtgtgcttacctgtacgatctggctggtctgttctctggcttctacgagcactgcccgatcctcagcgcagaaaacgaagaagtgcgtaacagccgtctgaaactggcacaactgacagcgaagacgctaaagctgggtctggatacgctgggtattgagacagtagagcgtatgtaa

SEQ ID NO: 485212 - DNA, 567 bp, Shigella sonnei
atggcgaactggcaatctatcgacgagctgcaggatattgcatcggatttaccgcgatttacccacgcattagatgaactttccctccgtctggggttgaatatcactccgctgactgccgatcacatttctttgcgttgccatcaaaacgccactgctgaacgctggcgtcgcgggtttgaacagtgtggcgagcttttgtcagaaaatatgatcaatggcagaccgatttgtctgtttaaattgcatgaaccggtacaggttgcgcactggcagttttctattgtggagctaccgtggcccggggaaaaacgttacccacacgaaggttgggaacatattgaaatcgttctgctgggtgatccagaaacgctgaatgcccgtgcgctggcattgctttctgatgaaggactcagcctaccggggatctcagttaaaaccagttcaccaaaaggtgagcatgagcgattaccgaatccgacgctggcggtcaccgatggcaaaacaactattaagtttcatccgtggtccattgaagagatcgttgccagcgagcagtcagcgtaa

SEQ ID NO: 485213 - DNA, 747 bp, Shigella sonnei
atggcattactggaaatttgctgttacagcatggaatgtgcactaacggcgcagcaaaacggcgcagacagagttgaattatgcgcagccccaaaagaggggggcttaacgccgtcgttgggggtactgaaatccgtgcgccagcgggtgacgatccctgtgcatccgataattcgcccacgcggtggtgatttttgctacagcgacggtgagtttgccgccattcttgaggatgtgcgcacggtccgcgaattaggttttcctggactggtgacgggcgttctcgatgttgacgggaatgtcgatatgccacgaatggaaaaaataatggctgctgccggtccgctggcagtgacttttcatcgcgccttcgatatgtgcgctaaccctttatatacactcaataatcttgcggaattgggcattgcccgggtactgacatcagggcaaaaatcagacgcactgcaaggtttatcaaaaattatggaacttattgcccatcgtgatgctccaatcattatggccggagcaggagtccgtgcagaaaacctgcaccacttcctcgatgccggagtgctggaagtccatagctccgcgggagcgtggcaagcctcaccgatgcgttatcgtaatcaaggattgtccatgtcatcagatgaacacgcggacgagtattcgcgttatatcgtagacggggcggcggttgctgaaatgaaaggaatcattgaacgccatcaggccaaatga

SEQ ID NO: 485214 - DNA, 1101 bp, Shigella sonnei
atgcgagggaaaaaacgcattgggttattgtttttgctgatagcggttgtggttggtggcggcgggttattgctggcgcaaaaagccttacataaaacgtcggatacagcattttgcctttcctgccactcgatgagtaaatcttttgaggaatatcagggaactgtccacttttcgaaccagaaagggatacgtgcggaatgtgcagattgccatattccaaagtcagggatggattatttatttgctaaattaaaagcatctaaagatatttatcatgaatttgttagcggcaaaatagacagtgacgataagttcgaaactcatcgccaggaaatggccgaaacagtatggaaagaattaaaagcaactgactctgcaacgtgccgtagttgccattcttttgatgccatggatattgcctcgcaaagtgaatctgcgcagaaaatgcataacaaagcacaaaagggcggcgaaacctgtatcgattgtcataaaggcattgcccattttccgccagaaataaaaatggatgacaacgcggcgcatgagctggaaagtcaggccgctacttcagtgactaatggcgcacatatttatcctttcaaaacttctcgcataggcgagctggctaccgtgaatcctggtaccgatctcaccgtcgttgatgccagtggcaaacagccgatcgttctgttgcagggttatcaaatgcagggcagtgaaaacacgctctacctggcggcaggtcaacggctggcgctagccacattaagtgaagaaggtatcaaggcgctcacggtaaacggggaatggcaggctgacgaatacggcaatcaatggcgtcaggcgtctttacagggtgcgcttaccgatcccggattagcggaccgtaaaccgctatggcaatacgctgaaaaacttgacgatacctattgcgctggttgtcatgcccctattgccgccgaccattacaccgtcaatgcgtggccgtccattgccaaaggaatgggggcacgaaccagcatgagcgaaaacgaactggacattttaacgcggtatttccagtacaacgccaaagatattaccgagaaacagtga

SEQ ID NO: 485215 - DNA, 831 bp, Shigella sonnei
atgtctatgccattaagcaatgcccttcagagtcaaattattacagataatcacttccttcatcacccaatagtcgacagtgagtttacacataaattaaaatatgcacgcatggatttggaaaacatctatcttccgcctcttactcgtggcaataaccataattacgatggaaaaagcgctgtcgaaattagaaaacttgatattagtaaagagtcctggccatttaattatgtgacaggagcatgcagagaatccgatggtattacaacaacaggacgtatgctctatcggaacttgaaaatcacctcagctttagacgaaatatatggtggcatatgtaaaaaggcgcatgctgccacagagttagcagaaggtttacggctaaatttatttatgaagagccctttcgatcctgttgaggactatacagttcatgaaataacattaggccctggttgcaatgttcctggttatgccggaaccacgataggatatatttcaacccttccagcttctcaggcaaaaagatggaccaatgagcagccaaggattgatatctatattgatcagataatgacggtaacaggggtagcaaattcttccggattcgcccttgccgcattacttaatgctaatattgagttgggtaatgacccaataattggtatagaagcctatcccggtaccgcggagatccatgcaaaaatgggatataaagttatcccgggtgatgaaaatgcaccactcaaacgtatgactctgcaaccgtcatctcttccagaactgtttgaattaaaaaatggtgagtggaattatattggtaaataa

SEQ ID NO: 485216 - DNA, 774 bp, Shigella sonnei
atgaaatctgccacctctgcgcaaagaccttaccaggaagtcggggcgatgatccgcgatctgatcataaagacgccatacaatcctggcgaacggctgccgccggagcgtgaaattgcagaaatgcttgatgtcacgaggacggtggtacgtgaagcgctgatcatgctggagatcaaagggctggtggaagtgcgccggggtgccggtatctatgttcttgatagctcaggcagccacaacacagacagtccggatgctaacgtctgcaatgatgccggtccttttgagctgttacaggcgcgtcagttactggaaagtaacatcgcggaatttgccgctttgcaggctacccgcgaagatatcgtcaaaatgcgtcaggcattgcaactggaagagcgtgagctggcttccagcgcgccgggcagcagcgaaagtggtgatatgcagttccatctcgccattgccgaagcaacgcataacagcatgctggtggagctgttccgtcagtcctggcagtggcgggaaaacaatccaatgtggatccagttgcacagccatctggatgacagcctgtatcgcaaagagtggttgggcgatcacaaacagatcctcgccgcgttaatcaaaaaagatgcccgagcggcgaagctggcaatgtggcggcatctggaaaacgttaagcaacgtctgctggaattctcgaacgttgacgatatttattttgatggctatctgtttgattcatggccgctggataaagttgacgcctga

SEQ ID NO: 485217 - DNA, 1461 bp, Shigella sonnei
atgactactattgttgacagcaatctgccggttgcccgcccgtcatgggatcattctcgtctggaatcacgcattgtgcatctcggttgcggggcgtttcaccgcgcgcaccaggcgctgtacacccatcatctgctggaaagtaccgacagcgactggggtatctgcgaagttaacctgatgccaggcaacgaccgtgtgctgattgaaaacctgaaaaaacagcaactgctgtacaccgtggcggaaaaaggcgcagaaagcaccgagctgaaaattatcggttcgatgaaagaagccctgcatccggaaatcgacggttgtgaaggtattctcaacgcgatggcgcgtccgcagacggcgattgtctccctgacggtcacagagaaaggttattgcgccgatgcggcaagcggtcagctggatctcaataacccgctgatcaagcacgatctggaaaacccgactgcgccgaagtccgcgattggttacatcgtcgaagccttgcgtctgcgtcgtgaaaaagggctgaaagcgtttacggtgatgtcctgcgacaacgtgcgtgaaaacggtcatgtggcgaaggtcgcggttctggggctggctcaggcacgtgatccgcagctggcggcatggattgaagagaacgtcaccttcccgtgcaccatggttgaccgcatcgttccggcggcgacgccagaaaccttacaggaaattgctgaccagctgggtgtttacgacccgtgcgccattgcctgcgaaccgttccgtcagtgggtgattgaagataacttcgttaatggtcgtccggactgggataaagtgggcgcacagttcgttgcagacgttgtgccgttcgaaatgatgaaactgcgtatgctgaacggcagccactctttcctggcgtacctcggttacctcggcggctatgaaaccattgccgacaccatgactaatccggattatcgcaaagcggcctttgccctgatgatgcaggaacaagcgccaacgctgtcgatgccggaaggtacagacctgaacgcctatgcgacgctgctgatcgagcgtttcagcaacccgtctctgcgtcaccgtacctggcagattgcaatggacggcagccagaagttaccgcagcgtcttctggatccggtgcgtctgcacctgcaaaacggcggcagctggcgtcacctggcactgggcgtggctggctggatgcgctacacccagggcgtggatgaacagggtaatgccattgacgtggttgacccgatgctggccgagttccagaagattaacgcgcagtatcagggcgcagaccgcgtgaaagcgctgctgggcctgagcggcatttttgccgatgatctgccgcagaatgccgactttgttggcgcggtgacggcggcatatcagcagctgtgcgaacgcggtgcgcgcgagtgtgtggctgcgctgtaa

SEQ ID NO: 485218 - DNA, 1185 bp, Shigella sonnei
atggaacagacctggcgctggtacggcccaaacgatccggtttctctagctgatgtccgtcaggcgggcgcaactggcgtggttaccgcgctgcaccatatcccgaacggcgaagtatggtccgtagaagagatcctcaaacgcaaggcgatcgttgaagacgcaggcctggtatggtctgtcgtagaaagcgtgccaattcacgaagatatcaaaacccacactggcaactatgaacagtggatcgctaactatcagcagactctgcgcaacctggtgcagtgcggcattcgcaccgtgtgctacaacttcatgccggtgctcgactggacccgtactgacctcgaatacgtgctgccagacggctccaaagctctgcgcttcgaccagatcgaattcgctgcattcgaaatgcatatcctgaagcgtccaggcgcggaagcggattacaccgaagaagaaattgctcaggccgctgaacgcttcgccactatgagcgacgaagacaaagcgcgtctgacccgtaacatcattgccggtctgccgggcgcggaagaagggtataccctcgaccagttccgtaagcacctggagctgtataaagatatcgacaaagccaaactgcgcgaaaactttgccgtcttcctgaaagcgattattccggttgccgaagaagttggcgtccgtatggctgttcacccggacgatccgccgcgcccgatcctcggcctgccgcgcattgtttccaccattgaagatatgcagtggatggttgataccgtaaacagcatggcgaacggtttcaccatgtgcacaggttcctacggcgtgcgtgctgacaacgatctggttgatatgatcaagcagttcggtccgcgtatttacttcacccatctgcgctccaccatgcgtgaagataacccgaaaaccttccacgaagcggcgcacctgaacggtgacgttgatatgtacgaagtggtgaaagcgattgttgaagaagaacaccgtcgtaaagcggaaggcaaagaagacctgatcccgatgcgtccggaccacggtcatcagatgctggacgacctgaagaagaaaaccaacccaggttactccgcaattggtcgtctgaaaggcctggctgaagttcgcggtgtcgaactggcgatccagcgcgctttctttagccgttga

SEQ ID NO: 485219 - DNA, 1344 bp, Shigella sonnei
atgcatgtgcttaacattctctgggtggtattcggcattggcctgatgctggtactgaatttgaagttcaaaatcaattcaatggtggctttgctagtggcggcgctgtccgtcgggatgctggcgggcatggatttgatgtcgctgctgcacacaatgaaagcgggcttcggcaacacgctgggggaactggctatcatcgtggtgttcggtgcggtcatcggtaaattgatggtcgactccggcgcggcgcaccagatagcgcatacgctgctggcgcgtctcggtctgcgctatgtacagctgtcggtaattatcatcggcctgattttcggtctggcgatgttctatgaagtggcctttatcatgttagcgccgctggttattgtcattgccgccgaagctaaaatcccgtttctgaaactggcgatcccggcagtagcagctgccactaccgcacattcactgttcccaccgcagccgggtccggtggcgctggtgaatgcttatggcgcggatatggggatggtttatatctatggcgtactggtgacgatcccaagtgtcatctgcgcaggtctgatcctgccgaagttcctcggcaatcttgagcgcccaacgccatcattcctgaaagcagatcaaccggtagatatgaataatctgccctctttcggcgtttcgattctggtgccgctgatcccggcgatcattatgatctctaccaccatcgccaatatctggctggtaaaagatacccctgcctgggaagtggttaactttatcggttcctcgccgattgcaatgtttattgcgatggtggttgcattcgtactcttcggcaccgcgcgcgggcacgatatgcagtgggtgatgaacgcttttgaaagcgcggtgaagagcattgcaatggtgattctgatcatcggtgcgggtggcgtgctgaagcagaccatcatcgacaccggcattggtgacaccatcggcatgttaatgtcccacggcaatatctcgccctacatcatggcatggctgatcaccgtactgattcgtctggcgacgggtcagggtgtggtttcagcgatgaccgccgccgggattatcagtgctgcaatccttgatacagcaactggtcagctggttggcgtgaatccggcgctgctggtgctagcgacggctgcgggttccaacaccctcacccacattaatgatgcctcattctggctgttcaaaggttactttgacctgtcagtaaaagacacgttgaaaacctggggtcagctggagctggtcaactccgtggttgggctgattattgtgttgattatcagcatggtagcgtaa

SEQ ID NO: 485220 - DNA, 195 bp, Shigella sonnei
atgtacctctcaagaataaccttacataccggccagctttcgcctgcgcagttgctgcatctggtggatcgcggtgaatatgtgatgcatcagtggctgtgggatcttttccctggcggcaaagaaaggcaatttctttatcgtcgggaagaactccaggggggtgcccctattaagttgtcaagcatgttatga

SEQ ID NO: 485221 - DNA, 747 bp, Shigella sonnei
atgagccaatatctgatttttcagcttcatgggccgatggcgtcctggggtgtcgatgctccaggtgaagttcgtcatacccatgaacttccttcgcgctcagcattgctggggctactggctgccggggtagggattcggcgtgatgataccgaacgcttaaacgcgtttaatcgccactattcactggtggtttgcgccagccgtaacccgcgctgggcacgggattatcacacggtccagatgccaaaagaggtgcgtaaagcacgttatttcagccgtcgtgaagagttgagcgaccctgagcttttgagcgcgattatctcccggcgcgactactacaccgatgcctggtggatggtggcggtggcaacaacagccgatgcgccttacagcctcgaacagttgcaggacggtttacgccatccagtttttccgctttatctggggcgaaaaagtcatccgctggcattacctcttgcgccgttactgctcgaaggcaacgcgtgtgatgccttatgtaatgcataccaacagtatcaggatcatttccataaactgaaagtctcactcccgaaacttcaggatgaatgctggtgggaagggaaacacgacggcctggtcgcgagcaaaatattacgccgccgggatgttcctttaaatcgtcagcagtggctgtttggggaacgcaccgtcaatcaggggccgtggctcagcaaggaggaaccatgtacctctcaagaataa

SEQ ID NO: 485222 - DNA, 1056 bp, Shigella sonnei
atgacaacatttattcagcttcatgtgttaaccgcttaccctgctgccaaccttaaccgtgatgacaccggtgcgccaaaaactgtggtgctgggtggagcaacgcgtctgcgcgtttcctcgcaaagtctgaaacgtgcgtggcgcacttctgcactttttgaacaggcactggcgggccatattggtattcgcagtgggcgtattgcgcgtgaggcggcaactatcctgattgagaaagggattgaagataaaaaagccatcgaatgggcggcaaaaattgctgattatcttgggaaagctaaaaatgacaaaaaaccaaaagatccgctcactaacgccgaaactgaacaattagttcatatcagcccggcagaatttgacgccgtaaaagcgcttgctcatcaactggcagaagaaaagcgcgcgccaaaagaggaagatctcgcgttgttacgtaaagaccgtatagcggtagatatcgctatgtttggtcgtatgctggcgaataaacctgagtttaatgttgaagccgcctgccaggtcgcgcatgcgtttggtgtcagtgaaacgattgtcgaagatgattttttcaccgccgttgatgatttgcgccaggcctctgaagatgccggtgccgggcatctcggagaaaccggattcggttcagcacttttctacacctatatctgcattgataaagatctgctggtagaaaacctcggcggtgacgaagcgttagctaatcagaccatacgcgcttttacggaagccgcgcttaaagtttccccaaccggtaaacaaaatagctttgccagccgtgcctatgcttcctgggcgctggcagaaaaaggcaccgatcaaccacgctctctggcggcggctttctatgaacccattaatggcacacgtcagttagatgtggcggtgcagcgtattacaacgcttcgcgaaaacatgaatacggtctacgaacagaagaccgaatgcgcaagttttgacgtgatgaacaaacagggaagcatgaaggacgtgctggactttatctgcgcgtaa

SEQ ID NO: 485223 - DNA, 537 bp, Shigella sonnei
atgagtattgtaaaagaggagcacaaagccacgctgcgcaaatggcacgaggaattgcaggagaaacgcggcgaacgtgccagtctgcggcgtagtacgacggttaatgatgtttgtctgacggatggatttcgcctgtttctgaagaacagacaaataaagtggcaggatgaacctgagtggcgtatcaccgcactggcgctgatagccgcagttagcgccaatgttaaagccattgatgaacggcagccttttgccgcgcaactggcggcggtaatgtcaaaggggcgttttactcgcctgtcagcagtaaaaacaccggatgaattactgcgccagttacgccgcgccgtcagattattaaacggttccgtcaatcttgactccctggcagatggcattttccgctggtgccaggagagcgacgacctgctcaatcatcaccgccgccagcagcggccaaccgaatttatccgtatccgctgggcgctggaatattaccaggctggcgacgccgataacgaacaaaatcaataa

SEQ ID NO: 485224 - DNA, 330 bp, Shigella sonnei
ttgaaagaagcatggttctccgatccaaaaggtgcaaggggtgattttagttttgtggatatcgacttctggaacaaaactcagcatcgcttcctgaggttagtgcgccaaattgaagaaggtcaggatgcggatgaattactcagcaaatggaataaggaaatttggttattcgcgcgtcaggattttgacgagcgtgtattcaccaatccttatgagcccgttgatttggaacgcatcatgaccgcgcgcaagaaatattttacaacatcggcggagaagcaaagtgctaaagccgccagggagaaaaagcaggaggctgctgaatga

SEQ ID NO: 485225 - DNA, 1215 bp, Shigella sonnei
atgaactcgttttcacttctgacaaccccgtggttgcccgttcgttttaaagacggaacgacaggcaaactggcgccagtcgatctggcggatgaaaatgttgtcgatatttctgcgccgcgggcagatctccagggtgcggtatggcagtttttgctggggctactacaaaccagcttcgcgccaaaagatcatcgtcgttgggatgatatctgggaagacggactggaagctgaaaagctacgggaagcattgctgtcattagaacatgctttccagtttgggccagattccccttcatttatacaggatttcgaggcgctcaccggagataaagttccggtcgcttcgctactgcctgagattcccggcgctcaaacaacgaagtttaataaagaccactttatcaagcgtggtgtaacggaatacctgtgcccacattgctctgcgttagctctgttctccctacagttgaatgcgccgtcaggtggcaaaggctaccgcaccggtttacgcggcggtgggccgatgaccactctgattgaattacaggaatatcagggtaatcaacaaactcccttgtggcgcaaactgtggatcaatgtcatgccgcaggatgaagccgatttaccgctacccaaaaaatttgacgatctggttttcccctggcttggcccgacgcgcatcagcgaactggccggtgcggtggtaaccgatgagcaggtcaataaactccaggcgtactggggaatgcctcgccgtattcgtattgattttaataccaccacagtcggcaactgcgatatttgcggtgagcagagcgacgcgcttctgagcctgatgacgaccaaaaattacggcgctaactatgccatgtggcagcatcccttaacgccttaccgtgtactacttaaagagggcggcgagttttactcggtcaaaccacaaccgggcggtttaatctggcgcgactggttaggccttatcgaaacgggtaagtcagaaaacaatacggaacttcccgcgctggtggtgaaactctttaatgccagcagtctcaagcaggcaaaagtgggcctgtggggatttggctatgatttcgacaacatgaaagcgcgctgttggtacgaacatcatttcccgctgctgctcaataaaaagaaggccagataccgaaactgcggctggctgcgcaaacggcttcacggattctaa

SEQ ID NO: 485226 - DNA, 2700 bp, Shigella sonnei
atgcgtaaatatcctttaagtttactgaaggataaaaatattgtgactttttttgatttctggggaaaaacccgacgcggcgagaaagacgggggcgacgactatcaccttctttgctggcattcgctggatgtagccgcgatgggctatttaatggttaaaagaaattgcttcgggctggctgattattttcgtcaattagggatttctgacaaggaacaggcggctcaatttttcgcctggttgctgtgctggcacgatattggaaaatttgcccgctcttttcaacaactttacctgccccctgaactcaagattcaggaaggtgccagaaaaaattacgaaaaaatctctcattcaacgctgggctactggttgtggaatcattatttaagtgaatgtcaggagttacttccttcatcttcgctctctccgcgcaaacttaggcgagtgatagaaatgtggatgcccgtgacgacagggcatcatggtcggccccctgatcgtatggatgaattggataattttctgcctgaagacaaagctgcagcacgagattttctccttgaaatcaaaccactgtttccgctcatagagatccccgcattctgggatgatgatgagggcattgaacttataaaacacctttcctggtatatctctgcaaccgtcgtgctcgcagactggacgggttcgtcaacgcgattttttccacgcgtcgcacacccaatggatattaaaggttactggcagaaaactttagttcaggctcaaaacgccttaaccgtctttcctctaaaagcaaaagtcgcgcctttcaacggaattaatacgctgtttccttttattgagaatccgacaccgttacagcaaaaggtgctggatctggatatcagccagcaaggaccgcagttatttattctggaagatgtgactggcgcaggtaaaacagaagcggcgcttatcctggcgcacaggttgatagctgcggggaaggctcaggggctgttttttggtctgccaacaatggcaacggccaatgccatgtacgatcggctggtcaaaacctggcttgctttctattcgccagaatcccgccccagcctggtgctggcacatagtgcccgcacattaatggaccgctttaatgaatcactctggtctggtgatttagtcgggtcagaagaaccggatgaacaaacgttcagtcagggatgtgcggcctggtttgccgacagtaacaagaaggcgttgctggctgaaattggcgtcggcacgctggatcaggcgatgatggcggtgatgccgttcaaacataataatctgcggcttctggggctgagtaacaaaatcctgctggctgatgagatccacgcctgtgacgcttacatgtcgtgcattcttgaagggttgatcgagcggcaggcgcgtggcggaaacagcgttattttgctttctgccacgttatctcaacagcagcgcgacaaactcgtcgctgcctttgcgcggggtacagagggcctgcaagaagctccgttcctggaaaaggatgattacccctggctgacgcatgtcacgaaatccgatgtgaactcacaccgggtagcgacgcgcaaagacgttgagcgtagcgtcagcgtgggttggcttcatagtgaacaagagtgtattgcgcgtatcgaatcggcggtaagtcaggggaaatgcatcgcctggatccggaattctgtcgatgacgctattaaggttcatcgtcagctgcttgcccgcggcgtcattcctgcttccagcctttcactttttcatagccgctttgcttttagcgatcgccagcgaattgaaacggagacactggcacgctttggtaaagaagatagctcacagcgtgccggaaaagtccttatttgtactcaggtattagagcagagtgtcgattgtgacctggacgaaatgatctccgacctggcccctgttgatttgctgattcagcgagcaggacgattacagcggcatatccgcgatattaatggtcagttaaagcgtgacggaaaggacgagcgttccccccctgaattgctgattctggctcccgtctgggacgactctcctggcgacgaatggtttggcagtgccatgcgtaacagtgcatttgtctatcccgatcatgggcgaatctggctgacgcagcgtgtgctgcgtgagcaaggtgctattcagatgccacacgcagcccggcttcttattgaatccgtctacggtgaggacgtggtaatgccggaaggatttgcccgcagcgagcaggagcaagtgggcaaatattactgtgatcgcgcaatggctaaaaagtttgtgctgaacttcaggcccggctatgccgccaatatcaacgattacctcccagaaaaactgtcgacacgtctggctgaggagtctgtttccctgtggctggctacctgtattgacggtgtggtgaagccttatgccaccggtgctcacgcatgggaaatgagcgttgtcagagtgcgccgaagctggtggaaaaaacatcgggatgagttttctttactggagggagaggcgttcaggctgtggtgcattgaacagcgacaagatccggagatggcaaacgttattttagtcaacgatgacgaaagttgtgggtattcggctacggaaggattgattggcaaggttggttga

SEQ ID NO: 485227 - DNA, 936 bp, Shigella sonnei
atgaacttcagacgcctgaaatacttcgtaaaaattgtagatattggtagcctgacccaggctgctgaagtattgcatatcgcacaaccagcgctcagccagcaggttgccacactggaaggtgagttaaatcaacaacttttgatccgtacaaagcggggcgttacgccaacagacgccggaaaaattctctatacccatgcgcgggccattttacgtcagtgtgaacaggcccaactggcggtgcataacgttggtcaggcattatcggggcaagtctcgattggctttgcaccaggaaccgctgcgtcatccatcaccatgcccttattacaggcggttcgcgctgaatttccggagatcgttatctatcttcatgaaaatagtggtgcagtgcttaacgaaaaattgataaatcaccaactcgatatggcggtgatttatgagcattcccctgtggctggtgtatccagtcaggctttgctgaaagaagatctttttctggtaggaactcaagattgcccggggcaaagcgttgatgtgaatgctattgcgaaaatgaacctctttctccccagtgattacagtgctattagacttcgtgttgatgaggctttttccttacggcgattcacggcaaaagtcattggtgaaattgagtctattgccacgcttaccgcagcgattgccagcggcatgggcgttgcagtattacccgaatcggccgcgcgttcgttatgtggcgcagtaaatgggtggatgtcacgcattaccactccttccatgagtctctctttgtcattaaatttacccgccagagcgaacttatcgccacaggcacaggcagtgaaagagttgttaatgtcagtgattagttccccagtgatggaaaaaaggcagtggcaattgggtgatgctgccaacttactgatttag

SEQ ID NO: 485228 - DNA, 639 bp, Shigella sonnei
gtggttaacgtcgctgagatgcgtctttattactacccaccagacagtaatactgtggaagtctttcctattggtatcggccaggctgggcgagaaaccccgcgtaactgggtgactaccgttgaacgtaaacaagaagctccaacctggacgccaacgccgaacactcggcgcgaatatgcgaaacgaggggagagtttgcccgcatttgttcctgcgggccccgataatcccatggggctgtacgcgatttatattggcaggttgtatgccatccatggtaccaatgccaattttggtattgggctccgggtaagtcagggctgtattcgtctgcgcaatgacgatatcaaatatctgtttgataatgttcctgttgggacgcgtgtgcaaattatcgaccagccagtaaaatacaccactgaaccagatggctcgaactggctggaagttcatgagccgttgtcgcgcaatcgtgcagaatatgagtctgaccgaaaagtgccattgccggtaaccccatctttgcgggcgtttatcagcgggcaagaagttgatgtaaatcgcgcaaatgctgcgttgcaacgtcgatcgggaatgcctgtgcaaattagttctggttcaagacagatgttttaa

SEQ ID NO: 485229 - DNA, 291 bp, Shigella sonnei
atgatgcgtcgtgtaaatattttttgctcatttgctctgctttttgccagccataatagcctggcggtaacttatccattacctccagagggtagccgtttagtggggcagtcgcttactgtaactgttcctgatcacaatacccagccgctggagacttttgccgcacaatacgggcaagggttaagtaacatgctggaagcgaacccgggcgctgatgttttttttgccgaagtctggctcgcaactcaccattccgcagcaactgattttgcccgccactgttcgtaa

SEQ ID NO: 485230 - DNA, 1080 bp, Shigella sonnei
atgcaaacacttgccgatttactgaatacgatccctgctattgatcctgccgctatgtcgcgtgcacaacggcatatcgacgggttactcaaacctgttggtagcctgggaaggctggaggcgcttgccatacaactggcaggaatgccggggttgaatggcgttccgcatgtgggcaaaaaagcggtactggtcatgtgtgccgatcacggcgtctgggaggaaggggtcgctatttccccaaaagaagtgacagccattcaggctgaaaatatgacccgcggaacaaccggcgtgtgtgtgctggcagcacaagcgggcgctaacgtctacgtaattgatgttggtattgatactgctgagcctatccccgggcttatcaacatgcgtgttgctcgaggtagtggcaatattgcttcagctccggcaatgagtcgccatctggcagaaaagttgcttttggacgtcatatgttatacgcgggagctggcaaaaaacggtgttacgctgtttggtgtaggtgacctggggatggcaaacacgacaccggcagcggcaatagtcagcacaatcactggccgggctcctgaagaagtggttgggattggcgcaaacctgccgacagataaactggctaataaaattgatgttgtgcgccgggcgattacgttgaatcaaccaaatccgcaggatggcgttgatgtcctggcaaaagtgggtggatttgatttggtcggaatggctggcgtgatgttaggcgctgcttcctgcggtttacccgtgttgctggatggatttctttcttatgctgccgcgctcgcagcctgccagatgtctcctgcaatcaaaccgtatctcattccttctcacctgtcggcagaaaaaggggcgcgtattgcgctgtcgcatttggggctggagccttatctcaatatggagatgcgtttaggtgagggtagtggcgcagctctggcgatgcccatcatcgaagctgcctgtgcgatatataacaacatgggcgaacttgctgccagtaatattgttctaccggggaatacgacttctgatttgaacagttaa

SEQ ID NO: 485231 - DNA, 744 bp, Shigella sonnei
atgagtaaattattttgggcgatgctctcttttattacgcgtctgcctgtaccgcgtcgctggtcccagggactggatttcgagcattattctcgcggtattattacttttcctttaattggattattgcttggcgcgattagcgggctggtcttcatggtgctgcaggcatggtgtggcgtaccactggcggcactgtttagcgtacttgtgctggcgctgatgaccgggggattccacctggacggcctcgccgatacctgtgatggcgtattttctgcacgtagccgcgatcgcatgttggaaatcatgcgtgatagccgtttaggcacccacggcggtctggcattgatttttgttgtactggcaaagattctggtattaagcgagttggctctgcgtggcgaaccgatccttgcatcgctggcggcagcatgtgcggtcagccgcgggactgccgcattattgatgtatcgtcatcgttatgcccgggaagaaggacttggcaatgtgttcattggcaaaattgatgggcgacaaacctgcgtcacactcggcttagccgctatttttgctgccgtattattgccgggtatgcatggtgtggctgctatggtggtgacgatggtggcgattttcatcctcggtcagcttctcaaacgtacgctgggcgggcaaaccggcgatacgctgggagctgctatagagcttggtgaactggtcttcctgctggcactgctataa

SEQ ID NO: 485232 - DNA, 543 bp, Shigella sonnei
atgattttggtgacggggggcgcacggagcgggaagagtcgccatgcagaggcgcttattggggactcttcgcaggttctgtatatcgccacctcacaaatccttgatgatgagatggctgcacggatagaacatcatcggcaaggccgcccggcgcactggcacacagtggagcgctggcaacatcttgatgaattaattcatgcagacattaacccgcatgaggctgtattgctggaatgcgttaccaccatggtgactaatctgttgtttgattatggcggcgataaagaccctgatgaatgggattatcaggcgatggaacaggcgattaatgctgagattcagtcgttgattgctgcctgccaacgttgtcccgcaaaggttgtattagtgactaacgaagtgggaatggggattgtgccggagagtcgtctggcacgacattttcgtgatattgccgggcgggtaaatcagcagctggccgctgcggcaaatgaagtatggttggtggtttcgggtattggagtaaaaatcaaatga

SEQ ID NO: 485233 - DNA, 438 bp, Shigella sonnei
atgaaaacgataaaacccgaatcgatagctcttttttgcctcttatctggagatgtggatctggcgaaacatctggctgaaatattgccaataacctgttttgttggtgaggactggcagcaagatttccagcctcttgatggtgggcctgtgcaatcgttatcagatgcgtatagcgattattcagtgctgctattgatagcagctgaaagcgagatatccgtaccagaatggctcgctcattctgagggaacgacggtaattttgattgcagaacacaatgcccgtttgctgactggtccggctggtggggctgtagcattaatccattatctgaatgaaatctgtcattccagagaaaccgctgtcaatgacgcattttgtcggacgttaacacgaggaagtctggctattccgcaatgccatcttctttcgtaa

SEQ ID NO: 485234 - DNA, 648 bp, Shigella sonnei
atgatttctgcggcgacacttaattcagaactcattaataaaatcgcgcaggattttgcgcaggcgaccagccttgcggttgtcgtggtcaatattcacggcgatgaaatttccgagctgtttaacttcactccattttgtcagatgatgcggcaacaccctcagctaagcactcgatgtcgcatgagcgatcgttgtgggggcctggaagcctctaaatccgatcagccttgtatttatcgctgtcatgccggattaaccgatttctctattccactggtaatcgccggacatttagtcggttttgtattgtgcgggcaagttcgtctgcgtaatgatgatgtcgatttggtcgatattctgaatgtcgatgattgctggcaggcagatcccgaattacttaatgaattccgcaaagttcctgagatggattactcaagagttatggcctctgctgatttgttgaagttgattgtggaaaattgcctcaaaaaacaactcaattttgtggttattaaagagaacaaatctcggtcagattcggtgcgccagactcgtgcgcctaatccccacgacaatacagttatttttgcaaagttttccgtcagacttatcaggttacgccgcaggtgtatcgacagcaagtga

SEQ ID NO: 485235 - DNA, 252 bp, Shigella sonnei
ttgttgaccacttcaaccggaccattaaccggttttgccatgaatccagcgcgtgattttggacctaagattttcacctggcttgcggggtggggagaaattgcgatgactggtggacgcaatattccttatttcattgtacccattattgcaccgatcattggggcatgtgttggtgcggcgatttatcgctatctcattgcaaagaatttacctgtcaatagtgttacacctaaaggaattagcgaataa

SEQ ID NO: 485236 - DNA, 579 bp, Shigella sonnei
ttgctgacgctcgaagaactggaactaccttatgagcaaattctcgcgggccgtgagtttgggataaatcacgatgctgattttctggcgatgaaccctaacgggctggtgccgttgttgcgtgacgacgaaagtgatctcattctttgggaatcaaacgccattgtccgctatctggcggcacagtacgggcaaaaacgcctgtggatcgactcaccggcacgtcgtgcggaagcggaaaaatggatggactgggcaaaccagacgctcagtaatgctcatcgcgggatcctgatgggattagtcagaacaccaccggaagagcgcgatcaggccgccattgatgccagttgcaaagagtgcgacgccctgtttgccctgctcgatgcggaactggcaaaagtaaaatggttctctggcgacgagtttggtgtgggcgatatcgctatcgcaccgttcatctacaatttgtttaacgttggcctgacctggacaccgcgtccaaatctgcaacgctggtatcagcaactcactgaacgccccgcagtgcgcaaagtggtgatgattcccgttagctaa

SEQ ID NO: 485237 - DNA, 1116 bp, Shigella sonnei
atgcatcgacaatcctttttccttgtgccccttatttgtctttcttccgctctctgggcggctcctgcaacggtaaatgtcgaagtactgcaagacaaactcgaccatccctgggcactggcctttttacccgataatcacggtatgttaatcactctgcgcggcggcgagttgcgtcactggcaagcaggaaaaggattatctgcgccgctttccggagttccggacgtttgggcgcacgggcagggcggcctgctggacgtggttttagcgcctgattttgctcagtctcgccgcatctggttaagttattccgaagttggcgatgatggcaaagccggaactgctgtgggttatggccgcttaagtgatgatctctcaaaagtgaccgacttccgcaccgtcttccgccagatgccaaaactgtctaccggcaaccattttggcgggcggctggtattcgacggtaaaggttatctttttattgctctgggcgaaaacaatcagcgcccgacggcgcaggatctggataaattacagggcaaactggtgcgtctgaccgaccagggcgaaatcccggatgataatccttttataaaggaatccggtgcgcgcgccgagatctggtcttatggcattcgtaatccgcaaggaatggcgatgaatccgtggagtaatgcactgtggctgaatgaacatggcccgcgcggtggtgatgaaattaatatcccgcaaaaaggcaaacactacggctggccgctggcaacctggggaatcaactattcaggctttaagataccggaagcgaaaggggagatcgtcgccgggaccgagcaacctgttttttactggaaagattcgcccgctgtgagcggcatggccttctataacagcgataaattcccccagtggcagcaaaaattatttattggcgcgctgaaagataaagatgtcattgtgatgagcgtcaacggcgacaaagtgacagaagatggccgtattttaacggacagagggcagcgaattcgtgatgttcgcactggacccgacggttatttatacgttctcaccgacgagtccagtggggaattacttaaagttagcccacgcaattag

SEQ ID NO: 485238 - DNA, 384 bp, Shigella sonnei; identical to SEQ ID NO: 459834

SEQ ID NO: 485239 - DNA, 1326 bp, Shigella sonnei
atgagcaaagtaactccccagccgaaaatcggctttgtttcccttggctgtccgaaaaaccttgtcgattcagagcgtattctcaccgaactacgcactgaaggttatgacgtggtaccgagctatgacgatgcggacatggtgatcgtcaacacctgcggctttattgacagcgcggtacaagaatcactggaagccattggtgaagcgttgaatgaaaacggcaaggtaattgtgaccggttgtctgggggcaaaagaagatcagatccgcgaagtccacccgaaagtgctggaaatcaccgggcctcatagctatgagcaggttctggagcacgttcatcactacgtgccaaaaccgaaacacaacccattcctgagcctggtgccagaacaaggtgtgaaactgacaccgcgtcattatgcctatctgaaaatttcggaaggctgtaatcaccgctgcaccttctgcattattccgtctatgcgcggcgacctggtgagccgtccgattggcgaagtgttaagtgaagcgaaacgtctggtagatgcgggcgttaaagagattctggtgatctcgcaggatacttccgcctatggcgttgatgttaaacatcgtactggcttccacaacggcgagccggtaaaaaccagcatggtcagcctgtgcgaacagttatcgaaactggggatctggacacgtctgcactacgtttacccttatccgcatgtggacgacgtcatcccactgatggcagaaggcaaaatcctgccgtatctggacattccgttgcagcacgccagcccgcgcattctcaaactgatgaagcgtccgggttctgtagatcgccaactggcgcgcatcaaacagtggcgcgaaatctgcccggaactgaccctacgctcaacctttattgtcggcttccctagcgagacggaagaagatttccagatgctactcgacttcctgaaagaagcgcgtctggatcgcgttggctgctttaaatacagcccggttgaaggtgcagacgccaatgccctgcctgaccaggttccggaagaagtgaaagaagaacgctggaaccgtttcatgcagctgcagcagcagatttccgccgagcgcctgcaagagaaagtgggccgtgaaattctggtgattatcgacgaagtggacgaagaaggcgcgattggtcgcagcatggcagatgcaccggaaatcgacggcgcggtttatctcaatggtgaaaccaacgttaagccgggtgatatcctgcgtgtgaaagtcgagcacgccgatgagtacgatttgtggggtagccgggtttaa

SEQ ID NO: 485240 - DNA, 639 bp, Shigella sonnei
ttgattattttctttgccgcattggtggcagtgatatcgggtaccagttgcctctatctggtacgcagagtgattaatcgtggtattgtggagaaagaagccatcattaataaccattttgaacgcgtactggatggcgggcttttcttttcggctgccgatgtcaaaaaactctacagtatgtataactcggcgttcctggacgacctgaccaaagcaatgggcagaaaatcctttgacgaagatttaaaagcgctgccggaaaaaggcggttatttgtgcctgtttgacgtcgataaattcaaaaacattaacgacaccttcggtcatttgctgggcgatgaagtgttgatgaaagtggtgaaaatccttaaatcacagatcccggtagataaaggtaaaatctaccgcttcggcggtgacgaatttgcggtgatttatacgggtggaacgctggaagagttgctatcgattctaaaagaaatcgttcatttccaggtgggaagcattaatttaagtaccagtatcggtgtagcgcattcaaatgaatgtaccaccgtcgaacgcttgaaaatgctggcggatgagcggctgtataagagtaagaaaaacggcagggctcagattagctggcagtaa

SEQ ID NO: 485241 - DNA, 687 bp, Shigella sonnei
atgtccagaatcaataagttcgtacttacagtcagtctgctgatttttatcatgatttcagcagttgcctgcgggatctacactcaaatggtaaaggaacgggtgtatagcctgaaacagtccgttattgatactgcttttgcggtggcaaatattgctgaatatcggcgtagcgtggcaattgatcttatcaacacgctaaatcccacggaggaacagctgttggttggtttgcgcacagcttacgccgactcggtttccccctcttatttgtacgatgtcggtccttatctgatttccagtgacgaatgtattcaggtaaaggagttcgagaaaaattattgtgcagatattatgcaggttgtgaagtatcgacatgtcaaaaatacagggtttatctcttttgacggtaaaaccttcgtctattacctctatccggtaactcacaatcgtagtctgatatttttgcttggtctggagcgtttttctttactgtcaaaatcgctggcgatggacagcgagaacctgatgttctctctatttaagaacggtaaaccggtgatgaatataatgctaaaaacgccatcttcaccgtttcggaagcgatggagcacttcgcctatttgccgaccggattgtacgtatttgcgtataaaaaagatgtttatttgcgggtctgtacattga

SEQ ID NO: 485242 - DNA, 1284 bp, Shigella sonnei
atgaaagatgccgaaattgaacggtcaaataaattgctctcactgatctcttacgatcaggaaagcggttttattaaaaatatggcgattattgagtccaacaataatcagtatctggctgtggggatcatcaaactgtgtggtctggaagccgtggaagcggtgtttggtgttgatgaacgcaataaaatcgtcaggaaattgtgtcagcgaattgccgagaaatatgcgcaatgctgcgatatcgtgacattcaatgccgatctctatttacttctgtgtcgggaaaatgtacagacatttacccgtaaaatagcgatggtaaacgattttgacagcagctttggctaccgcaatctgcgcatccataagtctgccatttgtgaacctttgcagggggaaaacgcctggagttacgcagaaaaactgaaactggcgatttccagtatccgtgaccatatgttctccgagtttattttctgtgatgacgcgaaactcaacgaaatagaagagaatatctggattgcgcgtaatattcgccatgcaatggaaattggcgaactattcctcgtctatcaaccgatcgttgatattaacacccgcgccattctgggcgcggaggcgttgtgccgttgggtttctgcggagcgggggatcatttcaccgctgaagttcattaccattgctgaagatatcgggtttatcaatgagctgggttatcagattattaaaacggcaatgggtgaattcagacattttagtcagcgtgcgtcgctgaaggatgatttcttactgcatattaatgtttcgccctggcagttaaacgaaccgcactttcatgagcgttttaccaccatcatgaaagaaaatggcctgaaggcgaacagcctctgtgttgagatcactgaaaccgtgatcgagcgaattaatgaacatttttatctcaatattgaacaactgcgtaaacaaggggtacggatatcgattgatgactttggcaccggtttgtcaaacctgaaacgtttttatgaaattaatccagacagcataaaggtggactcgcaatttaccggcgatattttcggtactgcgggaaaaattgtgcgcattattttcgatctggcacgctataaccggatcccggtgattgcggaaggcgtagagagcgaagacgttgcgcgcgaattaattaaattaggatgtgttcaggctcaggggtatctgtaccagaaacccatgccattctccgcctgggataaaagtggaaaattagtaaaagagtag

SEQ ID NO: 485243 - DNA, 2034 bp, Shigella sonnei
atgactcaagtcgcgaagaaaattctggtgacgtgcgcactgccgtacgctaacggctcaatccacctcggccatatgctggagcacatccaggctgatgtctgggtccgttaccagcgaatgcgcggccacgaggtcaacttcatctgcgccgacgatgcccacggtacaccgatcatgctgaaagctcagcagcttggtatcaccccggagcagatgattggcgaaatgagtcaggagcatcagactgatttcgcaggctttaacatcagctatgacaactatcactcgacgcacagcgaagagaaccgccagttgtcagaacttatctactctcgcctgaaagagaacggttttattaaaaaccgcaccatctctcagctgtacgatccggaaaaaggcatgttcctgccggaccgttttgtgaaaggcacctgcccgaaatgtaaatccccggatcaatacggcgataactgcgaagtctgcggcgcgacctacagcccgactgaattgatcgagccgaaatcggtggtttctggcgctacgccggtaatgcgtgattctgaacacttcttctttgatctgccctctttcagcgaaatgttgcaggcatggacccgcagcggtgcgttgcaggagcaggtggcaaataaaatgcaggagtggtttgaatccggcctgcaacagtgggatatctcccgcgacgcgccatactttggttttgaaattccgaacgcgccgggcaaatatttctacgtctggctggacgcaccgattggctacatgggttctttcaagaatctgtgcgacaagcgcagcgacagcgtaagcttcgatgaatactggaagaaagactccaccgccgagctgtaccacttcatcggtaaagatattgtttacttccacagcctgttctggcctgccatgctggaaggcagcaacttccgcaagccgaccaacctgtttgttcatggctatgtgacggtgaacggcgcaaagatgtccaagtctcgcggcacctttattaaagccagcacctggctgaatcattttgacgctgacagcctgcgttactactacactgcgaaactctcttcgcgcattgatgatatcgatctcaacctggaggatttcgttcagcgtgtgaatgccgatatcgtgaacaaagtggttaacctggcctctcgtaatgcgggctttatcaacaagcgttttgacggcgtgctggcaagcgaactggctgacccgcagttgtacaaaaccttcactgatgccgctgaagtgattggtgaagcgtgggaaagccgcgaatttggtaaagcagtgcgcgaaatcatggcgctggctgatctggctaaccgctatgtcgacgagcaggctccgtgggtggtggcaaaacaggaaggccgcgatgccgacctgcaggcaatttgctcaatgggcataaacctgttccgcgtgctgatgacttacctgaagccggtactgccgaaactgaccgagcgcgcagaagcattcctcaatacagaactgacctgggatggtatccagcaaccgctgctgggccacaaagtgaatccgttcaaagcgctgtataaccgcatcgatatgaagcaggttgaagcactggtggaagcgtctaaagaagaagtgaaagcagctgccgcgccagttactggcccactggcagatgatccgattcaggaaaccatcacctttgacgacttcgcaaaagttgacctgcgcgtggcgctgatcgaaaacgcagagtttgttgaaggttctgacaaactgctgcgcctgacactggatctcggcggtgaaaaacgcaatgtcttctccggtattcgttctgcctacccggatccgcaggcactgatcgggcgtcacaccattatggtggccaacctggcaccgcgtaaaatgcgctttggtatctccgaaggcatggtaatggctgctggtcctggcgggaaagatatcttcctgttaagcccggatgctggtgctaaaccaggccatcaggtgaaataa

SEQ ID NO: 485244 - DNA, 1110 bp, Shigella sonnei
atgaacgaacaatcccaggccaaatcaccagaagccttgcgcgcaatggtcgccgggacactggccaattttcagcacccaaccctgaagcataacctcaccacgctgaacgcgttgcaccatgtcgcctggatggacgacacgttgcatgtggaactggttatgccattcgtctggcatagcgcgtttgaagagttaaaagagcaatgtagcgccgaactgctgcgtatcaccggggcgaaagctatcgactggaaactgtcgcacaatatcgccaccttaaaacgcgtgaagaatcagccgggtattaatggtgtgaagaacatcattgcggtcagttccggtaaaggcggcgtgggtaaatcctccacggcggtaaacctggcgctggcactggcggcggaaggggcgaaagtcggcattctggacgccgatatctacggcccatcaattcccaccatgctgggcgcagaaaatcagcgtccaacttcgccggacggtacccatatggcaccgattatgtctcatggcctggcaaccaattcaattggttatctggtcactgacgacaatgcgatggtgtggcgtggaccgatggcgagcaaggcgttaatgcagatgttgcaggaaaccttgtggccggatctcgactatctggtgcttgatatgccgccaggcaccggtgacattcaattgacgctggcgcaaaacattccagtaactggtgcagtcgtggtcaccaccccgcaggacatcgctttgatcgatgcgaaaaaaggcattgtgatgttcgagaaagtcgaggttccggtgcttggtattgtcgagaacatgagtgtgcatatttgcagtaactgtggtcaccatgaaccgattttcggtaccggtggtgcagagaaactggctgaaaaataccacacacagctgctggggcagatgccgttacacatctccttacgtgaggatctcgataaaggcacgccaacggttatcagccgtccggagagcgaatttaccgctatctaccgccagctggctgaccgcgttgcagctcagctctactggcagggtgaagtcattccaggcgagatttccttccgcgcggtctaa

SEQ ID NO: 485245 - DNA, 282 bp, Shigella sonnei
atgaataagtattggctgtcaggaattatttttcttgcctatggattggcttctcccgcattctcttcagagactgccacattagcgattaatggcaggatcagtcccccaacatgcagtatggctatggttaatggtcaacctcaaccgcattgtggtcagttaacgtataatgttgacacccgtcatctgttttcttcgcccgtcaaaggtgtaacgacagaagtggttgttgcaggtagcgatagcaaacgtcgaatcgtgttaaatcgctacgattaa

SEQ ID NO: 485246 - DNA, 543 bp, Shigella sonnei
atgaaacgttcaattattgctgccgctgtcttttcttctttttttatgagcgctggagtatttgctgcagacgttgataccggaacattaactattaaggggaatattgcagaatctccgtgtaaattcgaagcgggtggtgattcagtaagtattaatatgccgactgtaccaaccactgtctttgaaggtaaagctaaatattctacctatgatgatgcagtcggtgtaaccagcagcatgttaaaaattagctgcccgaaagaagttgctggtgtaaaactctcgttgattaccaacgataaaataaccggtaacgataaggcgatagccagtagcaacgataccgtgggttactatctctatttaggtgataacagcgatgtcctggatgtttctgcaccttttaacattgagagttataaaacagcggaaggtcaatatgctattccgtttaaagcaaaatacctgaaactgacagataactcagtgcaatcaggtgatgtgttatcttctctggttatgcgtgtggcgcaggattaa

SEQ ID NO: 485247 - DNA, 675 bp, Shigella sonnei
atgaaaggattattatctttactcattttttctatggtccttcctgcacatgccggaattgttatctacgggacgcgcattatttacccggcagaaaataaagaagtgatggtgcagttgatgaaccagggaaaccgttcttcgctgctgcaggcgtggattgatgatggcgatacgtcattaccaccagaaaaaattcaggttcctttcatgttaacgccaccagtggcaaaaataggggcaaattccgggcagcaagtaaaaatcaaaattatgccgaataaactgcccactaataaagaaagcattttttatctgaatgttctggatattccaccaaatagtccagagcaagaaggtaagaatgcactgaagtttgcgatgcaaaacagaattaagttgttttaccgaccagcgggtattgctccggtaaataaagcgacatttaaaaaattgctggtaaatcgcagtggcaatggtttggtgataaaaaatgactcagctaattgggtgacgatctcggatgtcaaagctaataatgtcaaagtcaattatgaaactattatgattgcccccttagaaagtcagagtgttaatgtcaaaagtaataatgcaaataactggcatctgaccattatcgatgaccatggcaactatattagtgacaaaatttaa

SEQ ID NO: 485248 - DNA, 447 bp, Shigella sonnei
atgttgagaatgaccccacttgcatcagcaatcgtagcgttattgctcggcattgaagcttatgcagctgaagaaacctttgatacccattttatgataggtggaatgaaagaccagcaggttgcaaatattcgtcttgatgataatcaacccttaccggggcagtatgacatcgatatttatgtcaataagcaatggcgcgggaaatatgagattattgttaaagacaacccgcaagaaacatgtttatcaagagaagttatcaagcggttaggcattaatagcgataacttcgccagcggtaagcaatgtttaacatttgagcaacttgttcagggtgggagctatacctgggatatcggggtttttcgtctcgatttcagtgtcccgcaggcctgggtggaagaactggaaagtggcggtgatgctgccaacttactgatttag

SEQ ID NO: 485249 - DNA, 465 bp, Shigella sonnei
atgactagtctaaaaactagtattaagactatcacttatttaagtgatactggttgtctggagattcagggggccagtctaaccattgctaacggtcttcgtattcagatgaccttccaaggtgtagagtttcgttcaatcgtaggtcagactgatgtttcggctgctactggaaagaccgctaccacgaatgatggcggtgctaccagtaaaaagaacaccggaaacactacaacgagccttggaagccctatgctgacctgtaaagagctttttggctattcggcaagtgagttatcagatgaagcgctaaaagcccgtgtaacgtgctctaagagcgttagcgttaaaaatggtgagagcaccttctcagatgccgctaatgagcaagcttcaaaggtgcttaagccgggtaatgctctgcgaaagtactctgtgaaccctaacaagaagggcacttattga

SEQ ID NO: 485250 - DNA, 1521 bp, Shigella sonnei
gtgagaaccgtaataacatacttgagattctcatcagccatacaaggcgctgaaggtgcagattcaaccagacgacaaaacgacctgttcaagcagtggctgaagaagaatggcgatgctcaaatagtagcgtctttcagtgatgaagggttgagtggttacaaaggtaaacaccttactggtcagtttggtgacatgttagcccgtattgaggctggggagtttccagaaggtacaattctgctagttgagagtatcgaccgtataggccgattagagcatcttgaaacagaagccttgatgaaccgcatcttaggcaacgggatagagattcacacattgcaagatggccttatctacacaaaggatgctttagccgatgaccttggcataagcatcatccagcgtgtcaaagcctacatagcgcatcagaaatctaagcagaagtctttccgtgtttctcagaaatgggggcaacgtgcaaaacttgcccttgctggtgaacaacgtcttacaaagatggttcctggatggattgaccctgagacttttaaactcaatgaacacgctgagactgtgagattgatattcaaactgctgctagatggtgaaagtctgcataacattgcacgtcaccttcaaagcaacggtataaagtcgtttagtcgccgtaaagatgctaatgggttctctgttcactctgtacgcaccattctaaggtcagagacaacaataggcacgttaccagcatcacaacgtaatgaccgccccgctataccgaactactacgaaggtgttgtagatataccaacgttcaataaagctcaagagattctcgacaagaatcgtaaaggccgtacacctgcaagtgacaacccactaacgattaacatcttcaaaggtctgtttaggtgtcagtgtggggctagtgtccatcctaccggaacaaagaataagtatgctggggtctacaggtgcaataaccacttagacggtcgctgtgatgttccaccgttgaagcgtaaaccgtttgaccgatggatgattgataattttctggggatgattgacgtggggaatgatggagaatcagagagaaagattgcagcgttacagcatgaggttgaaattgtcacagccagaatcaagaaagctaccgccctacttcttgagatggatgatattgatgaactaaaaattcagcttaaggaactgaaccagaagcgcacagaactacagaccacgattgataacatgaggcgtaaggcttcactcactgataaggaactaccccagcttaaagatattgaccttatgactaaagcgggtcgtgtcgagtgtcagttgattttgtccaagcatctaaaagggcttacattgggtaaggattcggtaactgtaacgctacagaacgacactgaaatcaccatacctacaaacccgttaccgctaaatgatgggtcaccaatctttgaaattgctgataaagagctactggatattgacgcttatcaactgtaa

SEQ ID NO: 485251 - DNA, 756 bp, Shigella sonnei
atggctaatgctacaatgccgaatagctacaatacaatgacccttgatttacctcgccgcttcccctggccgacgttactttcggtctgcattcatggtgctgttgtggcgggtctgctctatacctcggtacatcaggttattgaactacctgcgcctgcgcagccaatttctgtcacgatggttgcgcctgctgatctcgaaccgccacaagccgttcagccgccaccggagccggtggtagagccagaaccggaacctgagccgatccccgaaccgccaaaagaagcaccggtggtcattgaaaagccgaagccgaaacctaagccaaaaccgaagccggtgaaaaaggtacaggagcagccaaaacgcgatgtcaaacccgtagagtcgcgtccggcatcaccgtttgaaaatacggcacccgcgcgccccacatcaagtacggcaacggctgcaaccagcaagccggttaccagtgtggcttcaggaccacgcgcattaagccgtaatcagccgcagtatccggcacgagcacaggcattgcgcattgaagggcaggttaaagttaaatttgacgtcacgccggatggtcgcgtggataacgtacaaatcctctcagccaagcctgcgaacatgtttgagcgtgaggtgaaaaatgcgatgcgcagatggcgttatgagccgggtaagccaggcagtgggattgtggtgaatatcctgtttaaaattaacggcaccaccgaaattcagtaa

SEQ ID NO: 485252 - DNA, 399 bp, Shigella sonnei
atgtctacaacacataacgtccctcagggcgatcttgttttacgtactttagccatgcccgccgataccaatgccaatggtgacatctttggtggttggttaatgtcacaaatggatattggcggcgctattctggcaaaagaaattgcccacggtcgcgtagtgactgtgcgggttgaaggaatgactttcttacggccggttgcggtcggcgatgtggtgtgctgctatgcacgctgtgtccagaaagggacgacatcggtcagcattaatattgaagtgtgggtgaaaaaagtagcgtctgaaccaatcgggcaacgctataaagcgacagaagcattatttaagtatgtcgcggttgatcctgaaggaaaacctcgcgccttacctgttgagtaa

SEQ ID NO: 485253 - DNA, 540 bp, Shigella sonnei
atgaagcagtttcttgattttttaccgctggttgtctttttcgcgttttacaagatttatgacatctatgcggctactgcggcgctgatcgtcgccacggcgattgtgcttatctatagctgggttcgctttcgtaaggttgagaagatggccctgatcacttttgttctggtggtcgtcttcggtggcttgacgctgttcttccacaatgatgagtttattaaatggaaggttacagtcatttatgctctgtttgcgggagccctgttagtcagccaatgggtgatgaaaaagccgctaattcagcggatgctgggtaaagaactcacgctgccgcaaccggtatggtcgaagctaaatctggcctgggctgttttctttatcctttgcggtctggcaaacatctacatcgcattctggctgccgcaaaatatttgggtcaactttaaagtctttggcctgaccgcccttaccttaatcttcacattgttaagcggtatctatatctaccgccacatgccgcaggaagataaatcctaa

SEQ ID NO: 485254 - DNA, 744 bp, Shigella sonnei
atgtctatcacggcgcagtccgtataccgtgacaccggaaatttcttccgtaatcaatttatgaccattctgttggtatcgttgctatgtgcgtttatcacagtggtgttagggcatgttttctcacccagtgatgcacagcttgcgcagctcaatgacggcgtgcccgttagcggcagtagtgggttgttcgacctggttcagaatatgtcaccggaacaacaacaaattttgctgcaggcttcagcggcgtccactttttcaggattaatcggtaacgccattctcgccggaggcgtaatattaattatccagctggtgtctgcgggtcagagagtcagtgcgctgcgagctattggtgccagtgcgccgatattgcccaagttatttattctgatttttctgactacccttttagtacagattggcatcatgctggtggtcgttccgggaattatcatggccattttactggccctggcaccggtgatgctggtacaggacaaaatgggcatttttgcctcgatgcgtagcagtatgcggctgacttgggcgaatatgcgtctggtggcacccgcagtactgagctggttgctggcaaaaacactgttgctgctttttgcctcttcttttgccgcattaaccccggaaattggtgccgtactggcgaacaccttgagcaacctgatttcagccatattgctcatctatctgttccgcctgtatatgttgattcgccaataa

SEQ ID NO: 485255 - DNA, 639 bp, Shigella sonnei
atgaaaaagttaacagtggcggctttggcagtaacaactcttctctctggcagtgcctttgcgcatgaagcaggcgaattttttatgcgtgcaggttctgcaaccgtacgtccaacagaaggtgctggtggtacgttaggaagtctgggtggattcagcgtgaccaataacacgcaactgggcctgacgtttacttatatggcgaccgacaacattggtgtggaattactggcagcgacgccgttccgccataaaatcggcacccgggcgaccggcgatattgcaaccgttcatcatctgccgccaacactgatggcgcagtggtattttggtgatgccggcagcaaattccgtccttatgttggggcaggtattaactacaccaccttctttgataatggatttaacgatcatggcaaagaggcggggctttccgatctcagtctgaaagattactggggagctgccgggcaggtgggggttgattatctgattaaccgtgactggttggttaacatgtcagtgtggtacatggatatcgataccacggctaagtacaaatctggtgttactaccgtaaaagactcggtacgactggatccgtgggtgtttatgttctctgccgggtaccgcttttaa

SEQ ID NO: 485256 - DNA, 387 bp, Shigella sonnei
atggcaactttgacaaaaaaagaacgggcatggttgaacgaattacaggaagttcttgatcgctgtcctgtggtgtcatcctgccgcgattgcgttcttagtccgtggctattgcaccaccatcacgcgaaagggacagctaagcgcggcgggatggttaagccagcaacattaaccgttgcatttaaaaaagcccgggattctgtggattacaactggcgtgctaatggcaccccaccctctttccatgagcagagatctttatcagagcgattgttcagagagcagggggttgataccaaaattttgctaggccattcgaatcaaaaaatgaccgatatttacaacgatgtacgcggtaaggagtggaaaaaactggtcatttga

SEQ ID NO: 485257 - DNA, 219 bp, Shigella sonnei
atgactacattattcagaaaagaatatccgcaaaaaagtagggcgacagaatttttgtttctcattctgtttatcgtattgatgataccgatatcccctctaatttttgtctgggcaatcgggaaaataattgagccagttactgaattgtataccgacgttgtatgggcgtcgttcaacacactgcacaataaaattaatccgtataaggaaaactga

SEQ ID NO: 485258 - DNA, 213 bp, Shigella sonnei; identical to SEQ ID NO: 20334

SEQ ID NO: 485259 - DNA, 474 bp, Shigella sonnei; identical to SEQ ID NO: 474215

SEQ ID NO: 485260 - DNA, 666 bp, Shigella sonnei
atgtcccggatagaagcggtatttttcgactgcgacggtacgctggtcgacagtgaagtcatttgctcccgcgcatatgtaacgatgtttcaggaatttggtattacgctcgatcctgaagaggtattcaaacgtttcaaaggtgtaaaactgtacgaaattatcgatattgtttcccttgaacatggtgttacgttagcgaaaacagaatctgaacacgtttaccgtgcagaagtcgctcggctgttcgattcagaactggaagccatcgaaggggctgaagcgctcctgtcagcgatcactgcgccaatgtgtgtggtatctaacggcccaaataacaaaatgcagcattctatgggcaagctgaatatgttgcactacttcccggataaactgttcagcggctacgatattcagcgctggaagccagacccggcgttaatgttccatgcggcaaaagcgatgaatgtaaatgtagaaaactgcattctggttgatgactcagttgccggtgcgcaatctggtatcgacgcaggtatggaagtgttctacttctgcgccgacccgcacaataagccgatcgttcacccgaaagtcaccacctttacccatctttcgcagttaccggaactgtggaaagcgcgtggttgggatattacggcatag

SEQ ID NO: 485261 - DNA, 1338 bp, Shigella sonnei
atgagtcatcaacataccacccagacttctggtcaggggatgctggaacgagtttttaaactgcgcgaacatggtactacggcacgaactgaagtgattgccgggttcaccaccttcctgacgatggtctacatcgtatttgttaacccacaaattctgggcgttgctggcatggacaccagtgccgtcttcgtaacaacctgtctgattgctgctttcggtagcattatgatgggattgtttgcaaaccttccggtggcgctggctcctgcgatggggcttaacgcctttttcgcttttgtggttgtccaggcaatggggctgccgtggcagatcggtatgggcgcaatcttctggggcgctgtcggactgcttcttttgaccattttccgcgttcgttactggatgattgctaacattccggtaagtctgcgtgtgggtattaccagcggtatcggtctgttcattggcatgatggggctgaaaaacgcaggtgtgattgtcgctaacccggaaacgctggtgagcatcggtaatctgacttctcacagcgtgctgctggggatcctcggtttcttcatcatcgccattctggcctcgcgcaacattcacgcagcggtgctggtttctatcgtggtgacgacgctgctgggctggatgctgggtgatgtgcactacaatggcatcgtttctgcgccgccgagcgtaatgacagttgtgggtcatgtagatttagccgggtcgtttaacctcgggctggcaggggtgattttctctttcatgttggtcaacttgtttgactcctccggtacgctgattggcgtgaccgataaagcaggtctggcggatgagaaggggaaattcccgcgcatgaagcaggcgctgtatgtcgacagtatctcttccgtgaccggttcgtttatcggtacttcttccgttacggcttatattgagtcctcttccggcgtatcggttggcggtcgtaccggtctgacggcagtggttgttggtctgctgttcctgctggttatctttctgtcgccgctggcgggaatggtgccaggctacgctgcagctggcgcgttgatctacgttggcgtgttgatgacctcaagtcttgctcgcgtgaactggcaggatcttactgaatctgttccggcgtttattaccgccgtgatgatgccgttcagcttttcgattaccgaaggtattgcgctgggctttatctcctactgcgtgatgaagattggtaccgggcgtctgcgtgaccttagcccgtgcgtaatcatcgttgcgctgctgtttatcctgaagattgtatttatcgacgctcattaa

SEQ ID NO: 485262 - DNA, 216 bp, Shigella sonnei
atgggcgtgattggcggcgcgcgctgtcagtatcacctgcgccagattctggttttcctcgatgcaatggtgatgaacaagccggaatttatgggcggcgtgattcagaacaaagttgatcggcaaaccggagaagtgattgatcagggtacgctggaccacctgaccgggcaattgaccgcatttggtgagtttattcagcgagttaagatctaa

SEQ ID NO: 485263 - DNA, 321 bp, Shigella sonnei
atgtctgaaaaattgcaggtggttacgttactggggagcctgcgcaaaggctcatttaatggcatggttgcacgtaccctgccgaaaattgctccggcgagcatggaagtcaatgcgttaccttccattgccgacattcccctgtatgacgctgacgtacagcaggaagaaggttttccagcaacggttgaagctctggcggaacagatccgtcaggctgacggtgtggtgatcgtcacgccggaatataactactcggtaccgggtgggctgaaaaatgccatcgactggctttcccgctggccggtaaaccggtgttga

SEQ ID NO: 485264 - DNA, 750 bp, Shigella sonnei; identical to SEQ ID NO: 460693

SEQ ID NO: 485265 - DNA, 960 bp, Shigella sonnei
atgaagaaatccatcaccacgcttgatctcaatctgctgctctgtctgcaactgctgatgcaggagcgcagcgtgaccaaagcggcgaagcggatgaacgtgaccccttcagcggtgagtaagtcgctggcaaagttaagagcgtggtttgacgacccgctctttgtgaactcaccgctgggcctgtcgcccacaccgctaatggtcagcatggagcaaaatctggcggaatggatgcaaatgagcaatctgctgctggataaaccgcaccaccagacaccgcgcggcctgaagtttgagttggcggcggaatcgccgctgatgatgatcatgcttaatgcgctgtcgaaacggatctaccaacgttacccgcaggcgaccatcaaactacgtaactgggattacgattccttagatgccattactcgtggtgaagtggatattggtttttccggtcgcgaaagccatcctcgctcgcgggagctgttaagctcgctaccgttagccattgattatgaagtgctgtttagtgatgtaccctgcgtctggttacgcaaagatcatccggcactgcatgaaacgtggaatctggacacctttttacgttatccgcatatcagcatttgctgggaacagagcgacacctgggcgctggacaatgtgttacaggagctggggcgcgaacgcacgattgctatgagtctgccggaattcgagcagtcactgtttatggcagcgcaacccgacaatctgctactggcgaccgcgccgcgctactgtcagtactacaatcaactccatcaactgccgttggttgctcttcctctcccgtttgacgaaagccagcaaaaaaagctggaagttccttttaccctgctgtggcataaacggaacagccataatccgaagatcgtctggttacgggaaaccattaaaaacctttacgcgtcgatggcataa

SEQ ID NO: 485266 - DNA, 1176 bp, Shigella sonnei
atgtcccgctttttgatttgtagttttgccctggttttactttatcccgccgggattgatatgtacctcgttggtttaccgcgcatcgccgccgatctcaatgccagcgaagcgcagttgcatattgcgttctccgtatatctggcggggatggcagctgcgatgttatttgccggtaaagtggccgatcgttcagggagaaagccggtcgccatacccggcgcggcgctatttattattgcctcggtgttctgttcactggctgaaaccagcacgttatttcttgcaggccgatttctacaggggttgggcgcaggctgttgttacgtagtggcgttcgccattttgcgcgacacgctggatgatcgacgtcgggctaaagtgctgtcattactcaacggtattacctgcatcattccggtgttagcgccagtgctcggacatctgattatgcttaaattcccgtggcagagtctgttctgggcgatggcaatgatgggcatcgcggtactgatgttgtctttgtttattttaaaagaaacgcgcccagcgtcccccgctgcttcggacaaaccacgagaaaatagcgagtcgctgcttaatcggtttttcctcagccgtgttgttatcaccaccctcagcgtttcggtgatcctcactttcgtcaatacatcgccggtattgctgatggaaatcatgggttttgagcgcggagaatacgccaccattatggcgttgaccgctggcgtcagcatgaccgtttcattctccacgccatttgcgctgggaatttttaagccacgtacgttgatgatcacctcgcaggtgttattccttgcggcggggatcacccttgccgtttcaccttcccatgcggtttctctgtttggtatcacgctgatttgcgccggtttctcggtaggttttggcgtagcgatgagtcaggcgttaggaccattttcattacgcgcgggcgtagccagctcgaccttaggtattgcgcaggtttgcggttcgtcactgtggatttggctggcagcggtggttggtattggcgcatggaatatgctgatcgggattctgattgcctgtagcatagtgagcctgttgctgattatgttcgtcgcgcctggacgccccgttgccgctcatgaagaaatccatcaccacgcttga

SEQ ID NO: 485267 - DNA, 2286 bp, Shigella sonnei
atgaatcagaatctgctggtgacaaagcgcgacggtagcacagagcgcatcaatctcgacaaaatccatcgcgttctggattgggcggcagaaggactgcataacgtttcgatttcccaggtcgagctgcgctcccacattcagttttatgacggtatcaagacctctgacatccacgaaaccattatcaaggctgccgcagacctgatctcccgtgatgcgccggattatcagtatctcgccgcgcgcctggcgatcttccacctgcgtaaaaaagcctacggccagtttgagccgcctgcgctgtacgaccacgtggtgaaaatggtcgagatgggcaaatacgataatcatctgctggaagactacacggaagaagagttcaagcagatggacacgtttatcgatcacgaccgtgatatgaccttctcttatgctgccgttaagcagctggaaggcaaatatctggtacagaaccgcgtgaccggcgaaatctatgagagcgcccagttcctttatattctggttgccgcgtgcctgttctcgaactacccgcgtgaaacgcgcctgcaatatgtgaagcgtttttacgacgcggtttccacatttaaaatttcgctgccgacgccaatcatgtccggcgtgcgtaccccgactcgtcagttcagctcctgcgtactgatcgagtgcggtgacagcctggattccatcaacgccacctccagcgcgattgttaaatacgtttcccagcgtgccgggatcggcatcaacgccgggcgtattcgtgcgctgggtagcccgattcgcggtggtgaagcgttccataccggctgcattccgttctacaaacatttccagacagcggtgaaatcctgctctcagggcggtgtgcgcggcggtgcggcaacgctgttctacccgatgtggcatctggaagtggaaagcctgctggtgttgaaaaacaaccgtggtgtggaaggcaaccgcgtgcgtcatatggactacggggtacaaatcaacaaactgatgtatacccgtctgctgaaaggtgaagatatcaccctgttcagcccgtccgacgtaccggggctgtacgacgcgttcttcgccgatcaggaagagtttgaacgtctgtataccaaatatgagaaagacgacagcatccgcaagcagcgtgtgaaagccgttgagctgttctcgctgatgatgcaggaacgtgcgtctaccggtcgtatctatattcagaacgttgaccactgcaatacccatagcccgtttgatccggccatcgcgccagtgcgtcagtctaacctgtgcctggagatagccctgccgaccaaaccgctgaacgacgtcaacgacgagaacggtgaaatcgcgctgtgtacgctgtctgctttcaacctgggcgcaattaataacctggatgaactggaagagctggcaattctggcggttcgtgcacttgacgcgctgctggattatcaggattacccgatcccggccgccaaacgtggagcgatgggtcgtcgtacgctgggtattggtgtgatcaacttcgcttactacctggcgaagcacggtaaacgctactccgacggcagcgccaacaacctgacgcataaaaccttcgaagccattcagtattacctgctgaaagcctctaatgagctggcgaaagagcaaggcgcgtgcccgtggtttaacgaaaccacttacgcgaaagggatcctgccgatcgatacctataagaaagatctggataccatcgctaatgagccgctgcattacgactgggaagcattgcgtgaatcaatcaaaacgcacggcctgcgtaactctacgctttctgccctgatgccgtccgagacctcttcgcagatctctaacgccactaacggtattgaaccgccgcgcggttacgtcagcatcaaagcgtcgaaagacggtattttgcgccaggtggtgccggactacgagcacctgcacgacgcctatgagctgctgtgggaaatgccgggtaacgatggctacctgcaactggtaggtatcatgcagaaatttatcgatcagtcgatctctgctaacaccaactacgatccgtcacgtttcccgtcaggaaaagtgccgatgcagcagttgctgaaagacctgctcaccgcctacaaattcggggtcaaaacgctgtattatcagaacacccgtgacggcgctgaagacgcgcaggacgatctggtaccgtcaatccaggacgatggctgcgaaagcggcgcatgtaagatctga

SEQ ID NO: 485268 - DNA, 1131 bp, Shigella sonnei; identical to SEQ ID NO: 473129

SEQ ID NO: 485269 - DNA, 255 bp, Shigella sonnei
atggcccgcgttaccctgcgcatcactggcacacaactgctgtgccaggatgaacacccttcccttctggcggcgctggaatcccacaatgttgcggttgagtaccagtgccgcgaaggttactgcggctcctgtcgcacccgactggtcgcaggtcaggtggactggattgccgaaccgttagcctttattcagccgggggaaattttgccctgttgttgccgggcaaaaggcgatattgaaatcgagatgtga

SEQ ID NO: 485270 - DNA, 627 bp, Shigella sonnei
atggcagtttcagcaaagtacgacgaatttaatcactggtgggcaacagagggcgactgggttgaagagcctaactatcgccgtaatggtatgagcggggtgcaatgcgtcgagcgcaacggcaaaaagctgtatgtaaagcgcatgacgcatcatctgtttcattccgtacgttatccgttcggccgaccaacgattgtccgtgaggttgcggtaattaaagaactggaacgggccggtgtcatcgtgccgaagatcgtttttggtgaagcggtgaaaattgagggtgaatggcgcgcgttgctggtgactgaagatatggcggggttcatcagcattgctgactggtatgcccggcatgcagtatcgccctattctgacgaagtacggcaagccatgttgaaagcagtggcgctggcgtttaagaaaatgcatagcgttaatcgtcagcatggctgttgttatgttcgccatatctatgtgaaaacagaaggtaaagcagaagctggttttcttgacctggagaaaagtcgtcgccgcttgcgtcgcaataaagcgattaatcatgacttccgccagctggaaaatatctggagccaatccccaaagcggactgggagcaggtga

SEQ ID NO: 485271 - DNA, 132 bp, Shigella sonnei
atgaattttattcgacagggattaggcatcgccttattaccagagttaacgctgaaaaccattgcaggtgaattgtgttccgttcctcacgaaccaaccttctatcgacagattgaggtgtactggcaatag

SEQ ID NO: 485272 - DNA, 264 bp, Shigella sonnei
ttgcctgaaggcagtgacgacgcgctacggtatattgcggaacatgacgatgcgctggcgtttgcgcgtattaatcgccagctgatctctttacgcataatgcaacaggttaaggccaccggaagtccggttctggatgtggcgcataactttgttagcgcgtgtcaaatcggcgatcaacagggctggttgcatcgtaaaggtgccacgccggatgacaacggtctggtgattattcccggttcactcggtgattactcctag

SEQ ID NO: 485273 - DNA, 615 bp, Shigella sonnei
atgatcttgctacaactctcctcagcgcaggggccggaagaatgttgtctcgcagtgaaaaaggcgctggagcgattaattaaagaagctgcccgacaagacgtcgcggtaacggtgttggaaacagaaacgggccgctactctgacacgctgcgttcagctctggtttctctggatggcgataacgcatgggcattaagcgaaagctggtgcggcactattcagtggatttgtccgagtccgtatcggcctcatcatgggcgcaaaaactggtttctgggcattgggcgttttaccgctgatgagcaggaacaatcggatgcaatccgttatgagacgttgcgttcgtcggggccgggcggtcaacatgtcaataaaaccgactcggcggtacgcgccacgcatttggcatccggtattagcgtgaaggttcagtcagagcgtagtcagcatgctaacaagcggctggcacgattgctgattgcctggaagctggagcagcagcaacaggaaaatagcgcggtgctgaaatcgcagcggcgaatgttccatcaccagattgaacgtggcaacccgagacggacatttacagggatggcttttatcgaaggataa

SEQ ID NO: 485274 - DNA, 1458 bp, Shigella sonnei
gtgtctgaactgtctcaattatctccacagccgctgtgggatatttttgccaaaatctgttctattcctcacccgtcctatcatgaagagcaactcgctgaatacattgttggttgggcaaaagagaaaggtttccatgtcgaacgcgatcaggtaggtaatatcctgattcgtaaacctgctaccgcaggtatggaaaatcgtaaatcggtcgtcttacaggcccacctcgatatggtgccgcagaaaaataacgacaccgtgcatgacttcacgaaagatcctatccagccttatattgatggcgaatgggttaaagcgcgcggcaccacgctgggtgcagataacggcattggtatggcgtctgcgctggcggttctggctgacgaaaacgtggttcacggcccgctggaagtgctgctgaccatgaccgaagaagccggtatggacggtgcgttcggcttacagagcaactggttgcaggctgatattctgattaacaccgactccgaagaagaaggtgaaatctacatgggttgtgcggggggtatcgacttcacctccaacctgcatttagatcgtgaagcggttccagctggttttgaaaccttcaagttaaccttaaaaggtctgaaagggggtcactccggcggggaaatccacgttggcctgggtaatgccaacaaactgctggtgcgcttcctagcgggtcatgcagaagaactggatctgcgccttatcgatttcaacggcggcacactgcgtaacgccatcccgcgtgaagcctttgcgaccattgctgtcgcagctgataaagtcgacgtcctgaaatctctggtgaatacctatcaggagatcctgaaaaacgagctggcagagaaagagaaaaatctggccttgttgctggactctgtagcgaacgataaagctgccctgattgcgaaatctcgcgatacctttattcgtctgctgaacgccaccccgaacggtgtgatccgcaactcagacgtggcaaaaggtgtggtcgaaacctccctgaacgtcggtgtggtgaccatgactgataataacgtagaaattcactgtctgatccgttctctgatcgacagcggtaaagactacgtggtgagcatgctggattcgctgggtaaactggctggcgcgaaaaccgaagcgaaaggcgcatatcctggctggcagccggacgctaattctccggtgatgcatctggtacgtgaaacctatcagcgtctgttcaacaaaacgccgaacatccagattatccacgcgggcctggaatgtggtctgttcaaaaaaccgtatccggaaatggacatggtttctatcgggccaactatcaccggtccacactctccggatgagcaagttcacatcgaaagcgtaggtcattactggacactgctgactgaactgctgaaagaaattccggcgaagtaa

SEQ ID NO: 485275 - DNA, 459 bp, Shigella sonnei
atgagcgaaaaatacatcgtcacctgggacatgttgcagatccatgcacgtaaactcgcaagccgactgatgccttctgaacaatggaaaggcattattgccgtaagccgtggcggtctggtaccgggtgcgttactggcgcgtgaactgggtattcgtcatgtcgataccgtttgtatttccagctacgatcacgacaaccagcgcgagcttaaagtgctaaaacgcgcagaaggcgatggcgaaggcttcatcgttattgatgacctggtggataccggtggtactgcggttgcgattcgtgaaatgtatccaaaagcgcactttgtcaccatcttcgcaaaaccggctggtcgtccgctggttgatgactatgttgttgatatcccgcaagatacctggattgaacagccgtgggatatgggcgtcgtattcgtcccgccaatctccggtcgctaa

SEQ ID NO: 485276 - DNA, 1245 bp, Shigella sonnei
atgacacaggcaaacctgagcgaaaccctgttcaaaccccgctttaaacatcctgaaacctcgacgctagtccgccgctttaatcacggcgcacaaccgcctgtgcagtcggcccttgatggtaaaaccatccctcactggtatcgcatgattaaccgtctgatgtggatctggcgcggcattgacccacgtgaaatcctcgacgtccaggcgcgtattgtgatgagcgatgccgaacgtaccgacgatgatttatacgatacggtgattggctaccgtggtggcaactggatttatgagtgggccatccaggcgatggtgtggcaacaaaaagcctgtgcggaagaagatccgcaactcagtggtcgtcactggctgcatgcggctacgttgtacaacattgctgcctatcctcatctgaaaggagatgacctggccgagcaagcgcaggctttgtcaaaccgtgcctatgaagaagccgcccagcgtctgccgggcacgatgcggcagatggagtttaccgtacccggcggtgcgcccatcaccggctttttgcatatgccgaaaggcgatggcccgttcccgacagtattaatgtgtggtggtctggatgcgatgcagacggactattacagcctgtatgaacgttattttgcgccgcgcggcattgcgatgctgactattgatatgccgtcggtgggcttttcatcaaaatggaagctcacccaggactccagcctgttgcatcagcacgttttaaaggctctgcctaacgtaccgtgggtggatcacactcgcgtcgcggcctttggtttccgtttcggcgctaacgttgccgtgcgtctggcatatcttgaatcgccgcgtctgaaagcggttgcctgtcttggtccggtagttcataccctgttgagtgattttaagtgccagcaacaggtgccggaaatgtatcttgacgttctggcgagtcgtttggggatgcatgatgcttccgacgaagcgttacgcgtggagctgaatcgctattcattaaaagtgcaaggattgctggggcgtcgctgcccaacgccaatgttatcaggctactggaagaacgatccgttcagcccggaagaggactcacgcttaatcacctcatcatctgctgacggtaaattattagagatcccatttaacccggtgtatcggaattttgacaaaggtcttcaggaaatcaccggctggatcgaaaaacgcttgtgttaa

SEQ ID NO: 485277 - DNA, 402 bp, Shigella sonnei
atgacgttaccgagtggacacccgaagagcagattgatcaaaaaatttaccgcactaggcccgtatattcgtgaaggtaagtgcgaagataatcgattctttttcgattgtctggctgtatgcgtcaacgtgaaaccggcaccggaagtgcgtgagttctggggctggtggatggagcttgaagcgcaggaatcccgttttacctacagttaccagtttggtctgttcgataaagcaggcgactggaagagtgttccggtaaaagacactgaagtggttgaacgactggagcacaccctacgtgagtttcacgagaagctgcgtgaactgctgacgacgctgaatctgaagctggaaccggcggatgattttcgtgatgaaccggtgaagttaacggcgtga

SEQ ID NO: 485278 - DNA, 1056 bp, Shigella sonnei
atgaaaaagagcactctggcattagtggtgatgggcattgtggcatctgcatctgtacaggctgcagaaatatataataaagacggtaataaactggatgtctatggcaaagttaaagctatgcattatatgagtgataacgccagtaaagatggcgaccagagttatatccgttttggttttaaaggtgaaacacaaattaacgatcaactgactggttatggtcggtgggaagcggagtttgccggaaataaagcggagagtgatactgcacagcagaaaacgcgtctcgcttttgccgggttgaaatataaagatttgggttctttcgattatggtcgtaacctgggcgcgttgtatgacgtggaagcctggaccgatatgttcccggaatttggtggcgattcctcggcgcagaccgacaactttatgaccaaacgcgccagcggtctggcgacgtatcggaacaccgacttcttcggcgttatcgatggcctgaacttaaccctgcaatatcaagggaaaaacgaaaaccgcgacgttaaaaagcaaaacggcgatggcttcggcacgtcattgacatatgactttggcggcagcgatttcgccattagtggggcctataccaactcagatcgcaccaacgagcagaacctgcaaagccgtggcacaggcaagcgtgcagaagcatgggcaacaggtctgaaatacgatgccaataatatttatctggcaactttctattctgaaacacgcaaaatgacgccaataactggcggctttgccaataagacacagaactttgaagcggtcgctcaataccagtttgactttggtctgcgtccatcgctgggttatgtcttatcgaaagggaaagatattgaaggtatcggtgatgaagatctggtcaattatatcgacgtcggtgctacgtattatttcaacaaaaatatgtcagcgtttgttgattataaaatcaaccaactggatagcgataacaaattgaatattaataatgatgatattgtcgcggttggcatgacctatcagttttaa

SEQ ID NO: 485279 - DNA, 927 bp, Shigella sonnei
atgagcgccgcgcttcaatacttcgaagaaaatttaccccaccgtccctatcacacggatgatctcgcttttggtcttcgcatctccggcaaagggcgtgcgcttcttgcgcggtacatccagcagaaccagcctcatgcgcagttctggctggtttttgacgttgaccgcgagggggctgcgattgactggagcgaccggaacgcccccgcgccgaacatcaccgtaaaaaatcccgtgaacggtcatgctcacctgctctatgcactcaacatcgccgtgagaaccgcgcctgatgcgtcggttaaggcactgaagtacgctgccgcgatagagcgtgcgctgtgtgagaaacttggtgcagatgtgaactacagcggactgatttgcaaaaatccgttccacctggaatggctggtgatggagtggcgcgaggaagcctataccctcgatgaactggctgattatctcgatttgagcgcctcagcgcgccgtagcatcgataaacattacgggatggggcgaaactgccacctgttcgaaatgacgcgcaaatgggcttacagggcgattcgtcagggctggcctgtattctcacaatggcttgatgccgtgatccagcgtgtcgaaatgtacaacgtatcgcttcccgttccgctttctccggcggaatgtcgggctattggcaagagcattgcgaaatacacgcacaggaacttcacgccggaaactttcgcacagtatgtggctgatacgcacacgccagaaattcaggctgcacgtggtcgcaagggcgggaaaattggaggtgctaagtctaagcgtggtgctgttgccacatctgcgcgaacgttgaaaccgtgggagactcttggaattagccgcgcctggtattaccaactgaaaaaacgaggtcttgtagagtag

SEQ ID NO: 485280 - DNA, 276 bp, Shigella sonnei
atgagcagaacactcgaacagaagattgccgaagctgaggccagattacagcgcctgaaggcgaagagccggagcctggacacggcgcaaaaagtcattgttggggctgccatgctggcgagggtacggaggccggaagaggcgcaactgcgtgcgttcctgctccagtttctgcgaaaggaagtcacaagacaggcggatgtgaaccgactacaaccgctgattaacgagctggagaagctacccaaaccacctgcgaaaccgcagaaccactaa

SEQ ID NO: 485281 - DNA, 2220 bp, Shigella sonnei
atggcgatttatcatctcagcatgaaaatcatttcgcgaaaaaacggctacagtgctgttgcttctgctgcctaccgttccggctctgtcatacccgatgaccgtaccggattaatccacgattacacccgtaaacgcggcgttgatgatgcggtcattctcacccctgcgaatgcaccgtcctggtgtggtgaccgttccgttctctggaatgcggtcgagaaagccgaacagcgccggaactcccagctggcaagggagattgaacttgccattccccgtgagatttcccgcgaggccgcacgggagaccgttctcgcttttgtccgggaaaactttgtcagtcggggcatgattgccgatgtggcgttccatcacatggaccggaccaatccccatgcgcacatcatgctgaccacgagagctgtcggggaaacgggattcgcaggaaaggtcagggactggaacgaccgggcactcgccgagacgtggcgcgcatcatgggctgaccatgcgaacagagcgcttgcgaacgccggctaccaggaagagatagaccatcgttcatacgagcgtcagggactggagaaagcgccgggccttcacctcggaaaggctgcctgtgcgatggaaaaacggggaatggaaacagaacgcggtgagcagaaccgtctgattaacagccttaacctggaaatacaggtttcccgcacgcagcttgctctcaggacggttcaggaagcgcagcgtaagcgggaactcagcgatgctgcacgtcgtgcagcggaagcccttaacctgaccattcccgctgcgaatgcctcagcggataccctgcgggaattcattgccacgctgccgcaggaatgcgggaacgcgtgggagatgaccccggagttcctggcgatgagcgggaaggtgaacgacatcgaacgtgaggggaatgcgctgctgaaagagcaggccattctcgaaaaggagatgaccggactcaaaaaagcacgccctgtcgcgtcccttctgtcagagattcccctgatgacatgggctgaaccggaataccgcaaaagacaactccgtttctggaaactcgggaaacagattgaatctcttcgccgcacctacagggccgtgaaagaacgggacattcccgcccgtcgtcaggcctttgaaacgcagtggaatacgtggattgcgccgggaatggcagagctgaaagaaaaactgtcagcacgggaagcggagcggcgcagggaggaagccgaagcggaagcgcgccggaaggaacaggagcatgaggcgcggctgaaacgtcatgataaccaccgtctgagccgtgaaacggcattagtcggggttattacggagctggggcgtgccagagagccgggaacgggcaggataacccgctacatgatgctgagtaacagagccggagaattcacggtatggggtgatgagctggcgcattacccccagagtgttcatgacccggtgaatgtttacctgtcgccaggcggggctgtgatggtctcggatatacgtgagggaatgccagaatctcatgagacgatggcgcggcctgagcgtgtgagaatgtattccggtgcgacggtccggcatgtactggaacagatgcgccaggggtggccctcttacggttttccggcgctgccgcatcactggccggataatttttatttcagcgacgaccgcaggcccgtagcctctccgctgccgtcagcgcaccgggtggatatcaccgctgatgctgtaccggaacaactcatgcctgttgtattttcgagagagggaaacagcaggacgctgaatctgttgttatgcaaagggccggaggaaatgcttgtcgggtttgttcgacgggaaggagggttttgccccgttcttgtgcttccgtcgccggattacagtcatctgatagtcagcaccatcacggagaacggggtatgcctggcaggttacggagaagctataaaccatgatgaggatactccgtacccaccggaaccgcacctgatgcagttccggctcaaaggccatcatgacaggcttttggctgctgtccacaaaccggaagagatgccggattatctcttccgtcaactcggttttaatcagacctggcatgagtggaagcgggacgaacagcacaggcaacaacaacgccgccccgggcacttccggggcatgagtatgtga

SEQ ID NO: 485282 - DNA, 1641 bp, Shigella sonnei
atgagcggtggcgatggacgcggccataacacgggcgcgcatagcacaagtggtaacattaatggtggcccgaccgggcttggtgtaggtggtggtgcttctgatggttccgggtggagttcggaaaataacccgtggggtggtggttccggtcatggtaatggcggggggaatggtaattccggtggtggctcgggaacaggcggtaatctgtcagcagtagctgcgccagtggcatttggttttccggcactttccactccaggagctggcggtctggcggtcagtatttcagcgggagcattatcggcagctattgctgatattatggctgccctgaaaggaccgtttaaatttggtctttggggggtggctttatatggtgtattgccatcacaaatagcgaaagatgaccccaatatgatgtcaaagattgtgacgtcattacccgcagatgatattactgaatcacctgtcagttcattacctctcgataaggcaacagtaaacgtaaatgttcgtgttgttgatgatgtaaaagacgaacgacagaatatttcggttgtttcaggtgttccgatgagtgttccggtggttgatgcaaaacctaccgaacgtccaggtgtttttacggcatcaattccaggtgcacctgttctgaatatttcagttaataacagtacgccagcagtacagacattaagcccaggtgttacaaataatactgataaggatgttcgcccggcaggatttactcaggggggtaataccagggatgcagttattcgattcccgaaggacagcggtcataatgccgtatatgtttcagtgagtgatgttcttagccctgaccaggtaaaacaacgtcaggatgaagaaaatcgccgtcagcaggaatgggatgctacgcatccggttgaagcggctgagcgaaattatgaacgcgcgcgtgcagagctgaatcaggcaaatgaagatgttgccagaaatcaggagcgacaggctaaagctgttcaggtttataattcgcgtaaaagcgaacttgatgcagcgaataaaactcttgctgatgcaatagctgaaataaaacaatttgaacgatttgcacatgacccaatggctggcggtcacagaatgtggcaaatggccgggcttaaagctcagcgggcgcagacggatgtaaataataagcaggctgcatttgatgctgctgcaaaagagaaggcagatgctgatgctgcattaagtactgcgatggaaagcaggaagaagaaagaggataataaaagagatgctgaaggcaaactaaatgatgagttagcaaaaaataaaggaaagataccaggtctaaaaatagatcagaaaattaggggacaaatgccagaaagaggatggacagaggatgatatcaaaaataccgtatctaacggtgcaactggtacatcttttgataagcgtagtccgaagaaaacacctccagactatttaggtcgaaatgatccagcaacagtgtatggttctcctggtaaatatgttgttgtcaatgatcgtactggtgaggttactcagattagtgataagacagatccgggttgggtggacgattcgagaattcaatggggaaataaaaatgaccaataa

SEQ ID NO: 485283 - DNA, 330 bp, Shigella sonnei
atgaccaataaattatttgaacatacggtgttatatgatagtggtgatgccttttttgaattaaaaggaaatgcttctatgaagttatcaccaaaagctgcaatagaagtttgtaatgaagcagcgaaaaaaggcttatggattttgggcattgatggtgggcattggctgaatcctggattcaggatagatagttcagcatcatggacatatgatatgccggaggaatacaaatcaaaaatccctgaaaataatagattggctattgaaaatattaaagatgatattgagaatggatacactgctttcattatcacgttaaagatgtaa

SEQ ID NO: 485284 - DNA, 144 bp, Shigella sonnei; identical to SEQ ID NO: 478466

SEQ ID NO: 485285 - DNA, 768 bp, Shigella sonnei
atgggctggcaaaagtgtagcggtattaagcgcagctatttagtatcgaacaatttaagctggtttatttataaatatgacgaacttgctgaactggctgcggttatcgatcgcttgtatgagttccatcaactcactgaacagcgccctacgaataagcctaaaaattgccaacatgcggtacaagtggctaatgcgagtattcgtacgcctgataataagatcatattagagaacttgaactttcatgtttcgccaggcaaatggctattactgaaaggctactctggtgcgggaaaaaccacactgcttaaaacattatcccactgctggccgtggtttaaaggtgatatttcttctcctgctgacagttggtatgtgtcacaaacaccgttaatcaaaagcggcttactgaaagagattatttgtaaagcacttcccctgcccgtagacgataaatcgttgagcgaagtactgcatcaggttggtctggggaaattggctgcgcgtattcatgaccacgatcgctggggagatattctttccagcggcgaaaaacaacgtatcgccctggcacgattaattttacgacgtccgaaatggatatttcttgacgaaactacctctcatcttgaggaacaagaggctatacgcttactgcgtttagtgcgtgaaaaactacccacaagcggcgtcattatggttacacatcaacccggtgtctggaacctggctgatgatatttgtgacattagcacggttttataa

SEQ ID NO: 485286 - DNA, 2373 bp, Shigella sonnei
atgaagcgagttcttattcctggcgtcattttatgtggcgctgatgtggcgcaggccgtcgatgacaaaaacatgtacatgcatttttttgaagagatgacggtctatgctcctgtccctgtacccgtaaacggcaacacgcattacaccagtgaaagcatcgagcgtttaccgaccgggaatggcaatatcagcgatctgctgagaaccaaccctgcggtacgcatggattcaacgcaaagtacctcgttgaaccagggagatattcgccctgagaaaatctctattcacggtgcgtcgccctaccagaatgcctatttgattgacggtattagtgcaactaataacctgaacccagcgaatgagtccgatgccagtagtgcaaccaatattagcgggatgtcacaggggtattatcttgatgtcagcttactggacaatgtgacgctttatgacagttttgtgccggttgaatttggtcgcttcaatggcggggtaattgatgcaaagatcaaacgcttcaacgctgatgatagcaaggtgaaattgggttatcgcactacgcgttcggactggttaacatcgcatatcgatgagaataacaagagcgcatttaatcaaggctcttcaggaagtacttattactccccagattttaaaaagaacttttataccttgtcgtttaatcaggaactcgctgataacttcggcgttaccgccggtttatcgcgccgccagtctgatatcacccgcgcggattatgtttcgaatgacggcattgtcaccggtcgggcacagtataaaaacgttatcgatactgcattgagcaaatttacctggtttgccagcgaccgctttacccacgatttaaccttaaaatataccggctccagccgtgattataataccagcaccttcccgcagtctgatcgcgaaatgggtaataaatcctatggtctggcatgggatatggatacgcaactcgcatgggccaaactacgtaccaccgttggttgggatcatattagtgattatacccgtcacgatcatgacatctggtacaccgaactttcatgtacatatggtgatattacagggcgttgtacctgtggcggattaggacacatttcccaggctgtagataattacaccttcaaaacacgcctggactggcaaaaattcgccgtgggtgatgtttcgcatcaaccctacttcggcgcggaatacatctattccgatgcatggactgaacgccataaccagtctgaatcctatgtgattaatgctgcaggaaagaaaactaaccataccatttaccataaaggtaaaggcagcctgggaattgacaactacacgctgtatatggcggagcacattagctggcggaatgtgtcgttaatgcccggtgtgcgttatgactatgacaactatctgtcaaaccacaatatctccccgcgctttatgacggaatgggatatttttgctgatcaaacctcaatgattaccgccggttataaccgttactatggcgggaatattcttgatatgggattacgtgatatccgcaatagctggacggaatcggtatcaggtaataaaactctgacgcgttatcaggatttgaaaacgccttataacgatgaactggcaatgggattgcagcagaaaatcggtaagaacgttattgcgcgtgcaaactatgtttaccgtgaagcgcatgatcaaatcagcaaaagcagtcgtaccgacagcgcgactaaaaccaccattactgaatataacaacgatggcaaaaccaaaacgcattcgttcagcctcagttttgaactggccgaacccctgcatatccgccaagtagatattaacccacaaattgtctttagctatatcaagagcaagggcaacttgtcgttaaacaatggttatgaggagagcaataccggtgataaccaggtggtttataacggtaatctggtctcttacgatagtgttccagtggcagattttaataacccattaaagatctccttaaacatggatttcacgcatcaaccgagcgggttagtgtgggcgaatacgctggcctggcaagaagcgcgtaaagctcgcattatccttggtaagacaaatgcgcaatacatcagcgaatattcagattacaagcagtatgttgacgaaaaactggatagcagcctgacctgggacacccgcttgtcctggacgccacaatttctgaaacaacaaaacctgacgatcagtgccgatattctcaatgtactggatagcaaaaccgctgttgatacaacgaacaccggtgtggcgacctacgccagtggccgtactttctggcttgatgtcagcatgaaattttaa

SEQ ID NO: 485287 - DNA, 2784 bp, Shigella sonnei
atgagaaacctctgtttcttactgacgttagtggcaactctgttgctccccgggcggctgattgccgccgccttaccgcaggatgaaaagttaattaccgggcaactggacaatggcttgcgatatatgatttatccgcatgctcaaccaaaggatcaggtaaatttatggctgcaaattcataccggttcattgcaggaagaagacaatgagcgcggcgtggctcattttgtagaacatatgatgtttaacggcacaaaaacatggccgggtaataaagtcatcgaaacatttgagtcaatgggcctgcgtttcggtcgcgatgttaatgcctataccagctatgacgaaacgctgtatcaggtgagtctgccgactacgcagaaacaaaatctgcaacaagtgatggcaatcttcagtgaatggagtaatgccgcaacctttgaaatactcgaagtagacgctgaacgcggcgtaattactgaggaatggcgtgcccatcaggatgcgaaatggcgcacctctcaggcgcgccgccctttcctgctggcaaatacccgtaatttagaccgtgaacctatcggcctgatggatactgtcgccacggtcacaccggcacaattgcgccaattttatcaacgctggtatcaaccaaataatatgacctttatcgtggtcggcgatatcgacagtaaagaagcgctggcgctgataaaggataatttaagtaagcttccggctaacaaagcagctgaaaatcgcgtctggccgacaaaagccgaaaaccacctgcgctttaatatcattaatgataaagaaaaccgagtgaacggcatcgcactctattatcgcctgccaatggtacaagtgaacgatgagcaaagctttgtcgaacaagctgaatggagcatgttagttcagctgttcaatcaacgtctgcaggaacgcatacagtcgggcgagttgaagactatttctggcggcactgcgcgcagcgttaaaattgcacccgattatcagtcgctgtttttccgtgtaaatgcacgagacgataatatgcaggatgctgcaaatgcattaatggcagagttggcaaccattgatcagcatggtttttctgctgaagaactcgatgatgtcaaatctacccgcctcacctggctgaaaaatgcggttgatcagcaagctgaacgtgatttacgtatgctgaccagtcgcctggcatccagctcattaaataatacgccgttcttgtcgccggaagagacatatcaactttcgaaacgtctgtggcagcaaattaccgtgcaaagtctggcggaaaaatggcagcagttaagaaagaaccaggacgcattttgggagcaaatggtaaacaatgagcttgccgccaaaaaagcattgtctcttgcggctatcctggcgctggaaaaagagtacgccaacaaaaagctggcggcttacatcttcccaggcagaaatttatcgttaacagtagacgctgacccacaggcggaaattagcagcaaagaaacgctggctgagaatctgacatcattaacactttccaatggtgccagggttattctggcaaaatccgcgggtgaagagcaaaagctacaaattactgccgtatctaataaaggcgatttaagtttccctgcgcagcaaaaatcacttatcgcgctggcaaataaagcagtaagcggaagcggcgttggtgagctctcctcttccagcctgaaacgctggagtgcggaaaattcggtaaccatgagcagtaaagtcagtggcatgaatacgttgctctccgttagcgcgcggactaataaccctgaacctggttttcagttgattaaccagcgaatcacccacagcacgattaacgacaatatttgggcatcgctacaaaatgctcaaattcaggcgttgaaaacgctcgaccagcgtccagcggagaaattcgcccagcagatgtatgagacgcgctatgctgatgaccgcacgaaattactgcaagaaaatcagattgtacagtttactgccgcagatgcgctggctgccgatcgccagttgttttcatctccagcggatatcacgtttgtcattgtcggtaatgtctcagaagacaaactcgtggcgttaattacgcgttacttaggatcaatcaaacactctgattcgccattagccgcaggtaaaccattaactcgcgcgacggacaacgcatcggttactgtaaaagaacaaaatgaacctgtggcacaggtttcacagtggaagcgttatgattcccggacacctgttaatctggcgacgcgtatggcgctcgatgcttttaacgtcgcactggcaaaagatctacgcgttaatattcgtgaacaggcatctggagcatacagcgtttcttctcgcctctcggttgatcctcaggccaaagatatcagtcatttgctggcttttacttgtcaaccagaacgacatgatgaactgttaacgttagcgaatgaagtgatggttaagcgtctggctaaagggatcagtgagcaagaactgaatgaataccagcaaaacgttcagcgcagcctcgatatccaacagcgtagcgttcaacaattagcgaacactattgtaaatagtcttattcaatatgacgatcctgcagcatggactgagcaggagcaattgttgaaacaaatgacggtagagaatgttaacactgccgttaaacaatatctttctcatccggtaaatacttatactggagtattattgccaaaataa

SEQ ID NO: 485288 - DNA, 195 bp, Shigella sonnei
atgctaccatctatttcaatcaacaataccagcgcaacttacccagaatccattaatgaaaataacaatgatgaagttaatggattagtacaagagctcaaaaacctttttaatggtaaggaaggaataagcacctgtattaaacatctacttgagcttataaaaaacgccatacgagtaaacgacgatccttaa

SEQ ID NO: 485289 - DNA, 393 bp, Shigella sonnei
atgatcttcagcgcattaaaagaaatatatgatggagatcctggttttatcttcgataagatatcacacaaactcagacatacggtaacggaatttgatgagagcgggaatagcgaaccaacggacttatttacctggtacggtaaagataaaaaaggcaactctctcgctattgtaattaaaaataaaaacggaaatgattacttatctctcggttactacgatcaggacgactaccacattcaaagaggaattcgtattaatggtgatagtctcacccaatattgtagtgaaaaagccaggaatgcttcagcaatgcttcagcgtggtttgaaagcagtaaagctatcatggcagaatcatttgcaacaggttccgatcatcaggttgtaa

SEQ ID NO: 485290 - DNA, 336 bp, Shigella sonnei
atggcagaatcatttgcaacaggttccgatcatcaggttgtaaacgagctcaacggggaaagactgagagaacctaacgaagtttttaaacgtttaggtcgagcaataagatataattttcaagtggacgatgcaaaatttagacgcgacaatgtaaaagaaataatttctaatttattcgctaacaaagttgacgttgaccatcctgaaaataaatacaaagactttaaggatctcgaagataacgttgaaaaaagacttcaaaatcgccaggcgaaatatcaaaatgaaattaatcaactatctgcgccaggtgttaattttgatgatatttaa

SEQ ID NO: 485291 - DNA, 756 bp, Shigella sonnei
atgaagcttcgcctgtcggcgcttgctctgggaactacgcttctggtggggtgtgcgagttccggtacagatcagcaagggcgttctgacccgttagaagggttcaaccgcaccatgtacaacttcaacttcaacgtattagacccgtatattgttcgaccggtcgctgtcgcctggcgtgattatgttccgcaaccggcgcgtaatggtttgagcaactttactggcaaccttgaagaacctgcggtgatggttaactacttcttgcagggcgacccttatcaggggatggtccactttacccgctttttcctgaacaccattttggggatgggcggctttattgatgttgcagggatggcgaacccgaaactgcaacggactgaacctcaccgcttcggtagtacgcttggtcattatggcgtgggttatgggccttacgttcagttaccgttctacggtagcttcacgctgcgtgatgacggtggtgatatggcggatggtctttacccggttctttcctggctgacctggccgatgtctgtgggtaaatggacgcttgaagggatcgaaacccgcgctcagctgctggattccgatggtctgctgcgtcagtcgtccgatccttatattatggtgcgcgaagcgtacttccagcgtcatgatttcatcgctaatggcggcgaactcaaaccgcaggaaaatccgaacgcacaagcgattcaggatgatttaaaagatattgattctgaataa

SEQ ID NO: 485292 - DNA, 933 bp, Shigella sonnei
atggacaacgacaaaattgatcaacacagcgacgaaattgaagttgagagcgaagaaaaagagcgcggcaaaaaaatagaaatagatgaagaccgactcccctcccgggcgatggcaattcatgagcatatccgccaggatggtgaaaaagagctggaacgcgacgcaatggcgctactgtggtcagccattgcggcgggtctgtcgatgggcgcttcgttactggcaaaagggatatttcatgtcgaactggaaggtgtgccgggcagcttcttactggagaatctcggttatacctttggttttattatcgtcataatggcccgccagcaattatttaccgaaaacaccgtgactgcggtactacccgtcatgcaaaaaccgacaatgagcaacgttggcttacttatgcggttatggggagtcgtgctgctgggtaatattctcgggactggtattgctgcgtgggcatttgaatatatgcctatcttcaatgaagaaactcgcgatgcatttgtcaaaatcggcatggatgtgatgaagaacacccccagcgagatgtttgccaacgcgatcatttccggctggctgatcgccactatggtatggatgtttcctgcagcaggtgcggcaaagattgtggtgattatattgatgacctggcttattgccctaggtgacaccacccatatcgtggtcggttctgttgaaatcctctatctggtgtttaacggtacgctgcactggagcgatttcatctggcccttcgcactacctactttagcggggaacatctgcggcggcacctttatcttcgcgttaatgagtcatgcacagattcgtaacgacatgagcaacaagcgtaaagcagaagcacgccaaaaagcagaacgtgcggaaaacattaagaaaaatgataaaaacccggcataa

SEQ ID NO: 485293 - DNA, 1158 bp, Shigella sonnei
atgctcaccgttaagcagattgaagcagcaaagccgaaagaaaaaccataccgccttctcgatggtaatggcctgtacctttatgttcctgtatccgggaaaaaggtatggcagcttcgctacaagattgacggtaaggagaaaatcctgaccgtcggaaaatatccgcttatgactttgcaggaagcaagggataaggcatggactgcgaggaaagacatctcggttggcatcgttccggtaaaggcgaaaaaggcttcgtctaacaacaattcatttagtgcgatttacaaggaatggtacgagcacaagaagcaaatctggtcagtaggctatgcaactgaacttgccaaaatgtttgatgacgacattttacccatcatcggcggtcttgagattcaggatattgagccgatgcaactgctggaagtaatccgcagatttgaagatcgcggtgcaatggagcgagccaacaaagcccgcagaagatgcggcgaggtttttcgttacgctattgtcaccggaagggctaaatataacccggcacctgaccttgcagacgccatgaaaggataccgcaagaagaacttcccgttccttccagcagaccagatgcctgcattcaacaaagcactggcaacattttcaggaagtatcgtatcgctcattgcgaccaaagttttacgctacacagccctaagaacaaaagagcttcgttccatgctatggaagaacgtcgattttgaaaacaggattatcaccatcgacgccagtgtgatgaagggacgcaaaattcatgtggtcccgatgtcagaccaggtggttgaacttctcactacgctaagctcaatcaccaaaccagtctcagagtttgtttttgccgggcgcaacgataagaagaagccaatctgcgagaacgcggtattgcttgtgatcaaacaaatcggctatgaaggtctggaaagcggtcacggattcaggcatgaattcagcacgattatgaacgagcacgaatggcctgctgacgctattgaagtgcagctggcacatgccaacggcggatctgtgcgcggtatttacaaccatgctcagtatctcgataagcgcagagaaatgatgcagtggtgggcggattggcttgatgaaaaagtggagtaa

SEQ ID NO: 485294 - DNA, 216 bp, Shigella sonnei
atgagcggtaagcgttatcccgaagagtttaaaactgaagcagtcaaacaggttgttgatcgcggttattctgttgccagcgttgcaacacgtctcgatatcactacccacagcctttatgcctggataaagaagtacggtccggattactccactttttcatcaagccaatccgcccaccactgcatcatttctctgcgcttatcgagatactga

SEQ ID NO: 485295 - DNA, 354 bp, Shigella sonnei
atgttaggagcgatagaaaaacgctttggcgataaagtaccggaacagtccatccagtggctgacagataacggttcagcgtatagagcgcatgaaacacggcagttcgccagagagttgaatctggagccctgcacaacggcaatcagcagtcctcagagtaatggaatggcagaaaggttcgtgaaaacgatgaaggaagactacatcgcgttcatgccgaaaccgaatgtaagaacggcattgcataatcttgcagtggcgatcgaacattacaatgaaaaccatccgcacagtgcgctgggttatcgctctccgcgagaatatcgacgtcagcgggtaacgttaacttaa

SEQ ID NO: 485296 - DNA, 177 bp, Shigella sonnei
atggctgaatatttactcagcactcgttgttatcctattagtaaagtagctaaggtctgtggttatgccagtgtctcatactttacttatgtatttagacgttattttggtgtttctccaagtcaatactctcagaggagttcagaaagtaaaattcttactcaccagggaatctga

SEQ ID NO: 485297 - DNA, 504 bp, Shigella sonnei
atggcaactacatgttcagttatattgattttggagtcctttgatgtttatttcggaaaagagagtgtgtttctggagagaggttcatctgtacttgtcgactctagctctagagattttttcctgacatatcctgaaagagtgatagtggcggattttggcgctgagtttattagtcgctatttgaaagctaataacttaagggatatttctgattgtagggaatatctatcttatttaaaaataaactttgctgacttcagtttaattaaaggattaattagttgggctaatcactgtgctgaatacatagaaatttttgatgagtctattgcttttacatgtctctctgcattttcttctgaaaaacaatttggagtatttctgtttggatgtttgaaaagcacagggctaaagttaaaacgattattcatacggatttatctgcaccatggcgtcttaaggatatatcatcaagattatatctcagcgaaagtttactaa

SEQ ID NO: 485298 - DNA, 168 bp, Shigella sonnei; identical to SEQ ID NO: 9294

SEQ ID NO: 485299 - DNA, 345 bp, Shigella sonnei; identical to SEQ ID NO: 5912

SEQ ID NO: 485300 - DNA, 213 bp, Shigella sonnei
atgaacggcaaatctaggttagcctcttacgtgccgaaaggcaaggagaagcaggctatgaagcagcaaaaggcgatgttaatcgccctgatcgtcatctgtttaaccgtcatagtgacggcactggtaacgaggaaagacctctgcgaggtacgaattcgaaccggccagacggaggtcgctgtcttcacagcttacgaacctgaggagtaa

SEQ ID NO: 485301 - DNA, 282 bp, Shigella sonnei
atgaaaatcgaagaattacgtgaaatttttagtgaagatggcctctatactgtgcgcgttgagaatggcgctattgtcagccactgccttccagactacacaattctgataattcagccgtctttgccagcaggcacgggcggcgctctcacgcatttaaatctgattggtaccagcatcccccatgcactgaagaacaggccgaatggctcattcagtgttaccgcaggcgcggatgcgaggttaaaaaagcccttagcctcgactaccgtcactggataa

SEQ ID NO: 485302 - DNA, 1059 bp, Shigella sonnei
gtgcgggtattacttcgacctgttctggtaccggaactcggtctggttatcgttaagccaggccgtgaatcaatgtcagcattccataacggcagaatactggtggagccggaaccaaaaagcatgcgtaatctgccgtccggggtcgttcctgccgctcgccagccgctggtggaagacaaaacattgctgccgtttttcagtaacgcacgggtgattcgtgctgctggtggtgctggtgcattgtctgactggctgttgcgccatattaaatcctgccagtggccacacggcgattatcatcacagcgaaaccgtcattcaccgttatggtaccggcgcaatggtgttgtgctggcactgcgacaaccagctgcgtgaccagacatccgaatcactcgagcaacttgctcatcaaaacctgtcagcatggatgattgacgtcatcggtcacgcaataagcggtacgcaggagcgtgaattatctctggctgaattatcctggtgggcggtccgcaatcaggtggcggacgcgctaccggaagcggtattacgtcgttcgctggggttgcgtgcggaaaaaattcgctctgtgtacagtgaaagcgacatcataccgggagagcagacagccaccagcatactgaagcagcgcacaaaaaatattgcgttactgcctcacgtccaccagcaacagaacccaccacaggaaaagacggtggtcagcattgccgttgatccggagtcaccggctcagtatctccagcgccagaaatcacaacgggaagagatgcctgtatacacgcgctgggtaaaaacgcagaaatgcatgacgtgtggcaatcaggcagatgatccgcatcacatcattggtcatggactgggagggatgggaacaaaggctgatgatttgtttgttattccgttatgccgtaaatgccgtaacgaactacatgccggagtaaaagattttgaagagaaacacggcagtcagctgttgttgctgattcgttttttaatgcacgcgagaaattcgggtgttctgaagtggaaagcataa

SEQ ID NO: 485303 - DNA, 381 bp, Shigella sonnei
atgaccgagcgcatagaatttgttttaccttacccgccgacggtgaacacttactggcgtcgtcgtggcagcacatattttgtatcaaaagccggggagcgttatcgccgggcagtggcgcttattgttcgccagcagcggctgaaattaagcctgtccggaaggttggcaataaaaattattgcagaaccaccggataagcgccgccgtgacctggacaatattctgaaagcgccgctggatgcgctgacgcatgcggggttgctaatggacgatgagcagtttgatgaaatcaatatcgttcgtgctcagccagtatctggtggacgtctgggggtgaagatttatcccataatgcttgaagggcaggtcaaaaaatga

SEQ ID NO: 485304 - DNA, 822 bp, Shigella sonnei
atgaaactggaagatttaccgaaatactactccccaaaatcccccggcctgactgatgcatcggcctcaacgtcgaaagatgcgctgagtatcactgatgtgatggccgcgcagggcatgacacagaatcgggctgagatgggggtttctgcgttccttgggaaaatgggcattagtatgaatgacagagagcgggcaacagaattgctgacagaatatgcactcagtcggtgtgatcgcgtggcggcgttaagaaaactcccggcagaaataaaaccggcagtgatgcgtattatggcttcgtatgcgtttgaagattatgcccgtagcgcggcgagcaaaaaacagtgcccctgctgtcacggaaaaaaatttattgaaagcgaggtttttacaaacaagatccagtatccggatggtaagccgccggtatgggcaaagtgtacgaaaggtgtgtatccgtcttactgggaagaatggaaaaaagtcagggaggtggtaaaagttgcctgtccggagtgtggcggaaagggtgaggtttccaccgcctgtaaggattgccgtgggcgtggtgtcgccattcatcgtgaagagtcggtaaaacgtggtatgcctgttatcagagactgccagcgttgtggtggtcgtggctatgaaagactaccatcaacggaggcatttaatgctatatgcgaggtgacaaaccagataacacgcgcgtcatgggaaaaaacagttaagaaattttatgatgcgctggtgacccggtttgatattgaagaagcatgggctgagcggcagttaaaaaaggtaactaggtaa

SEQ ID NO: 485305 - DNA, 198 bp, Shigella sonnei; identical to SEQ ID NO: 263519

SEQ ID NO: 485306 - DNA, 1059 bp, Shigella sonnei
atgcttaatactgtaaaaatatccagttgtgagttaatcaacgccgactgcctggaatttatccggtcgttacccgaaaattctgttgacctgatagtcacggacccgccgtactttaaagtgaagcctgagggctgggataaccagtggaagggcgacgatgattacctgaagtggctggaccagtgtctggcgcagttctggcgggtgctgaaacctgccggaagtctttacctgttctgtggtcatcgcctggcatctgatatcgaaatcatgatgcgtgaacgcttcagtgtgctgaaccatattatctgggcgaagccgtccggacgctggaacggatgcaacaaggaaagcctgcgggcgtatttccccgccacagagcgcattctgttcgcggaacattatcaggggccgtatcgtccgaaagatgccgggtatgcggcgaagggcagtgcactgaaacagcatgtgatggccccgctgatttcttactttcgtgatgcgcgagctgccctggggataacggcaaaacagattgcagatgccacaggaaagaaaaacatggtgtcgcactggttcagtgccggtcagtggcagttgccgaatgaaagcgattatctgaaattacaggcgctgtttgcccgggtggcagaagagaagcatcggcgtggtgaactggaaaagctccaccaccagctggtggatacgtatacctcactgaaccggcagtatgcggagctgctgagtgaatataaacatctgcggcggtattttggcgtgacggtgcaggtgccgtataccgatgtgtggacgcataaaccggtgcagttctatcccgggaaacatccgtgcgaaaaaccggcagaaatgctgcagcagataatcagcgctagcagtcgtccgggtgacctgattgcagattttttcatggggttgggttcgacagtgaaagcggcactggcgctcgggcgtcgtgcaattggcgttgagctggagactgaacgttttgagcagacggttcgggaagtacaggatttagtcagccagaacggatga

SEQ ID NO: 485307 - DNA, 372 bp, Shigella sonnei; identical to SEQ ID NO: 11381

SEQ ID NO: 485308 - DNA, 282 bp, Shigella sonnei
atgcttcgcctggttcgtgcagtgatcccggttgctgttctgatgatgttgttccctgagttagctatggctgctggtaaaggcacggacctgatggctaaaggtcaggaaacggttaaggcgaccttcggtaaggactccagtatcgttaaatgggttgttctggctgaagttctggtcggtgcagtcatgtacatgatgaccaaaaacgtcaagttcctggtcggctttgccatactctctgtatttattgcagtaggtatgtctgttgccggattctga

SEQ ID NO: 485309 - DNA, 312 bp, Shigella sonnei
atgttgggagacgagaataaacttaagaaatatcgtttcccggaaacactgaccaaccagagccgctggtttggcctgccactggatgaactgatccccgcagcaatctgtgttggctggggtatcacaacatcgaaatatctgttcggtattggtgcagcggttctggtttatttcgggattaaaaaactgaaaaaagggcggggcagttcctggttacgtgacctgatttactggtatatgccaacagccctgctgcgcggtatttttcataatgttcccgattcgtgtttccggcagtggattaaatag

SEQ ID NO: 485310 - DNA, 195 bp, Shigella sonnei
atggaacacggtgcccgtttaagtaccagtcgtgtaatggccatcgcctttatatttatgtcagtgcttattgttctcagcctctctgttaacctcattcagggggtgaataactaccgtcttcagaatgagcaacgcactgccgtgaccccaatgggatttaatgtgccctttgccgtgtcacacctaccgtaa

SEQ ID NO: 485311 - DNA, 1272 bp, Shigella sonnei
atgtgccctttgccgtgtcacacctaccgtaaccagctggcgtttatcgatattttcttccggggaatgaataacaccaactacaacatggcggtctgtggcacctccggggccggtaaaaccgggctgatacagccacttatccgcagcgtgctggactccgggggctttgccgtggtgttcgacatgggggatggctacaagtccctgtgtgagaacatgggtggcgtatatctggacggtgaaaccctgcgttttaacccgtttgcgaacatcaccgatatcgaccagtcagcggagcgtgtccgtgaccagttgtcagtgatggccagccccaacggtaacctggatgaagtgcatgaaggtctgctgctgcaggcggtcagggcctcctggctggccaaagagaacagggcacgtattgatgacgtggtggatttcctgaaaaacgccagtgacagcgagcagtatgccgggtcaccgactatccgcagccgtctggacgaaatgattgtgctgcttgaccagtacactgccaacggcacttacggccagtattttaactctgatgagccgtccctgcgggatgacgcaaaaatggtggtgctggagctgggcggactggaagaccgtccgtcactgctggttgcggtgatgttctccctgattatctacatcgagaacaggatgtaccgcacgccgcgtaacctcaagaaactgaacgtcattgatgaaggctggcgtctgctggacttcaaaaatcacaaggtcggtgagtttattgagaaaggttaccgtaccgcccgtcgtcataccggtgcttatatcaccatcacacagaacatcgtcgactttgactctgacaaggcctccagtgcggcccgtacggcatggggtaactcctcctacaaaattatcctcaaacagagtgcgaaggagttcgcaaaatacaaccagctgtatccggaccagttccagccactgcagcgcgacatgattggtaagtttggtgcggccaaagaccagtggttcagttccttcctgctgcaggtggaaaaccattcctcctggcaccgcctgtttgtggacccgttaagccgcgccatgtacagctctgacggcccggattttgagtttgtgcagcagaaacgtaaagaggggctgagtattcatgaggcggtgtggcagctggcgtggaagaagtcagggccggagatggcttcgctggaagcctggctggaagaacatgagaaatacaggagtgttgcatga

SEQ ID NO: 485312 - DNA, 387 bp, Shigella sonnei
atgaccacaacgcaaaaaacgactgatgttacagccccccgacgcagccactggtggtggacggtgccgggatgcctggcaatggtgttactgaacgcagccgtcagttacggcattgtcagactgaacgcaccgatgactgccgccttcaacatgaaacagactgtggatgcattttttgacagcgccagtcagaaacaactgtcagaagcacagtcaaaagccctttcagcgcgttttaacacggcactggaagccagcctgcaggcgtggcagcagaaacaccacgcggtcattctggtgtcgcctgccgtggtacagggggctccggatatcacccgggaaatccagcaggatattgcccggcgaatgagagcggaaccatga

SEQ ID NO: 485313 - DNA, 1305 bp, Shigella sonnei
atgagatgccgggggctgattgccctgctgatatgggggcagagtgtggccgccgccgatcttggcacctggggtgatctgtggccggtaaaggagccggacatgctgacggtgatcatgcagcgcctgacggcactggagcagtccggtgagatgggccggaaaatggatgcctttaaggagcgggtgatccgcaacagtctgcggccccctgccgtgcccggtatcggacgcacggagaaatacagcagccggttgtttgacccgtccgtcagactggctgcggatatccgggataacgaagggcgggtggccggctttgagtcagcctacgtggccctgtcgcgtatgaagcagcatgtgcaggtgtacaccgataaccgtcagggctggacggatgccatcaacaatgccgtacagaaaggaactgcccacgatgtgtttgagccgaaaccggaccgggaggtcatgaatgcagagcggctgttcagtacggcgcgggagctgcgggacgtggcggcaggccgtgccgttctccgtcaggcggggctggccgggggagaaagtcctgcacggtttattgctccgggacgtaaatatccgcaaccgtatgtggcactgccggcgtttgaccgtaacggcaagtccgccggtatctggctgaacccgctgaccacggatgacggaaacgggctgcggggattcagcggtgaaggtcgggtaaaaggcagcggggatgcgcagttcgtggccctgcagggcagccgtaacggagaaagcctgctggctgataatatgcaggatggcgtccggattgcccgtgataatcctgacagtggtgtggtggtaagcattgccggtgaaggccgtccgtggaatcccggtgccatcaccgatggccgcgtgtggggggatatcccggacaacagcgtccagccgggagccggaaatggcgaaccggtcacggcagaggtactggcacagcggcaggctgaagaggccatccgccgtgaaacggaacgtcgcgcagatgaaattgtccgtaaaatggcagagaacaaacctgacctgccggacggcaaaacagagctggctgtcagggaaattgccgggcaggagcgtgaccgggctgccataactgaacgggaagccgcgctgccggagagtgtgctgcgtgaatcacaacgggagcgggaagcggtccgggaggttgcccgggaaaatctgctgcaggagcgtctgcagcagatggagcgggatatggttcgtgacctgcagaaagagaaaaccccgggcggagactga

SEQ ID NO: 485314 - DNA, 582 bp, Shigella sonnei
atgacaacggataacacgaacacgacacgtaacgattcactggctgcacggaccgatacctggttgcagtcatttctggtctggtcacccggacagcgggatatcatcaaaacggtggcactggtgctgatggtactggaccacatcaatctgatattccagctgaagcaggaatggatgtttctggccgggcgaggagcctttccgctttttgccctggtgtgggggctgaatctgtcccgtcatgcgcatatccggcaaccggccattaaccggctgtggggatggggaattattgcccagttcgcatattatctggcaggctttccctggtatgaggggaatatcctgtttgcctttgcagtggcggcacaggtgctgacgtggtgtgaaacgcgcagtgggtggcgtacagcagcggccattcttctgatggccctgttgggggcctttgtccggcaccagttacggcattgccgggctgctgatgctggcagtcagccaccgactgtaccgggcggaagacagagcggaacgtctggcgctggtcgcctgcctgctggctgttattccggcgcttaa

SEQ ID NO: 485315 - DNA, 561 bp, Shigella sonnei
atgacagagcagaagcgaccggtactgacactgaagcggaaaacggaaggggagacgcctgtccgcagccggaaaaccatcatcaatgtcaccacgccaccaaagtggaaggtgaaaaagcagaagctggccgggaaagcagcccgggaagcagagctggcggcaaaaaaagcgcaggccagacaggcactgtccatttatctgaacctgcccacgctggatgaggccgtgaataccctgaaaccctggtggccgggattatttgacggtgacaccccccggcttctggcctgcggtatccgggacgtgttactggaagacgtggcgcagcggaatatcccgctctcgcataaaaaactgcgcagggcgctgaaggccatcacccgttcagaaagctatctgtgtgccatgaaagccggtgcctgccggtatgacacggaagggtatgtgacggagcatatttctcaggaggaggaagcgtatgcggcagcgcgtctggataaaatccgccgccagaaccggataaaggcagaacttcaggccgtgcttgatgagaaataa

SEQ ID NO: 485316 - DNA, 675 bp, Shigella sonnei
atgctgatgcaggggctgattagcgccgagcagctggcacaggcgctggcagagcaaaacggcgtggcgtgggaatccatcgatgcctggcagatcccttcctcgctgattgccgaaatgccggcctccgtggcgctgcattatgcggtactgccgctgcgtctggaaaatgatgagttaattgtcggcagtgaagatggtattgacccggtttcgctggcggccctgacgcgtaaagtcggacgcaaagtgcgttacttcattgttctgcggggacaaattgtcacggggttacgtcactggtatgcacgccgacgcggtcacgatccgcgggcaatgttgtacaatgcggttcagcatcagtggctcacggaacagcaggccggtgaaatctggcggcaatatgtgccgcatcagttcctgttcgccgaaatactgaccacgctcggtcatattaatcgttcagcaattaacgtgttgttattgcgccatgaacgcagttctctgccgctcggcaagtttttggtcaccgaaggcgttatcagccaggaaacgttggatcgcgtcctgacaattcaacgcgaattacaagtttcgatgcaatcactattactcaaagcaggtttaaacacagaacaggttgcgcaactggagtccgaaaatgaaggagaataa

SEQ ID NO: 485317 - DNA, 2973 bp, Shigella sonnei
atgaaggagaataaccttaatcgcgtcatcggatggtctggtttactgctgacgtctttattgagtaccagcgcactcgcagacaatatcggcaccagcgcagaagagctggggctgagcgattatcgccattttgttatttatccccgtctcgataaggcgctgaaggcacagaaaaataacgacgaagcaaccgccatccgcgaatttgaatatatacaccagcaggtgccggataatattccgctgactttataccttgcggaagcctatcgccattttggtcatgatgaccgggcgcggctgttgcttgaggatcaactgaaacgtcacccaggagatgcccgacttgagcgcagtctggcggctattccggttgaagtgaaaagcgttacaactgttgaagaactgcttgcccagcaaaaagcgtgcgatgctgcgccgaccctgcgttgtcgcagtgaagtcgggcagaatgccctgcggcttgcacagttacctgtcgccagagcgcaactgaacgatgcgacgtttgctgcatcgccggaaggaaaaacgctgcgaaccgatctgctgcaacgggcaatctacctgaaacaatggtcccaggcagatacgctatacaatgaagcacgccagcagaacacattaagcgcggcagaacgccgtcagtggtttgacgtgcttcttgccgggcagctggacgatcggatcctagcactgcaatcacaggggatcttcaccgatcctcagtcatatattacttacgcgaccgcgctggcttatcgtggcgaaaaagcacgcctccagcattatctcaatgaaaataagccgctgtttaccacggacgcacaagagaaaagttggctctatctgttatctaaatacagcgccaaccccgttcaggcattggcgaattatacggtgcagtttgccgataaccgccagtatgttgttggcgcgacgctaccggtgctgttaaaagaaggtcagtacgacgcagcgcaaaaactgctcgccaccctccccgccaatgaaatgcttgaggagcgttatgctgtcagcgtggcgacccgtaacaaggctgaatctctgcgtctggcacgattgctgtatcagcaagaaccggcaaatcttacccgcctggatcaactgacctggcaactgatgcagaacgagcagtcacgcgaagctgccgatttattgctgcaacgctatcctttccagggcgatgcgcgtgtcagccagactttaatggcgcgactggcgtctctgctggaaagtcatccttacctggcaacgccggcgaaggtggcgattttatcgaaacccttaccgctggcggagcaacgtcagtggcaaagtcagttgccgggtattgcagataattgcccggcaatagttcgcttgctgggcgatatgtcgccttcctacgatgctgccgcctggaaccgtctggcaaagtgttatcgggacacgctacccggtgtggcgttgtatgcatggcttcaggccgaacaacgacaaccgagcgcctggcaacatcgtgcggtagcctatcaggcgtatcaggttgaggactacgccaccgcactggcggcctggcagaaaatcagtcttcacgacatgagcaatgaggatctgcttgctgctgccaataccgcccaggcggcaggaaatggtgcggctcgcgatcgctggctacaacaggcagaacaacgtggactgggaagcaatgccctctactggtggctgcatgcacaacgttacattcctggtcagccggaactcgcactgaacgatctcacgcgctcaatcaatattgcgccttctgccaacgcttacgttgcgcgggcgacaatttatcgccaacgtcataatgtcccggccgcggtgagtgatttgcgcgccgcgctggaactggaaccgaataatagcaacatccaggcagcgcttggttacgccttgtgggatagcggtgatatcgcacagtcgcgggaaatgctcgaacaggcgcataaaaggcttccggacgatccggcactgatccgacaactggcctacgtgaaccagcgtctggatgacatgcctgcgacgcagcactacgcccggctggtgattgatgacattgataatcaggcgctgataaccccactgaccccagagcaaaatcaacaacgcttcaatttccgccgtttgcatgaggaggtcggtcgccgctggacgttcagtttcgattcttctatcggcttgcgttccggggcaatgagtaccgctaacaataatgttggcggcgcagcgccagggaaaagctatcgtagctacgggcaactggaagccgagtaccgcatcggacgcaatatgctgctggaaggcgacctgctctcagtttatagccgcgtctttgccgataccggagaaaacggggtgatgatgccggtgaaaaatccgatgtccggcaccggtctgcgctggaagccgctgcgcgatcagatctttttcctcgccgtcgaacagcagttgccgctgaacgggcaaaatggcgcatccgataccatgctgcgcgccagcgcctcattctttaatggcggcaaatacagcgacgaatggcacccgaacggttcaggctggtttgcccaaaacctgtacctcgatgcggcgcaatatatccgccaggatattcaggcgtggacggcagattatcgcgtcagctggcatcagaaggtagctaacggacagactattgagccttacgctcacgttcaggacaacggctatcgtgataaaggcactcagggcgcgcagcttggcggagtcggggtccgctggaatatctggaccggcgagacgcactacgacgcctggccgcacaaagtcagtctcggcgtcgagtatcaacatacctttaaggcgattaatcaacgtaacggagagcgcaacaacgcgtttctcaccattggagtgcactggtaa

SEQ ID NO: 485318 - DNA, 891 bp, Shigella sonnei
atgcgtaagttcattttcgtattgctgacactgcttttggtcagccctttttcctttgcgatgaaaggtattatctggcaaccacaaaaccgagatagtcaggttaccgatacccagtggcaggggctgatgagtcagttacgtttgcaaggcttcgataccctggttttgcaatggacccgttacggcgatgcatttacccagccagaacagcgcacgttattgtttaagcgtgccgcagctgcgcaacaggctggcctgaaactgattgtcgggctgaacgccgatccggaattttttatgcaccagaaacagtcgtccgcagcgctggaaagctatcttaatcgcctgctggctgccgatctccagcaagccagattatggagcgccgcgcctggcataacgccggatggctggtacatcagcgcggaaattgacgacctgaactggcgcagcgaagctgcccgtcagcctttgctaacatggttaaacaacgcgcagcggctgattagcgatgtttcagcaaaaccggtttatatcagtagttttttcgccggaaacatgtcgccagatggctatcgccaactgctggaacaagttaaagcaaccggagttaatgtctgggtacaggatggcagcggcgtggataaacttaccgctgaacagcgtgaacgttatctacaggccagcgccgattgccaaagctccgccccagcaagcggcattgtttatgaactgtttgtcgccggcaaaggcaaaacctttacagcgaaaccgaaaccggatgcagagatcgcctcgctgttagcgaaacgttcctcttgcggtaaagacactctctatttctctctgcgctatttgcccgtcgcgcacggcattctcgagtattaa

SEQ ID NO: 485319 - DNA, 762 bp, Shigella sonnei
atgcaattgagcagcagtgaaccttgcgtggtgatcctgaccgaaaaagaggtagaggtaagcgtcaataaccatgctacgtttacccttccgaaaaactacctggccaccttcgcgtgcaacaataacgtcattgaactctcaacgttaaatcacgtattaatcacccacatcaaccgtaacatcatcaacgattatctgttgtttttaaataagaacttaacctgtgtaaagccctggtcgcggctggcaaccccggttatcgcttgtcatagccgtacaccggaagtgttccggctagccgccaaccacagcaagcagcaacccagcaaaccctgcgaagcggagttgacgcgcgcattgctttttaccgtattgtctaactttcttgagcaatcgcggtttattgccctactgatgtatatcttacgcagcagcgtccgcgacagcgtctgccgcattattcaaagcgatattcagcattactggaatctgcgaattgtcgccagttcgctatgtttaagccccagcctgctcaaaaagaaattaaaaaacgaaaatatcagctatagccagattgtcacagagtgtcgtatgcgttacgccgtacagatgttattgatggataacaaaaatatcactcaggtggcgcaattatgtggctatagcagcacgtcgtactttatctctgtttttaaggcgttttacggcctgacaccgttgaattatctcgccaaacagcgacaaaaagtgatgtggtga

SEQ ID NO: 485320 - DNA, 150 bp, Shigella sonnei; identical to SEQ ID NO: 193044

SEQ ID NO: 485321 - DNA, 441 bp, Shigella sonnei; identical to SEQ ID NO: 22297

SEQ ID NO: 485322 - DNA, 390 bp, Shigella sonnei; identical to SEQ ID NO: 22296

SEQ ID NO: 485323 - DNA, 540 bp, Shigella sonnei; identical to SEQ ID NO: 19206

SEQ ID NO: 485324 - DNA, 837 bp, Shigella sonnei; identical to SEQ ID NO: 22759

SEQ ID NO: 485325 - DNA, 804 bp, Shigella sonnei; identical to SEQ ID NO: 6089

SEQ ID NO: 485326 - DNA, 816 bp, Shigella sonnei; identical to SEQ ID NO: 6090

SEQ ID NO: 485327 - DNA, 498 bp, Shigella sonnei
atgtctgaatatcgtcgttattacatcaaggggggaacctggtttttcacggtgaatttacgcaatcgtcgaagccaactcttgaccacccagtaccagatgctccgtaacgccattattaaagttaagcgagacaggccttttgaaatcaacgcctgggtcgttttgccagagcatatgcattgcatatggacattacctgaaggcgatgatgatttttcctctcgctggcgggaaattaaaaagcaatttacccatgcttgtggattgaaaaatatctggcaaccacgtttttgggagcacgccatccgcaataccaaagattataggcatcatgttgattatatttatataaatccagtaaagcatggttgggtaaagcaagtgagtgattggccattctcaacgttccatcgcgatgtcgcgcgagggttatatcccatcgattgggcgggggacgtaacggatataaatgctggcgagcgtatcattttataa

SEQ ID NO: 485328 - DNA, 1740 bp, Shigella sonnei
atgctttcacgctcggatttactgacgctgttgacaatcaactttattgtcgtcaccaaaggggccgagcgtatctccgaggtttctgcccgctttaccctggacgcgatgcccggtaagcagatggcgattgacgccgatcttaatgccgggttgatcaatcaggcgcaggcacaaacccgacgtaaagatgttgccagcgaggccgatttctacggcgcgatggacggggcatcgaaatttgtgcgcggggatgctatcgccgggatgatgattctggcgatcaacctgatcggcggcgtctgtatcgggatcttcaaatacaacctgagcgccgacgccgccttccagcagtatgtgctgatgaccatcggcgacgggctggtggcgcaaatcccttccctgctactctccaccgcggcggcgattatcgtcacccgcgtcagcgacaacggcgatatcgcccatgacgtgcgtaaccagttgctggcaagcccatcggtgctctacaccgctaccggaattatgttcgtactggcggtagtgccgggaatgccacatctgccgtttttgctgttcagcgccctgcttggctttaccggctggcggatgagcaaacgcccgcaggcggcggaagcggaagagaaaagtctcgaaacgctgacccgcaccatcaccgaaaccagcgagcaacaggtcagttgggaaaccattccgctgatcgagcccatcagcttaagcctcggctacaagctggtggcgctggtggacaaagcccagggcaacccgctcacccagcgtattcgcggcgtgcgacaggtgatatccgacggcaacggcgtgctgctgccggagatccgcattcgggaaaacttccgccttaagcccagccagtacgctattttcatcaacggcattaaggctgatgaagcggatattccggcggataaactgatggcgctgccctccagcgaaacctacggcgagatagacggcgtgctggggaacgacccggcgtacgggatgccggtgacctggatccagcctgcgcagaaagcgaaggcgctgaatatggggtatcaggtgatcgacagcgccagcgtgattgctacccatgtaaataagattgtgcgcagctatattcctgatttatttaactatgacgatattacgcagttgcataaccgtttgtcgtcgatggcaccgcgcctggcggaggatttaagcgcggtgctcaattacagccagttgctgaaagtgtaccgggcgctgctgaccgaaggcgtttccctgcgcgatatcgtcaccatcgccaccgtgctggtcgccagtagcgcggtgaccaaagatcatattctgctggcagccgatgtgcgcctggcgctgcggcgcagcattacccatccgttcgttcgcaagcaggagctgacggtgtataccctgaataatgagctggaaaatctgctgactaacctagtgaatcaggcgcaacagggcggtaaagtgatgctcgacagcgtgccagtggacccgaatatgctcaaccagttccagagcacgatgccacaggtgaaagagcagatgaaagcggcggggaaagacccggtgctgctggtgccaccgcagctgcgccctttgctggcgcgttatgcaaggttgtttgcgccggggctgcatgtgctgtcgtataacgaagtgccggacgagctggagttgaagattatgggggcgttgatgtaa

SEQ ID NO: 485329 - DNA, 636 bp, Shigella sonnei
gtggcggtgccggaagaaacggagaaaaaagcgcgcgacgtcaatgagaaaacggcgctgctgaagaagaaatccgccaccgagcttggcgagctggcaaccagtatcaccaccattgcccgtgatgcgcatatggaagcgaatctggagatggagattgttccccagggattacgcgtgctgattaaagacgaccagaatcgcaatatgttcgaacgcggcagcgcgcagattatgccgttctttaaaacgctgctggtggagctcgcgccagttttcgactcgctcgataacaaaattattattaccgggcataccgatgcgatggcttacaaaaacaatatctacaacaactggaacctttcgggcgatcgcgcgctttcggctcgtcgggtgctggaagaggccggaatgccggaagataaagtgatgcaggtaagcgcaatggcggaccagatgctgctggattccaaaaatccgcaaagcgcgggcaaccggcgcattgagattatggtgctgaccaaaagtgcgtccgatacgctgtatcaatactttggtcagcatggggataaagtggtgcagccgctggtgcaaaagctggataagcagcaggtgctttcgcagcgaacgcgttaa

SEQ ID NO: 485330 - DNA, 1056 bp, Shigella sonnei
atgcgtaaaatcattcatgtggatatggactgctttttcgcagcggtggagatgcgcgacaatcccgccctgcgcgatatccctattgctattggcggcagccgcgaacgtcggggggtgatcagtaccgccaattatcccgcgcgtaaatttggcgtacgtagcgctatgccgacagggatggcgctcaaattatgcccgcatctcaccttgcttccggggcgctttgacgcctacaaagaagcctcaaatcatatccgcgaaatcttctcgcgctacacctcgcgtattgaaccgttgtcactggatgaggcttatctcgacgtcaccgatagcgtccattgccacggttctgcgaccctcatcgcccaggaaatccgccagacgattttcaacgagctgcaactgacggcgtctgcgggcgtggcacccgtaaagtttctcgccaaaatcgcctccgacatgaataaacccaacggccagtttgtgattacgccggcagaagttccggcatttttacaaaccttaccactggcaaaaatccccggcgtcggcaaagtctcggcggcaaaactggaagcgatggggctacgaacctgcggtgatgtacaaaagtgtgatctggtgatgctgcttaaacgctttggcaaatttggccgcattttgtgggagcgtagtcaggggattgacgagcgcgacgttaacagcgaacggttgcgaaaatccgtcggcgtggaacgcacgatggcggaagatatccaccactggtctgaatgtgaagcgattatcgagcggctgtatccggaacttgaacgccgtctggcaaaggtaaaacctgatttactgattgcccgccagggggtgaaattaaagttcgacgattttcagcaaaccactcaggagcacgtctggccgcggctgaataaagctgacttaatcgccaccgcgcgtaaaacctgggatgaacgccgcggcgggcgcggtgtgcgactggtggggctgcatgtgacgttgcttgatccgcaaatggaaagacaactggtgctgggattatga

SEQ ID NO: 485331 - DNA, 375 bp, Shigella sonnei
atgaccgccagtcagcattattctccacaacaaattgccgcctgggcgcagattgacgaatctcgctggaaggagaaactcgcgaaatcacaagtgtgggttgcggtcattaatgcacaaccggttggttttatttcccgcattgaacattatatcgatatgttatttgttgaccctgaatacacccgccgcggggttgccagcgccttgttaaaaccatttattaagtctgaatccgaacttacggtagatgccagcataaccgcaaaacccttttttgaacgttatggttttcagacagttaagcagcagcacgttgaatgccggggagcgtggtttactaatttttatatgcaatataaaccgcaacattaa

SEQ ID NO: 485332 - DNA, 567 bp, Shigella sonnei
atgggcaaatatattcgtcccttatccgatgcggtatttaccatcgcatctgatgacctgtggatcgagagtttagcgatccaacaattacacaccacggcaaatttacccaacatgcagcgcgtagtggggatgccagatttacatcccggacgcggctacccgattggcgcagcgttcttctctgttggccgtttttacccagcactggtcggcaatgatatcggctgcggcatggcgctatggcaaacagatattctcgctcgcaaatacaacgccgataagtttgaaaagcgattatcagctttggatgacgttgctgaagaaagctggctggaggaaaacctgccgtcagcatttgcacagcatccgtggcgcagctcgcttggctctatcggtggcggcaatcatttcgctgaactgcaacaagttgatcaaatcatcgacgctgaactgtttgcactggcaggtctggatgcacaacatctgcaactgttggttcatagcggctcgcggggggtgcccctattaagttgtcaagcatgttatgacccctgcggggtataa

SEQ ID NO: 485333 - DNA, 951 bp, Shigella sonnei
gtggtggcaagtgaactgcacggcgaacagccacaggcggtgccaggacggcagggagcggggacggcgctggagaaccattttgcggtgatcccggcagacagaacatggcgaccacagccgttgctgaaaccgctggtcgacggcccgcagagcgctgtcgtgacaggaccggcaggcgaggaaatcttctgcgacgaacatggtcgcgtgcgggtgaagttcaactgggaccgttataacccggcagaccaagacagttcgtgctggatccgtgtggcacaggcgtgggcaggcaccggttttggccacctggcgataccgcgtgtgggtcaggaagtgattgtagacttcctcaacggcgatccggaccagccgatcattatggggcgcacctaccaccaggaaaaccgcccccccggcagcctgccgggaacaaagacgcagatgaccatccgctccaaaacgtacatgggcagcggatttaatgagctgaagtttgatgatgcgacagggagagaacaggtctacatccacgcgcagaagaacatggataccgaagtgctcaacgaccgtaccaccaccgtaaaacacgatcaccgcgaaaccgtaaaaaatgaccagacggtcacgatccaggaaggtaaccgccttcttacggtggaaaaaggccacaagatcaccggagtactgaaagggtctttatctgaggatgtctttcaggacagaggcacgattgccggttcggtgcatgttgacgctgtaaacaatggtggcgaaggcgacggtatacaggcttatacggcgattaaggaaattttgctggccgtggaggaaagcaaaattgcgctgacgccggatagcattcagctacaggtcggggaatcgacggtaatcaggctgtcgaaggatggcatcaccatcgtgggcggttctgttttcatcaactga

SEQ ID NO: 485334 - DNA, 462 bp, Shigella sonnei; identical to SEQ ID NO: 9580

SEQ ID NO: 485335 - DNA, 1140 bp, Shigella sonnei
atgagtgaaggaccaggcgggccacagggagcgaccgcaggcggtacgctggcaatgcgaatgctgtcacagcaggcgatggtcgccagccagatgaaacgggcagccaacgacaaagccattgcacagatgttggcatcaaaaaagtctggcccccccgccgccaggctgggcgatgaaattcagcacaagagttttttgggggcgctggcaggggccgtactgggggcgatagtgaccatcgcagaaggttgcctgattatggccgcctgtgccaccggcccttatgcgctggttctggtacctgcgctgatgtatgccagctataaggcgagtgattatgtggaggagaaacagaaccagcttgaatcatggataaacagcttttgtgacacggacggcgccatcaataccggttctgaaaacgtaaaaattaacggcgagctggccgcacgtgcagcggtcacccttccccctcctcccccacctggagcaatacctgaagtcccacagggggaaccctcatggggtgatattgccactgacctgcttgaatcggcagcggaaaaagcagtaccactggcgaaggcctgggggaacgctgttatcaccctgacggacagcaatgccggttttatggatcgcgtcagcgccggcgcatcgcttctgtttcccgccggtccggtattaatggagtttgccaccatggtgggcgggcgtggcgaaatcaaaaaagatgtggatttcccggaagccggtgaggacacggcgctctgcgacaaggagaacaaaccaccgaggatagcccagggcagcagcaacgtctttatcaacaatcagcctgccgcgcgcaagggcgacaaactggagtgcagtgcggcgatcgtgggaggttcgccggacgtctttattggcggtgagcaggtcacatatctggatatccagccggagttcccgccgtggcagagaatgatcctggggggaataacgatagccagctatcttctgccgccagcgggactactgggaaaactgaagaatctggcgagactcggcaaactgggaaactgctggggaaaagcgggaagctgctgggcgcaaagctcggcgcgttgctggggaaaacaggtaagtcgttaa

SEQ ID NO: 485336 - DNA, 3432 bp, Shigella sonnei
ttgctggggaaaacaggtaagtcgttaaaaagtattgccaataaagtcatcagatgggtaacagatcctgtcgatccggtaaccggcgcatactgcgacgaacgtaccgacttcaccctgggccagaccctccccctctccttcacccgtttccacagttctgtactgccgctgcatggcctgaccggcgtgggctggagcgactcctggagcgaatacgcctgggtgcgtgaacagggaaaccgggtggatatcatcagccagggagccacgctgagatttgccttcgacggtgacagtgatacggcggttaacccgtatcacgcccagtacattctgcgccgccgcgatgattatctggagctgttcgacagggatgcactgagcagccgcttcttttatgacgcctttccgggaatgcgtctgcgccacccggtgactgacgataccagcgatgaccgcctggcacacagccccaatgaccggatgtacatgctgggcgggatgagcgacaccgccagcaaccgcatcacgtttgagcgcgacagccagtaccggatcacgggtgtcagtcacaccgacgggatccggcttaaactgacgtaccacgccagcggctacctgaaagccattcaccgcacggataacgacatacagacgctggcgacctacgaacaggatgcgcgggggcggctgacagaagcggatgcgcggctggactaccacctgttttatgagtacgacgctgcggaccggatcatccgctggtccgataacgaccagacgtggagccgtttcacctacgatgaacagggccggtgcgtgaatgtcaccggggcggagggctattacaacgccacgctggactatggtgacggctgcaccaccgtgacggacggcaagggcattcaccgttattactatgatcctgacggcaatattctgcgggaagaagcgccggacggcagcaccaccatgtatgaatgggatgaattccatcacctgctggcccgccactcccctgccgggcgggtggagaaatttgaatacaacgccgcacacggtcagttaagccgttacacggcggcagacggcgcggagtggcagtaccgctatgatgagcgcggcctgctcagcaacatcaccgaccctgccgggcagacgtggacacagcagtgtgatgaacgcggcctgccggtaagtctggtgtcgccacagggcgaagagacccggctggcatacaccgctcaggggctgctgtcgggaatattccgccaggatgaacggcgtctgggcatagagtacgaccaccacaaccggccggaaacactcaccgacgtgatgggccgtgaacaccacaccgaatacagcggtcacgacctgccagtgaagatgcgcggccccggcggtcagtcagtgcggttacagtggcagcagcaccataaactgagcggcattgaacgtgctggaaccggcgcggaaggatttcgctatgaccgccacggcaacctgctggcctggacggacggcaacggtgttgtctggacgatggaatacggtccgttcgattttccggtggcgcgaacggacggtgaaggccaccgctggcagtaccgctacgataaagacacgctgcaactgacagaagtcatcaacccgcagggtgagtcatatctttatgttctggataactgcggccgggtgacggaagagcgtgactggggcggcgtggtctggcgttaccgctatgacgccgatggcctctgtaccgccaaggttaacggcctggaggaaaccatcctctacagccgggacgccgcaggccgcctggcagaaatcatctcgccggaaggcaaaacgcagtatgcctatgacaaatccggcaggctgacgggtatcttcagcccggacggcacatcacagcgcaccggctatgacgaacgcgggcgggtgaatgtcaccactcagggccgacgggccattgaatacaactaccccgatgaacacaccgtcatccgctgtatcctgccaccggaagatgaacgcgacagacaccccggtgaatccctgctgaaaaccacgtaccgctacaacgccgccggagaactgacagaggtcattctgccgggggatgagacgctgacgttcagccgtgatgaggcgggacgtgaagtgctccggcacagtaaccggggttttgcctgtgaacagggctggaatgcagccggtcagcctgtcagtcagcgcgccggattttttccggcagaagccacatgggacgggctggttccctcactggtacgggagtaccgttacgacagcgcgggtaacgtgtcaggcgtcaccagccgggaagattacggacgggaaacacggcgggagtatcggctggaccggaacggccaggtcacggcggtgacagcctcaggcaccgggctgggctatggcgaaggcgatgagtcctatggctatgacagctgcggctacctgaaggcgcagtctgcgggcaggcaccggataagtgaagagactgaccagtatgccggaggccaccggctgaaacaggccggaaacacgcagtatgactatgacgccgcaggccggatggtcagccgcaccagacaccgtgacggctaccgaccggaaacagagcggttccggtgggacagccgggaccagctgaccgggtattgcagcgcacagggtgagctgtgggaataccgccacgacgccagcggcagacgaacagagaaacgctgcgaccggaagaaaatccgcttcacgtatctgtgggacggcgacagtattgcggaaatccgggaataccgcgatgataaactgtacagcgtaaggcacctggtgtttaacggctttgagctgataagccagcagttcagccgggtacggcaggcgcatccgtcggtggccccgcagtgggtgacgcggacgaatcatgcggtgagcgacctgacgggccgcccgctgatgctctttaacagtgaaggaaagacggtctggcgaccggggcagaccagcctgtgggggctggcactcagcctgcccgcagacaccggctacccggacccgcgcggggaactggacccggaagccgaccccggcctgctgtatgcaggacagtggcaggatgcggaatccgggctgtgctataatcggttccggtattacgagccggaaaccggaatgtacctggtgagtgatccgctggggttgcagggcggggagcagacttaccggtatgtgccgaatccttgtgggtgggttgatccgctgggattggctgcaagttctaaaatcagcagtttgatggactatattggcgatggtcgtcgtgttagtgggcatacgggtttcctggatggggttcgtttatcacgtagtcaaataaacaaggtgatgctgccaacttactga

SEQ ID NO: 485337 - DNA, 357 bp, Shigella sonnei; identical to SEQ ID NO: 473068

SEQ ID NO: 485338 - DNA, 1215 bp, Shigella sonnei
atgaaaaatccctattaccctaccgcacttgggttgtattttaattacctggtgcatggtatgggcgtcattttgatgagcctgaatatggcctcgctggagacactttggcagactaatgccgcgggtgtctcgatagttatctcatcgctgggcattggtcgattaagtgtcttgctttttgcaggattattatccgatcgctttggtcgccgcccttttatcatgctcgggatgtgctgctatatggccttcttttttggcatcctgcagaccaataacatcattatcgcttatgtttttggctttctggcgggaatggcaaacagttttctcgatgcaggcacttatcccagtttgatggaagcttttccacgctcacctgggacagccaatattttaattaaagcatttgtttccagcggacaatttttattaccgctaatcattagcctgttagtgtgggctgaactgtggttcggttggtcctttatgattgctgcaggcattatgtttattaacgctctgtttttataccgttgtacgttcccaccccatccgggtcgtcgcttacctgtcataaagaaaaccaccagctctacggaacatcgctgttcaattatcgatttagccagttataccttatatggctatatctcaatggcaacgttttatctggttagccagtggctggcacagtacggacaatttgttgcaggcatgtcatacactatgtcgatcaaactactcagtatctacaccgtgggttcgctgctttgtgtatttattaccgctccactcattcgtaataccgttcgcccaacaacattactgatgctgtacacctttatctcatttattgctctgtttaccgtctgcctgcatcccacattttatgtggtgataatatttgcttttgtcattggttttacctctgctggaggtgttgtgcaaattggcctgacgttaatggctgaacgtttcccttacgctaaaggtaaagctacagggatctattacagtgcgggcagtattgcgacctttactattccgttgattacggctcatctgtcccaaagaagtattgccgatattatgtggttcgataccgccatcgctgccatcggttttttactggcactgtttatcggcttacgcagccgcaaaaaaacgcggcatcactcgctaaaggaaaatgtcgctccgggtgggtaa

SEQ ID NO: 485339 - DNA, 1266 bp, Shigella sonnei
atgtctcaaaataaggctttcagcacgccatttatcctggctgttctttgtatttacttcagctatttcctgcacggcattagtgttattacgcttgcccaaaatatgacatctctggcagaaaagttttccactgacaacgcgggcattgcctatttaatttccggtatcggtttggggcgattgatcagtattttattcttcggtgtgatctccgataagtttggtcgtcgggcggtgatattaatggcagtaataatgtatctgctattcttctttggtattcccgcttgcccgaatttaactctcgcctacggtctggcagtgtgcgtaggtatcgctaactcagcgctggatacgggtggctaccccgcgctcatggaatgctttccgaaagcctctggttcggcggtcatactggttaaagcgatggtgtcatttgggcaaatgttctacccaatgctggtgagctatatgctgctcaataatatctggtacggctatgggctgattattccgggtattctgtttgtactgatcacgctgatgctgttgaaaagcaaattccccagccagttggtggacgccagcgtagctaatgaattaccgcaaatgaacagcaaaccgttagtctggctggaaggtgtttcatcggtactgttcggtgtagccgcattctcgaccttttatgtgattgtggtgtggatgcccaaatatgcgatggcttttgctggtatgtcagaagctgaggcattaaaaaccatctcttattacagtatgggctcgttggtctgtgtctttatttttgccgcactactgaaaaaaatggtccggcccatctgggctaatgtatttaactctgcgctggcaacaataacagctgccattatctacctgtacccttctccactggtgtgtaatgccggcgcctttgttatcggtttctcagcagctggcggcattttacagctcggtgtttcggtcatgtcagagtttttccccaaaagcaaagccaaagtcaccagtatttatatgatgatgggtggactggctaactttgttattccgctgattaccggttatctgtcgaacatcggcctgcaatatatcattgttctcgattttactttcgcgctgctggccctgattaccgcaattattgtttttagccgctattaccgcgtttttattattcctgagaatgatgtgcggtttggcgaacgcaaatttagcacccggttaaacacaattaagcatagaggttaa

SEQ ID NO: 485340 - DNA, 867 bp, Shigella sonnei
atggatgttaccgcaaaatacgaattgattgggttgatggcttatcctatccgccacagtttatcgcctgaaatgcagaataaagccttagaaaaagcgggattgccatttacctatatggccttcgaagtggataacgatagctttcccggagcaattgaaggattaaaagccctcaaaatgcgcggaactggtgtgtcgatgccgaacaaacaactggcgtgtgaatatgttgatgaattaacgccagcagccaaactggtgggtgccatcaacaccatcgttaatgatgatggctatctgcgtggctataacaccgacggcacgggccatattcgcgccattaaagagagcggttttgatatcaaaggcaaaacgatggtgctgttaggggccggaggtgcctcaacagcgattggcgcgcagggggcaattgaaggtttaaaagaaattaaactctttaaccgtcgggatgagttcttcgataaagccctcgccttcgcgcagcgggttaacgaaaacaccgattgtgtcgtcacggttaccgatctcgccgatcagcaagcctttgctgaagtcctggcttccgccgacattttaaccaatggcacaaaagtaggtatgaacccccttgagaatgaatcattggttaatgatatcagtctgttacatccgggactgctggtcactgaatgcgtgtataacccgcatatgacgaagttattgcagcaggcacaacaagcaggttgcaaaacgattgatggatacggcatgttgttgtggcaaggggctgaacagttcacgttatggactggcaaagatttccctctggaatatgttaaacaggtcatggggttcggtgcctga

SEQ ID NO: 485341 - DNA, 759 bp, Shigella sonnei
atgaaaaccgtaactgtaaaagatctcgtcattggtgcgggcgcacctaaaatcatcgtctcgctgatggcgaaagatatcgcccgcgtgaaatccgaagctctcgcctatcgtgaagcggactttgatattctggaatggcgtgtggaccactttgccgacctctccaatgtggagtctgtcatggcggcggcaaaaattctccgtgaaaccatgccagaaaaaccgctgctgtttaccttccgcagtgccaaagaaggcggcgagcaggcgatttccaccgaggcttatattgctctcaatcgtgcagccatcgacagcggcctggttgatatgatcgatctggagttatttaccggcgatgatcaggttaaagaaaccgtcgcctacgcccacgcgcatgatgtgaaagttgtcatgtccaaccatgacttccataaaacgccggaagccgaagaaatcattgcccgtctgcgcaaaatgcagtccttcgacgccgatattcctaagattgcgctgatgccgcaaagtaccagcgatgtgctgacgttgcttaccgcgaccctggagatgcaggagcagtatgccgatcgtccaatcatcacgatgtcgatggcaaaaactggcgtaatttctcgtctggctggtgaagtatttggctcggcggcaacttttggtgcggtaaaaaaagcctctgcaccagggcaaatctcggtaaatgatttacgcacggtattaactattttacaccaggcataa

SEQ ID NO: 485342 - DNA, 585 bp, Shigella sonnei
atgaaacctgtaaaaccacctcgtattaatggacgagtgccggtcctgtcggcacaggaagcggtgaattatattcccgacgaagcaacactttgtgtgttaggcgctggcggcggtattctggaagccaccacgttaattacagctcttgctgataaatataaacagactcaaacgccacgtaatttatcgattattagtccgacagggcttggcgatcgcgccgaccgtggtattagtcctctggcgcaagaaggtctggtgaaatgggcattatgtggtcactggggacaatcgccgcgtatttctgaactcgcagaacaaaataaaattattgcttataactatccacaaggtgtacttacacaaaccttacgcgccgccgcagcccaccagcctggtattattagtgatattggcatcgggacatttgtcgatccacgccagcaaggcggcaaactgaatgaagtcacgaaagaagacctgattaaactggtcgagtttgataacaaagaatatctctattacaaagcgattgcgccagatatcgccttcattcgcgcggtaatgactccaacttattga

SEQ ID NO: 485343 - DNA, 417 bp, Shigella sonnei
gtggcgaaacgcagcggtgtggcggtatcggcgctgcatttctatgaaagtaaagggttgattaccagtatccgtaacagcggcaatcagcggcgatataaacgtgatgtgttgcgatatgttgcaattatcaaaattgctcagcgtattggcattccgctggcgaccattggtgaagcgtttggcgtgttgcccgaagggcatacgttaagtgcgaaagagtggaaacagctttcgtcccaatggcgagaagagttggatcggcgcattcataccttagtggcgctgcgtgacgaactggacggatgtattggttgtggctgcctttcgcgcagtgattgcccgttgcgtaacccgggcgaccgcttaggagaagaaggtaccggcgcacgcttgctggaagatgaacaaaactaa

SEQ ID NO: 485344 - DNA, 1350 bp, Shigella sonnei
atgtctacgccatcagcgcgtaccggcggttcactcgacgcctggtttaaaatttcacaacgtggaagcactgtccgtcaggaagtggttgccgggttaacaacgtttctggcgatggtctactcggtcatcgtcgttccaggtatgttgggtaaagcaggcttcccgcctgcggcagttttcgttgcaacctgtctggttgccggactcggttctatcgtgatgggtctgtgggctaatctgccgttggcgattggttgcgccatctccctgacggcgtttaccgcattcagcctggtgctggggcaacatattagcgtacctgtcgcgctgggtgccgtgttcctgatgggtgtgctgtttacggtaatttctgccacgggtatccgtagctggattttgcgcaacttgccgcacggtgtggcgcacggcacggggatcggtatcggtctgttcctgctgctcattgccgctaatggtgtcggtctggtgattaaaaacccgcttgatggtctgcccgttgcgctgggtgatttcgcgaccttcccggtgattatgtcactggtaggtctggcggtgatcatcggcctggaaaaactgaaagtccctggtggcattctgctgaccattatcggtatctcaattgtcggtttgatcttcgatcctaacgtccatttctccggcgttttcgccatgccttcattgagcgatgaaaacggcaattcactgattggcagcctggacattatgggcgcgctgaatcctgtagtcctgccaagcgttctggcgctggtgatgacggcagtatttgatgccaccggaactatccgtgccgtcgccggccaggcgaacctgctggataaagatgggcagatcatcgacggtgggaaagcactgaccactgactccatgagcagcgttttctctggcctggtgggtgctgctccggcagcggtatacatcgagtctgcggcgggtacggcggcgggcggtaaaaccggtttgacggctatcaccgttggcgtgctgttcctgctgattctgttcctctctccgctctcttacctcgttccggggtatgcaacggctccggcgctgatgtacgttggcctgctgatgctgagcaacgtggcgaaaatcgactttgctgattttgttgatgcgatggcgggtctggttacggcggtattcatcgtgctgacctgtaacatcgtaacaggcatcatgatcggcttcgcgactctggtgattggtcgtctggtttccggcgaatggcgcaagttgaacatcggtacggtcgttatcgccgtggcgctggtgaccttctatgcgggtggctgggctatctaa

SEQ ID NO: 485345 - DNA, 1650 bp, Shigella sonnei
atggaaatcttcttcaccatactgataatgaccctcgtggtctcactgtccggggtggtcactcgtgtcatgccctttcagatcccgcttccgcttatgcaaatcgccatcggtgcgctactggcgtggccgacgtttggtttgcatgtggagtttgatcctgaactctttttagtcttgtttatcccgccgttgctgttcgctgatggctggaaaacgccgacccgtgaatttctcgaacatggtcgagagattttcggcctcgcgctggcgctggtggtggtcaccgtggtcggcattggcttccttatttactgggtggtgccgggcattccgctgatccccgcctttgcgctggcggcggtactttctccgaccgatgctgtggcgctctccgggattgttggcgaagggcgcatcccgaaaaaaatcatgggcattttgcagggcgaagcgttgatgaatgacgcctccggcctggtgtcgttgaagtttgccgtggcagtggcgatggggacgatgatcttcaccgtcggcggtgcgacggtcgaatttatgaaagtagccattggtggtattcttgccggttttgtggtgagctggctgtatggtcgctcgctgcgattcctcagccgctggggcggtgatgaacccgcgacgcagatcgttctgctgttcttgctgccattcgcttcttatctgattgccgaacatattggcgtttccggcatcctcgctgcggttgccgccgggatgaccatcacccgctccggtgtgatgcgccgtgcgccgctggcaatgcgcctgcgcgcaaacagcacctgggcgatgctggaatttgtctttaacggcatggtgttcctgctgttaggtctgcagctgccgggtattctggagacgtcgctgatggcggcagaaatcgaccctaacgtcgaaatctggatgctgtttaccgatattattctgatatatgcggcgctgatgctggtccgtttcggctggctgtggacgatgaaaaagttcagcaaccgcttcctgaagaagaagccgatggagtttggttcgtggaccacacgagaaatcctgatcgcgtctttcgccggggtgcgtggggcgatcactctggccggtgtgctctctatcccgctgctcttgccggatggtaacgtcttcccggcgcgctatgagctggtgttcctggcggctggcgtcattctcttctcgctgtttgtcggcgtggtgatgttgcctattctgctacaacacattgaagtcgcggaccattcgcaacaattgaaagaagaacgtattgcgcgagcggcaacggcagaagtggcgattgtggcgatccagaaaatggaggagcgtctggcggcggataccgaagagaatatcgataaccagctgcttacggaggtcagttctcgcgtcattggtaacctgcgtcgtcgcgccgatggacgtaacgacgttgaaagttccgtgcaggaagagaaccttgagcgtcgcttccgtctggcggcattgcgttctgaacgtgctgaactgtaccacctgcgcgccacgcgggagatcagcaacgaaacgctgcaaaaattactgcacgatctcgatttgcttgaagcgttgctaattgaggaaaatcagtaa

SEQ ID NO: 485346 - DNA, 654 bp, Shigella sonnei
atggccgacggaactctaaatgcatgctccgttatgcatgttcaattctacaatgcagcaatgaatagagccaatattaaaaatacctttcttgactattcaaatttttatatggcgtacatggctgaggcaaatctttataaagtaatagcgccatatgttaatttatttaaagccgaccttagtttctctaaactcgatttaattaactttgaacatgctgatctgtctcgcgtcaatctgaacaaagcaatcctccagaatataaacttaattgatagcaaactcttttgtacgtggctaacaaatacattcctcgaaatggttatatgtaccgactctaatatggctaatgttaattttaataatgccaatttaagcaactgccatttcaactgttctattttaacaaaagcctgtatgtttaatacccgtctctatcgggttaattttgatgaggctagcgtccagggaatgggcatttccatactccgtggggaggaaaatatccccattgatagtgataccctggtaacactacagaaattctttgaagaagattgtacctctcatactggcatgtcacaaactgaggataatattaatgcagtcgctatgaagattactgcagatattatgcaacacgcagattga

SEQ ID NO: 485347 - DNA, 636 bp, Shigella sonnei
atgcgctataatggtttaaataatatgtttttctctctttgccagattaacgataaccactctttcacaagttcatcacatacaaagaaaacaaaatcatataattacagcaaacatcataaaaacacgttaattgacaataaagccctctctcttttcaagatggatgatcatgaaaaagtgataggtttgattcagaaaatgaaaagaatttatgatagtttaccatcaggaaaaatcacgaaggaaacggacaggaaaatacataaacattttatagatatagctttatatgcaaataataaatgtgacgatagaattacgagaagagtttaccttagtaaagaaaaggaagtatccattaaggtggtatattttataaataatgtcgccgtccataataatactatcgaaattccacagacagtaaatggtggttacgatttttcacaccttagcctgaaaggtatcgtgattaaagatgaagatttatccaattcgaattttgcaggttgcagactacaaaacgctattttccaggactgtaatatgtataaaacgaatttttattacgccataatggaaaaatactttttgataattgtattctcgatgactcaaatttcgctcagataa

SEQ ID NO: 485348 - DNA, 672 bp, Shigella sonnei
atgtgtggacgctttgcccaatcccaaacgcgtgaagattaccttgcgcttctcgcggaagatattgaacgcgatattccctacgatcccgaacccattggcagatacaacgtcgcgccgggaaccaaagttcttctgctcagtgaacgtgatgaacaccttcatctggatccggttttctggggatatgctcccggatggtgggataaaccgccgctgattaacgcccgcgtagaaactgccgcaaccagtcgcatgtttaaaccgctctggcaacatggtcgggcaatctgttttgccgatggctggtttgagtggaaaaaagaaggcgacaaaaaacagcctttttttatctatcgtgctgatggacaacctatttttatggccgcgataggtagcacaccatttgagcgtggtgacgaagccgaaggatttttaattgtcactgctgcagcagaccagggtctggtagacattcatgaccgccgcccgctggttctgtcgccagaagctgcacaggaatggatgcggcaagagattggcggtaaagaagcatcagaaattgctaccaacggctgtgtgccagcaaaccagttcacctggcacccggtatcgcgcgcggtaggtaatgtcaaaaaccagggcgcggagttaattcaacctgtttgttga

SEQ ID NO: 485349 - DNA, 234 bp, Shigella sonnei
atgaaaaatatcgttcctgattaccgccttgatatggtgggtgaaccctgcccttatccggcagtcgcaacccttgaggcgatgccgcagttaaaaaaaggggaaatcctggaagtggtgagcgactgtccacagtcgatcaataatattccactggatgcgcgtaatcacggctatacggtgctggatattcagcaagacgggccgaccattcgttatttaattcagaagtaa

SEQ ID NO: 485350 - DNA, 1206 bp, Shigella sonnei
atgtcatggcagcaattcaaacacgcctggttgattaaattctgggcacccatccctgcggtcatcgcggcgggtattctctccacttactattttggcattactggcaccttttgggctgtcacgggtgaatttacccgttggggcggtcagctcctgcagctgtttggcgtccatgctgaagagtggggttattttaaaattatccatctggaaggatcgccattaacccgcatcgacgggatgatgatcctcggcatgtttggcggctgctttgccgcagcgctgtgggccaacaatgtcaaactgcgcatgccgcgcagccgtatccgcattatgcaggccattattggcggcattatcgccggttttggcgcgcgtctggcaatgggctgtaacctggcggcgttctttaccggcattcctcagttctcgctgcatgcctggttctttgccatcgccactgccattggttcatggtttggcgcgcgctttaccctgctgcccatcttccgtattcccgtgaaaatgcagaaagtttctgccgcctcaccgctgacgcaaaaaccggatcaggcgcggcgtcgttttcgtctcgggatgctggtctttttcggcatgctgggctgggcgctgctcacggcgatgaaccaacccaaactggggctggcaatgctgtttggcgtcggctttggtttactgattgaacgtgcgcaaatctgctttacttcggcgttccgcgatatgtggatcaccggacgtacccatatggcgaaagcaatcattatcggtatggcggtgagtgccatcgggatcttcagttacgtacagttaggcgttgaacccaaaatcatgtgggcgggaccaaacgcggtaattggtggtttactgtttggttttggcatcgtgctggcaggcggctgcgaaaccggctggatgtaccgcgcggtagaaggccaggtgcactactggtgggtcggtctgggcaatgtgatcggctcgacgattctggcgtattactgggatgatttcgctccggcgctggccaccgactgggacaaaatcaacctgctgaaaacctttggcccgatgggtggcctgctggtgacatatttgctgttgtttactgcgctgatgttgattatcggctgggaaaaacgcttcttccgccgtgcggcaccgcagactgctaaggagatcgcatga

SEQ ID NO: 485351 - DNA, 414 bp, Shigella sonnei
atgaaaaaactcgcaattgcaggtgcgctcatgttgctggcgggctgtgccgaagtcgaaaactataacaatgtcgtgaaaacccccgcgccggactggctggcgggctactggcagaccaaagggccgcaacgtgcgctggtcagtccggaagagataggcagcctgattgtcactaaagagggcgataccctggattgccgtcagtggcagcgggtgattgccgtgccgggcaagttgacattgatgtctgatgatctcactaacgttaccgtaaaacgtgagctgtacgaggttgagcgtgacggtaacaccattgagtacgatggtatgacgatggagcgtgtggatcgcccgacggcagagtgtgccgccgcgctggataaagcgccgttaccgacgccactgccgtaa

SEQ ID NO: 485352 - DNA, 1488 bp, Shigella sonnei
atgcgtaatcccacgctgttacaatgttttcactggtattacccggaaggcggtaagctctggcctgaactggccgagcgcgccgacggttttaatgatattggtatcaatatggtctggttgccgcccgcctataaaggcgcatcgggcgggtattcggtcggctacgactcctatgatttatttgatttaggtgagtttgatcagaaaggcagcatccctactaaatatggcgataaagcacaactgctggccgccattgacgctctgaaacgtaatgacattgcggtgctactggacgtggtagtcaaccacaaaatgggggcggatgaaaaagaagctattcgcgtgcagcgtgtaaatgctgatgaccgtacgcaaattgatgaagaaatcattgagtgcgaaggctggacgcgttacaccttccccgcccgtgccgggcaatactcgcagtttatctgggacttcaaatgttttagcggtatcgaccatatcgaaaatcctgatgaagatggcatatttaaaattgttaacgactacaccggcgaaggctggaacgatcaggttgatgatgaactcggtaatttcgattatctgatgggtgagaatatcgatttccgcaatcatgccgtgacggaagagattaaatactgggcgcgctgggtgatggaacaaacacaatgcgacggttttcgtcttgatgcggttaaacatattccggcgtggttttataaagagtggatcgaacacgtacaggaagttgcgccaaagccgctgtttattgtggcagagtactggtcgcatgaagtcgataaactgcaaacgtatattgatcaggtggaaggcaaaaccatgctgttcgatgcgccgctgcagatgaaattccatgaagcatcgcgcatgggacgcgactacgacatgacgcagattttcacgggtacattagtggaagccgatcctttccacgccgtaaccctcgtagccaatcacgacacccaaccgttgcaagccctcgaagcgccggtcgaaccgtggtttaaaccgctggcgtatgctctaattttgttgcgggaaaatggcgttccttcggtgttctatccggacctctacggtgcgcattacgaagatgtcggtggtgacgggcaaacctatccgatagatatgccaataatcgaacagcttgatgagttaattctcgcccgtcagcgtttcgcccacggtgtacagacgttatttttcgaccatccgaactgcattgcctttagccgcagtggcactgacgaatatcccggctgcgtggtggtcatgtcgaacggggatgatggcgaaaaaaccattcatctgggagagaattacggcaataaaacctggcgtgattttctggggaatcggcaagagagcgtagtgaccgacgaaaacggcgaagcgaccttcttttgcaacggcggcagcgtcagcgtgtgggttatcgaagaggtgatttaa

SEQ ID NO: 485353 - DNA, 366 bp, Shigella sonnei
atgaaccatgcaccgcatttgtatttcgcctggcaacaactcgtcgataaaagccagctcatgttacgcctggcaacggaagaacaatgggacgaactcatcgccagcgaaatggcgtatgtgaatgcggtgcaggagattgcacatctgactgaagaggttgccccgtccaccacgatgcaggagcagctccgcccgatgctgcgcctgattctcgacaacgaaagcaaggtaaagcagttattacagattcgtatggatgaactggcgaaactggtcggtcagtcatcggtgcaaaaatcagtgttaagtgcctatggagatcagggcggctttgtgctggctccgcaggataacctcttttga

SEQ ID NO: 485354 - DNA, 411 bp, Shigella sonnei
atgtataccgcgagcggctcaaaagcctatgcacaaattggcgtcgaaagcgccgtaatgagcgccagccagcaacagctggtcaccatgctatttgatggagtgctgagcgcactggttagagcgcgcctgtttatgcaggacaacaatcagcaaggcaaaggcgtctctttgtcaaaagcgatcaacatcattgagaacgggctgcgggtgagtcttgatgaagagagcaaagacgaactaacccaaaacttgattgctctttatagctatatggtcaggcgcttgctgcaagccaatttacgcaacgatgtctccgcagtcgaagaagtggaagcattaatgcgcaatattgccgatgcctggaaagagtctttactctccccttctttgattcaggacccagtctga

SEQ ID NO: 485355 - DNA, 279 bp, Shigella sonnei
ttgctggtaggcgatggtaaagaaacaggaattaccaccaaaattgccaccgaggtaaaaggttaccttgccgatgatggcattattgatagcgcacaggacagtattaacgccacactgaaaaaactgaccaaacagtatctatccgtcagtgccagcattgatgacaccgtggcgcgttacactgcacagtttacgcaattagataccatgatgagcaaactgaataacaccagtacctatctcagccaacaatttactgcaatgagtaattcctga

SEQ ID NO: 485356 - DNA, 519 bp, Shigella sonnei; identical to SEQ ID NO: 460941

SEQ ID NO: 485357 - DNA, 363 bp, Shigella sonnei
atgaaaaagtttatcgcccccttattggctttactggttagcggatgtcagattgatccttatactcacgcgccaaccttgaccagcaccgactggtatgatgtcggtatggaagatgcgatatcgggcagcgccataaaagatgacgatgcatttagcgattcacaggcggatcgcggtctataccttaaaggatatgccgaaggacaaaagaaaacttgccagaccgattttacttatgcccggggactttccggtaaaagctttcctgccagctgtaacaatgttgaaagtgccagccaactgcatgaagtatggcaaaaaggggctgatgaaaatgccagcacaatacgattaaattaa

SEQ ID NO: 485358 - DNA, 1071 bp, Shigella sonnei; identical to SEQ ID NO: 460939

SEQ ID NO: 485359 - DNA, 1122 bp, Shigella sonnei
atggttgctgaattgaccgcattacgcgatcaaattgatgaagtcgataaagcgctgctgaatttattagcgaagcgtctggaactggttgctgaagtgggcgaggtgaaaagccgctttggactgcctatttatgttccggagcgcgaggcatctatgttggcctcgcgtcgtgcagaggcggaagctctgggtgtaccgccagatctgattgaggatgttttgcgtcgggtgatgcgtgaatcttactccagtgaaaacgacaaaggatttaaaacactttgtccgtcactgcgtccggtggttatcgtcggcggtggcggtcagatgggacgcctgttcgagaagatgctgacactctcgggttatcaggtgcggattctggagcaacatgactgggatcgagcggctgatattgttgccgatgccggaatggtgattgttagtgtgccaatccacgttactgagcaagttatcggcaaattaccgcctttaccgaaagattgtattctggttgatctggcatcagtgaaaaatggaccattacaggccatgctggcggcgcacgatggcccggtactggggttacacccgatgttcggcccggacagcggtagcctggcaaagcaagttgtggtctggtgtgatggacgtaagccggaagcataccaatggtttctggagcaaattcaggtctggggcgctcggctgcatcgtattagcgctgtcgagcacgatcagaatatggcgtttattcaggctctgcgccactttgctacttttgcttatgggctgcatctggcagaagaaaatgttcagcttgagcaacttctggcgctctcttcgccgatttaccgccttgagctggcgatggtcgggcgactgtttgctcaggatccgcagctttatgccgacattattatgtcgtcagagcgtaatctggcgttaatcaaacgttactataagcgtttcggcgaggcgattgagttgctggagcagggcgataagcaggcgtttattgacagtttccgcaaggtggagcactggttcggcgattacgcacagcgttttcagagtgaaagccgcgtgttattgcgtcaggcgaatgacaaccgccagtaa

SEQ ID NO: 485360 - DNA, 1161 bp, Shigella sonnei
atgacatcggaaaatccattactggcgctgcgagagaaaatcagcgcgctggatgaaaaattattagcattactggcagagcggcgcgaactggccgtcgaggtgggaaaagccaaactgctctcgcatcgcccggtacgagatattgatcgtgaacgcgatttactggaaagattaattacgctcggtaaagcgcaccatctggacgcccattacattactcgcctgttccagctcatcattgaagattccgtattaactcagcaggctttgctccagcaacatctcaataaaattaatccgcactcagcacgcatcgcttttctcggccccaaaggttcttattcccatcttgcggcgcgccagtatgctgcccgtcactttgagcaattcattgaaagtggctgcgccaaatttgccgatatttttaatcaggtggaaaccggccaggccgactatgccgtcgtaccgattgaaaataccagctccggtgccataaacgacgtttacgatctgctgcaacataccagcttgtcgattgttggcgagatgacgttaactatcgaccattgtttgttggtctccggcacgactgatttatccaccattaatacggtctacagccatccgcagccattccagcaatgcagcaaattccttaatcgttatcctcactggaagattgaatataccgaaagtacgtctgcggcaatggaaaaggttgcacaggcaaaatcaccgcatgttgctgcgttgggaagcgaagctggcggcactttgtacggtttgcaggtactggagcgtattgaagcgaatcagcaacaaaacttcacccgatttgtggtgttggcacgtaaagccattaacatgtctgaccaggttccggcgaaaacgacgttgttaatggcgaccgggcaacaagccggtgcgctggttgaagcgttgctggtgctgcgcaaccacaatctgattatgacccgtctggaatcacgcccgattcacggtaatccatgggaagagatgttttatctggatattcaggccaatcttgaatcagcggaaatgcaaaaagcattgaaagagttaggggaaattacccgttcaatgaaggtattgggctgttacccaagtgagaacgtagtgcctgttgatccaacctga

SEQ ID NO: 485361 - DNA, 342 bp, Shigella sonnei; identical to SEQ ID NO: 460936

SEQ ID NO: 485362 - DNA, 2469 bp, Shigella sonnei
ttgagattttctacaatcgtcagcgtcgtcactctcgtctggggaatatctccccggcagccttcagggaaaaatatcatcagatggctgcttaaaaaaagaacaaatggtagtgtccgctattgccagtacacctcaaaggacggtaaaatcctcaccgcggaacgttggggagcgatgaacgtagaagtgaaggacggcaagattgtttcttcaacaggcgcgctggcgaaaaccataccgaattccttacagtctacggcggcggatcaggtacacaccacgacgcgtattcagcatccgatggtgagaaaaagctatctcgataatccactgcaaccgacgaaaggtcgtggcgaagatacctatgtacaggtgagctgggaacaagcattaaaactgattcatgagcaacacgatcgcattcgcaaagctaacggaccatcggctatttttgccggatcatacggctggcgctcttctggcgtgttgcataaagcgcaaaccttactgcaacgttatatgaacctggcgggcggttattccgggcatagcggcgattattcaaccggggcggcacaggtgatcatgccgcatgtggtcggttctgtagaggtgtatgaacagcagacctcctggccgctgattctggaaaacagccaggttgtggtgctgtgggggatgaacccgctgaataccttaaaaattgcctggagcagtaccgatgagcaagggctggaatacttccatcagctgaaaaaatctggcaaaccagtgattgccattgatcctatccgctccgaaaccatcgacttctttggcgataatgccacctggatcgcgccgaatatgggcaccgacgtggcactgatgttagggattgcgcataccctgatgacacaaggcaaacacgataaagtgttccttgaaaaatacactaccgggtatccgcagtttgaagagtatctgagaggtaagagcgataatacgccgaagagcgcggcctgggcggcggaaattactggcgtaccggaagcgcagatagtcaaactcgctgaactgatggcggcgaatcgcacaatgctgatggcaggctggggaattcagcgccagcaatatggtgaacagaaacactggatgctggtgacgctggcggcgatgttagggcagattggtacaccgggcggcggttttggtttctcttatcattactccaatggtggcaacccgacacgtgttggcggcgtgctgccggaaatgtctgcggcgattgccggacaggccagcgaggccgctgatgatggcggaatgagggcgattcctgttgcccgtatcgtcgatgcgctggaaaatcctggcggcaaatatcagcataacggtaaagagcaaacgtatccgaatatcaaaatgatctggtgggcgggtggcggtaactttacccatcaccaggatactaatcgtctgattaaagcatggcagaaaccggagatgatcgtcgtttctgaatgctactggaccgcagctgctaaacacgcagatatcgtattaccgatcaccacatcgtttgagcgcaatgacttgacgatgaccggtgattacagcaaccagcatattgtgccgatgaagcaggctgttgctccgcaatttgaagcgcgaaacgattttgatgtgtttgccgatcttgcggaattactcaaacctggcggaaaagagatctataccgaaggtaaagatgaaatggcgtggctgaaatttttctatgatgccgctcagaaaggggcccgtgcgcaacgcgtcactatgccaatgtttaatgccttctggcagcaaaataaactgatcgaaatgcgccgcagcgagaagaacgaacagtacgttcgttatggtgatttccgcgccgatccggtgaaaaatgcgctgggtacgccaagtggcaaaattgagatttactccaaaacgctggaaaaatttggctataaggattgcccggcacacccaacctggcttgcgcctgatgagtggaagggtaccgccgacgagaagcagttgcagcttctgaccgcacatccggcacaccgtttacacagtcagcttaactatgcggaactgcgtaaaaaatatgcggttgccgatcgtgaaccgatcactattcacaccgaagatgctgctcgatttagtattgcgaatggcgatctggtgcgtgtctggaacaaacgtggtcagattttgacaggcgcggtggtgactgacgggatcaaaaaaggcgtggtatgcgtgcatgaaggtgcatggccagatctggaaaacggcttgtgtaaaaacggcagtgcgaacgtgttaacggcggatatccccagctcgcagctggcaaatgcctgtgccggtaactctgcgctggtgtatatcgaaaaatatacgggtaacgcaccgaagttaacggcatttgataagcctgctgttcaggcgtaa

SEQ ID NO: 485363 - DNA, 972 bp, Shigella sonnei
atgatcgactttggtaacttttattctctgattgccaaaaatcatctttcacactggctcgaaacgctgcccgcgcagattgctaactggcagcgcgagcagcagcacgggctgtttaagcagtggtccaacgcggtggaatttctgcctgaaattaaaccgtatcgtctggatttattgcatagcgtaaccgccgaaagcgaagagccactgagcaccgggcaaattaaacgcattgaaacgcttatgcggaacctgatgccatggcgcaaagggccgttctcactgtatggcgtcaacatcgataccgaatggcgttccgactggaaatgggatcgtgttctgccccatctttctgatttaaccggacgcaccattctggatgtcggctgcggcagcggttatcacatgtggcgcatgattggcgcaggcgcgcacctcgcggtggggatcgaccctacgcaactgtttctgtgccagtttgaagcggtgcgtaaactactgggtaacgatcagcgcgcacatttgttaccgttaggtattgaacagcttccggcactgaaagcctttgataccgtcttttcgatgggcgtgctttaccatcgccgttcgccgctggagcatctctggcagttgaaagatcaactggtgaatgagggtgaactggtgctggaaacgctggttattgatggcgatgagaacacggtgctggtaccaggcgatcgttacgcgcaaatgcgtaatgtctatttcatcccttccgcgctggcgctgaaaaactggctgaagaagtgtggttttgtagatatccgcattgtggatgtgtgcgttaccactactgaagagcagcgacgcactgaatggatggttaccgaatctctgtccgatttcctcgacccacatgatccgagtaagacagttgaaggttatcctgcgcctaaacgcgcggtgctgattgcgcgcaagccgtaa

SEQ ID NO: 485364 - DNA, 744 bp, Shigella sonnei
atgtctcaccgcgacacgctattttctgcccctatcgccagactgggcgactggacctttgatgaacgggtagctgaagtcttcccggatatgatccagcgttccgttcccggctattccaatattatttccatgattggtatgttagccgagcgcttcgttcaacctggtacgcaggtttacgatctgggttgttctctgggcgcggcgacgctctcggtgcgtcgcaacattcatcatgataattgcaaaattattgccatcgacaactccccggcgatgattgaacgctgcagtcgtcatattgacgcctataaagcccctacgccagtagacgtcattgaaggtgatattcgcgatatcgccattgaaaacgcatcgatggtggtgctgaattttaccctgcaattcctggaaccttccgagcgccaggcattactggataaaatttatcaaggactgaacccgggcggcgcgctggtgctttcggaaaaattcagtttcgaagatgccaaagttggtgaactgttgttcaacatgcaccacgactttaaacgtgccaacggttacagcgaactggagatcagccagaagcgcagcatgctggaaaacgtgatgctgaccgattccgtggaaacccataaagcacgcctgcataaagccggttttgagcatagcgagctgtggttccagtgctttaactttggttcactggtggcattaaaagcagaggacgctgcatga

SEQ ID NO: 485365 - DNA, 396 bp, Shigella sonnei; identical to SEQ ID NO: 473684

SEQ ID NO: 485366 - DNA, 348 bp, Shigella sonnei
atgattttagacagccgccctgttcatgcagcacgtccacacagtgaagctattcgcgacgctcaacgaaaaaaacctaaagttccggtacatgctgtactgacggcgacaaatccgctgattcgttttatcggtagtgatgatatgacgcaaaaccgggaattatttcaggtctggttacagaaattagcgcagtggcatcagaccactacgccttatctttttttacatacgccagacattgcccaggccccggaactggtacataccctgtgggaagacttacgtaaaacgcttccagagatcggagcagttccggctattccacagcaatcttctcttttctga

SEQ ID NO: 485367 - DNA, 1158 bp, Shigella sonnei
gtggtggcgagcgatcttcacggcgaacagccgcaggcggtaccgggacgcaggggttcaggcaccacgctggagaaccattttgcggtaatcccggcagacagaacatggcggccacagccgttgatgaaaccgctggtggatggcccgcagagcgccgtcgtgacgggaccggcaggcgaggaaatcttctgtgatgaacatggccgcgtgcgggtgaaatttaactgggaccgctataacccgtcaaaccaggacagttcatgctggatccgtgtggcacaggcgtgggcaggcaccggctttggcaacctggcgataccgcgtgtgggtcaggaggtgattgtggacttcctcaacggcgacccggaccagccgattattatggggcgtacctaccaccaggaaaaccgcacacccggcagcctgccggggacgaagacgcagatgaccattcgttcgaaaacctataagggcagcgggtttaatgaactgaagtttgacgatgcgacagggaaagaacaggtctacatccacgcgcagaagaacatgaacaccgaggtgctgaataaccgcaccacggatgtgataaacaaccatgctgaaaccattggcaacaatcagatgattgcggttaccaacaatcagatagagacggtgggcgttaaccagatagagacggtgggcagtaaccagataattaaagtgggttctgttcaggtggaaacgattggacttgttcgtgcgctgacggtgggcgtggcgtatcagacgacggtaggtggcattatgaacacctcggtggcactgatgcagtcctcgcagatcggtttgcataaatcgttgagggtcgggctgggttatgacgtcaaagtcggaaataacgttaccttcaccgttggtaaaacgaaaaaggatgataccgggcagaccgcgatttactccgccggtgagcatctggagctctgctgtggtaaggcaaggctggtgctgacgaaggacggacaaatttttctcaacggcacaaaaattcatttgcagggtaaggagcaggttaatggtgactcactgttgattaactggaactgtgcagcctcgaaatccccaccgaagacccctgatgaaaagcaggatacgccggatatgagagagtactga

SEQ ID NO: 485368 - DNA, 504 bp, Shigella sonnei
atgagcggaaaaccagcggcgcgtcagggagatatgactcagtatggcggtcccattgtccagggttcggcaggtgtaagaattggcgcgcccaccggcgtggcgtgctcggtgtgtccgggcgggatgacttcgggcaacccggtaaatccgctgctgggggcgaaggtgctgcccggcgagacggaccttgcgctgcccggcccgctgccgttcattctctcccgcacctacagcagctaccggacgaagacgcctgcaccggtgggcgttttcggccccggctggaaagcgccttctgatatccgcttacagctacgtgatgacggactgatactcaacgacaacggcgggcggagcattcactttgagccgctgctgccgggggaggcggtgtacagccgcagtgagtcaatgtggctggtgcgcggtggtaaggcagcacagccggacggccatacgctggcgcggctgtggggggcgctgcgccggatatccggttaa

SEQ ID NO: 485369 - DNA, 3417 bp, Shigella sonnei
gtgctgaggacgtactgccagcgccgctgccgccgtaccgggtgcttaccgggatggcggacgctgacgtaccggcgtgaggccgccggtgacctggccggggaaatcaccgacgtgacggacggtgccgggcgggagttccgtctggtgctgaccacgcaggcgcagcgtgcggaagaggcccgcacctcttcgctatcttcttctgacagttcccgccctctctcagcctcagcgttccccgacacactgcccggtaccgaatacggccccgacaggggtatccgcctttcggcggtgtggttgatgcacgacccggcatacccggagagcctgcccgctgcgccactggtgcggtacacgtatacggaagccggtgaactgctggcggtatatgaccgcagcaatacgcaggtgcgcgctttcacgtatgacgcgcagcacccgggccggatggtggcgcaccgttacgcgggaaggccggagatgcgctaccgctacgacgatacggggcgggtggtggagcaactgaacccggcagggttaagctaccgctatctttatgagcaggaccgcatcaccgtcaccgacagcctgaaccggcgtgaggtgctgcatacagaaggcggggccgggctgaaacgggtggtgaaaaaagaactggcggacggcagcgtcacgcgcagcgggtatgacgcggcaggaaggctcacggcgcagacggacgcggcgggacggcggacagagtacggtctgaatgtggtgtccggcgatatcacggacatcaccacaccggacgggcgggagacgaaattttactataacgacgggaaccagctgacggcggtggtgtacccggacgggctggagagccgccgggaatatgatgaaccgggcaggctggtatcggagacatcgcgcagcggggagacagtacgctaccgctacgatgacgcgcacagtgagttaccggcgacgacaacggatgcgacgggcagcacccggcagatgacgtggagccgctacgggcagttgctggcgttcactgactgctcgggctaccagacccgctatgaatacgaccgcttcggccagatgacggcggttcaccgcgaggaaggtatcagcctttaccgccactatgacaaccgtggccggttaacctcggtgaaagacgcacagggccgtgaaacgcagtatgagtacaacgccgcaggcgacctgactgccgttatcaccccggacggcaaccggagcgagacacagtacgatgcgtggggaaaggcggtcagcaccacgcagggcgggctgacgcgcagtatggagtacgatgctgccggacgtgtcatcagtctgactaacgagaacggcagtcacagcgacttcagctacgatgcgctggaccggctggtacagcagggcggctttgacgggcggacgcaacgttatcattatgacctgaccggaaaactcacgcagagtgaggatgaggggcttgtcaccctctggcactacgatgcgtcggaccgcatcacgcaccggacggtgaacggcgacccggcagagcagtggcagtatgacggccacggctggctgagagaaatcagccacctgagcgaaggccaccgtgtcgctgtccactacggctacgacgataagggccgcctgacgggcgaacggcagacggtggagaacccggagacgggggaactgctgtggcagcatgagacgaaacacgcctacaacgaacaggggctggcaaaccgcgtcacgccggacagcctgccgccggtggagtggctgacctacggcagcggttacctggcgggcatgaagctgggcgggacgccgctggtcgagtatacgcgggacaggctgcaccgtgagacggtgcgcaccctcgcaccggacctggacatccgcatcccgtatgccaccgacccggcgggaaaccgcctgccggacccggagctacacccggacagcacgctcacggcgtggccggataaccgcatcgcagaggatgcgcactatgtttaccactatgatgaatacggcagactgacggagaagacggaccgcatcccgacgggtgtgatacggacggacgacgagcggacccaccactacgacagccagcaccgcctggtgttccacacgcggatacagcatggcgagccactggtcgagagccgctacctctacgacccgctgggacggcgaatggcgaaacgggtatggcggcgggagcgtgacctgacggggtggatgtcgctgtcgcgtaaaccggaggagacatggtacggctgggacggcgacaggctgacgacggtacagaccgacaccacacgtatccagacggtatacgagccgggaagcttcacgccgctcatccgggtcgagacagagaacggcgagcgggagaaagcgcagcgccgcagcctggcggagaagctgcagcaggaagggagcgaggacgggcacggcgtggtatttccggctgaactggtgcggctgctggacagactggaggaagaaatccgggcagaccgcgtgagcagtgaaagccgggtgtggcttgcgcagtgcgggctgacggtggagcaactggccagacaggtggagccggaatacacaccagtgcgaaacgttcatctttaccactgcgaccatcggggccagccgctggcgctcatcagcgaagacggcgatacggtgtggagcggggcgtatgatgagtggggcaaccagctaaatgaggagaacccgcatcatgtgtatcagccataccgtctgccggggcagcagtatgatgaggagtcggggctgtactacaatcgtcaccggtactatgatccgttgcagagacggtacatcacccaggaccccattgggctgaaaggtgggtggaatctgtatcagtatccgctgaatccggtgagcaggatagatccgttggggttattctcatgtgagagttgtagtcattttatagatgatataaataataaactggataaccttccgtttaacccgacaaaaatgtttacagctagtttaaatactgctaattcagcaaggctgtatgcaagtggcatgacaaaattcggtataagtgttgctgccgatggaacgatcattgctgccccagtcggtgcagcttctatggctttaggggcgtggaatataaaatctgcgacagctgcatataacagagcaaatttacaattatcagaatcacttcaggaaaatggtagagataggtgttggagaaatttattgggtattttaccttatggtgagcagtttgatgaccctggtgaaccatcaatattagacgtttatggtgaaaagattgagaatatcaaagattctccaatgaagttttttgaagagcttgggacgctggggttgtaa

SEQ ID NO: 485370 - DNA, 162 bp, Shigella sonnei
atgtgtatttttaatgatatttttatgtttgtgtttattgttagtagtatacttgtaaccgtgcattttgtgtattctttattttttaaaagtggaaaggtaaaagataaggtaaaaaaatggattaaagtaatgtgtgatttattttgggggataggatag

SEQ ID NO: 485371 - DNA, 570 bp, Shigella sonnei
atgcgtacattcctttatgctcgtgtatcagttgatgacctcaccacacagaaccaagtagaagctgttaaacgtgctggttatgaagtcagaccttcacgagtaattgaggaagttattagtggggctacaccagctatggacagaccacaatttgtaaagctggtggataagctggaagaaggtgattgtcttgtagtgaccaagattgaccgcttaggaagggataacattgacgtacagaagaccgtcacaatgttacttggtatgggtgttaagctggtctgtctagatttgcctgtccaagacctttcaagtgctgaaggtaaacttattcttcaactattcagtacctttgcagagtttgaacttaaccgcatcagagagcgaaccagagagggcttagaacgagctaaagcacaaggtaaggtgttgggtcgtcctgtagctaaaaacactacagaggccgttttagagcataaggctaagggattgtcacaaagtcaggttgcaaagcttctgaatctctctgtgagaacggttagccgtcactggacaaagacactgtaa

SEQ ID NO: 485372 - DNA, 1329 bp, Shigella sonnei
atggcaatgttcggttttcctcactggcagttaaaatcgacctctacagagagcggcgtggtcgcgccggatgaacgattgccgtttgctcagacggcagtaatgggcgttcaacacgcggtggcgatgtttggcgcgacggtgttaatgccgattctgatggggctggatcccaatctttccattttaatgtcggggatcggcacgttactgtttttctttattaccggcgggcgcgtccccagttatctcggctccagcgcggcttttgtcggcgtggtgattgccgcgacgggctttaacggtcagggcattaacccgaatatcagcatcgcactgggcgggattatcgcctgtgggctggtttataccgtcattggcctggtggtgatgaaaattggtacacgctggattgaacgactaatgccgccggtggtgacgggtgcggtggtgatggcgattggcctgaacttagcgcctatcgcagtgaaaagtgtatcggcttcagcctttgatagctggatggcggtaatgacggtgctgtgtattgggctggtggcggtgtttacccgtggcatgatccagcggttattgattctcgtaggtttaattgtcgcctgtctgctgtatggcgtgatgaccaacgttttagggctgggaaaagccgtcgattttactctcgtcagccatgctgcctggttcggtttgccacatttttccactcctgcttttaatagtcaggcaatgatgctgattgcgcccgtggcggtgattctggtggcggaaaacttaggtcatctcaaggcggtcgccgggatgaccggacgcaatatggacccgtatatggggcgagcattcgtcggtgatggtctggcaacgatgctttccggctctgtcggcggtagcggcgtcaccacctatgctgaaaatatcggtgtgatggccgtgacaaaagtctactcgacgctggtgtttgttgctgctgccgtcatcgccatgctgttgggcttttcgccgaaatttggcgcgctgatccataccattccggccgcggtgattggtggtgcatcaattgttgtgttcgggctgattgccgtcgcaggcgcaaggatctgggtacaaaaccgtgtcgatttaagccagaacggtaatttgattatggtcgcagtaaccttagtgctgggcgcgggtgattttgctctcacgctgggcggttttacgttgggagggatcggtacagccacctttggcgcgattttactcaatgcgttgttaagtagaaggttggttgacgttccaccgccagaagttgttcatcaggagccataa

SEQ ID NO: 485373 - DNA, 495 bp, Shigella sonnei
atgaacatagttgatcaacaaacctttcgcgatgcgatgtcctgtatgggcgcggcggtcaatatcatcaccacggacggtccatccgggcgcgccgggttcaccgccagcgccgtctgcagcgtgaccgacacgccgcccacattactggtgtgcctgaatcgtggggcgtccgtctggccggtattcaatgaaaatcgaacgctgtgtgtaaatacactgagcgccgggcaggagccgctttcaaatctttttggcggcaaaacgcccatggaacaccgctttgccgccgcccgctggcagacgggtgtgaccggatgcccgcaactggaagaggctctggtttcgtttgactgccgcatcagccaggtggtgagcgtcggcacccacgacattctgttttgcgccatcgaagcgattcatcgtcacaccacaccctacgggctggtgtggttcgatcgcagttatcacgcgctgatgcgccctgcttgttaa

SEQ ID NO: 485374 - DNA, 591 bp, Shigella sonnei
atgaacgaagccgttagcccaggtgcgcttagcaccctgttcaccgatgcccgcactcacaacggctggcgggagacacccgtcagcgatgagacgttacgggagctttatgccccgataaaatgggggccgacatcagctaactgttctccggcacggatcgtgtttatccgcactgtagaaggaaaagaacgtctgcacccggcgctttccagcggcaatctacaaaaaaccctgaccgcgcccgtcaccgctatcgttgcctgggacagtgaattttatgaacggttaccactactgtttccccacggtgatgcccgcagttggtttacctccagcccacaacttgccgaagaaacagcgtttcgcaacagctccatgcaggcggcctatctgatcgtcgcttgccgtgcgctgggactggataccggcccgatgtcgggttttgaccgtcaacacgttgacgacgccttttttgcgggcagcacgctgaagagcaatctgctgattaatatcggctatggcgatagcagcaaactttttgcgcgcctgccacgtctgtcctttgaagaagcctgcgggctgttgtaa

SEQ ID NO: 485375 - DNA, 801 bp, Shigella sonnei
atgaaactttcactctcacctcccccttatgctgatgcgcccgtagtggtgttgatttcgggtcttggcggtagcggcagttactggttaccgcaactggcggtgctggagcaggagtatcaggtagtctgttacgaccagcgcggcaccggcaataatcccgacacgctggcagaagattacagtatcgcccagatggcagcggaactgcatcaggcgctggtagccgcagggattgagcattacgcggtggtcggccatgcgctcggtgcgctggtgggaatgcagctggcgctggattatcccgcgtcggtaactgtgctgatcagcgttaacggctggctacgaataaacgcccatacgcgccgctgttttcaggttcgcgaacgattactgtatagcggcggcgcgcaggcatgggtggaagcgcagccgttgttcctctatcccgccgactggatggcggcccgcgcacctcgccttgaggcagaagacgcgctggcactggcgcattttcagggcaaaaataatttactgcgtcgacttaacgccctcaaacgcgctgactttagtcaccatgcggatcgcatccgctgcccggtgcaaatcatctgcgccagtgatgatctgctggtgccatcagcatgttccagtgagcttcatgccgccctgcccgatagccagaaaatggtgatgcgctatggcggacacgcctgcaacgtgaccgaccccgaaacgtttaatgctctgttactcaacgggcttgccagcctgttacatcaccgtgaagccgccctgtaa

SEQ ID NO: 485376 - DNA, 264 bp, Shigella sonnei
gtgctgtttgccgatgacccaaaggcgcaaacccgccacgttctggaaactatccgcaaggtgatcgagacggcgggtggcacgatggcggatgtgaccttcaacagcatctttattaccgactggaaaaattacgccgcgattaacgaaatctacgccgagttttttccgggtgataaaccggcgcgattctgcattcagtgcggactggtaaaacctgacgcgctggtggaaatcgccacaattgcgcatatcgccaagtga

SEQ ID NO: 485377 - DNA, 504 bp, Shigella sonnei
atgaaacatattcaaatccgcaatagtgatatggcctggcatattgctgccaatattcagtttccaccaaattttgatgagtcaaaacagtatccggcgattatcagcgtccatccttttggcagttgtaaggagcagacgtctggcaatatctatggcaaggcattggctgaaaaaggctatctcgttctcgcttatgacgccagtttccagggagaatctggtggggagcctcgctggatagaagatccgacacagcgcgtagaggatattagccgtgttatcgattatgcagtaactctgccatatgttaatgctgaacgtattggcgtgctgggagtgtgtgggggtggtggctatgccattaatgccgcgctgacagaaaaacgaattaaagcagtagtgagtattacgggtgttaatatcgggcgtctttttcgggaaggtttcagcaattacgatccgattggcgcattgggtgatgctgccaacttactgatttag

SEQ ID NO: 485378 - DNA, 921 bp, Shigella sonnei
atgatgaataataaagtcagcttcactaacagcaataatccaaccatctctttgtctgcagtgatctatttccctccaaaatttgatgaaacccgtcagtatcaggcaattgtggtatctcacccaggtgggggcgttaaagaacaaacggccggaacctatgccaaaaaactggcggaaaagggatttgtcactattgcttatgacgcatcttatcaaggtgaaagtggcggcgagccgcgtcagttagaaaacccatacattcgtactgaagacatcagtgccgtgattgattacctgacaacgctttcttatgtcgacaatacccgaattggtgcgatgggaatttgtgccggtgcaggatatacagccaatgctgcaattcaggatcgccgcatcaaggccatcggtaccgttagtgcggtcaatattggttcgatgttccgtaatggttgggaaaacaatgtgaaatctattgatgccctgccatacgttgaagcgggttcaaacgcccgaaccagcgatattagcagcggagaatatgccgttatgccactggcaccaatgaaggagtccgatgcgccgaacgaagaactgcgtcaggcctgggagtattaccacacccctcgcgcgcagtatccaacagcaccgggttacgctactttgcgcagccttaaccagattattacctttgatgcttaccatatggcggaagtgtacctgactcagccgatgcagattgtggcgggcagccaggcagggagcaaatggatgagtgacgacctgtacgatcgagcatcaagccaagataaacgctatcacattgttgaaggcgcaaaccatatggatctttatgacggcaaagcctatgtggctgaagcaatttcagtattagctccgttctttgaggaaactctgtaa

SEQ ID NO: 485379 - DNA, 900 bp, Shigella sonnei
atgaagcgtgaagaaatcgctgatctgatggcgtttgtcgtcgttgcagaggagcgtagcttcactcgtgcagcagcccgcctgagcatggcgcagtcagctttaagccagatagtgcgtcgtatagaagaacgattgggattgcggcttctgacgcgaaccacgcgcagcgttgttccaactgaagcgggcgagcatcttttgtctgttcttggccctatgttgcatgacatagattcagccctggcatccctgagcgagctgcagaaccgcccatccgggacaatacgtattactactgtagaacatgcagccaaaacgatattgttaccagcaatgcgcacattcctgaaatcgcatcctgaaattgatattcagctcaccattgattatggtttgaccgatgtcgtttctgaacgttttgatgcaggcgtccgtctgggtggggagatggataaagatatgatcgccattcgaatcgggccagatataccaatggctattgttggctcaccggattatttttctcgccgaagtgttccaacgtcagtgtcacaattaatagatcatcaggcaattaatttgtatcttcccacatcgggtacagcaaatcgctggagattaatacgcggtggacgtgaagttcgtgttcgcatggaaggtcagcttttactgaatacgatagacctgatcattgatgctgcaattgatgggcatggattggcgtatctaccttatgatcaggttgagcgggctattaaagaaaaaaaactgatacgtgttttggataaattcacaccagatttacccggttatcacctgtactatccacaccgtcgacatgctggctcggcattctcattatttatagataggctgaagtataaaggtgctgtttag

SEQ ID NO: 485380 - DNA, 1614 bp, Shigella sonnei
atgaagcactctgtttcagtcacgtgttgtgcgctgttggtcagcagcatttctctttcgtatgctgcagaagttccgagcggcacagtactggcagagaagcaggagctggtgcgccacattaaagatgagcctgcgtcgctggatcccgctaaagccgtgggcctgccagagattcaggtcattcgcgatctgtttgaaggactggtgaatcagaacgagaaaggggagattgtccccggcgttgcgactcagtggaaaagtaatgacaaccgtatctggacttttaccctgcgcgataacgcaaaatgggcggatggcacaccggtaacggcgcaagattttgtctacagctggcagcgtctggtggacccgaaaacgctatcgccatttgcatggtttgccgcgctggcgggaatcaacaacgcacaggcgattattgatggtaaagctacgccagaccagcttggcgtcaccgcagttgatgcccatactttgaaaattcagcttgataaaccgttgccgtggtttgtgaatttaaccgctaactttgccttcttcccggtgcaaaaagccaacgtagaaagcggtaaagagtggacgaaacccggaaatctgatcggcaatggcgcttatgttcttaaagatcgcgtagtcaatgaaaaactggtcgtggtaccgaatacccattattgggataacgccaaaacggtactgcaaaaagtgaccttcctgccaattaatcaggaatccgcagccactaagcgttacctcgcgggggatattgatatcaccgaatccttcccgaaaaatatgtatcagaagctgttgaaggatattccggggcaggtttatacgccgccgcagctcgggacctattattatgcgtttaacacgcaaaaagggccgacggcagatcagcgcgttcgtctggcattaagtatgacgatagatcgccgcctgatgaccgaaaaagtattagggacgggcgaaaagccagcgtggcattttacaccagatgttaccgccggatttacgccggaaccttcgccgtttgaacaaatgagtcaggaagaactgaatgcgcaggcaaaaactttgttgagcgcagctggttatggtccgcaaaaaccgctgaagctgacgcttttgtataacacttcagaaaaccatcaaaaaattgcgattgctgtagcatcgatgtggaaaaagaaccttggcgtagatgttaaattgcaaaatcaggaatggaaaacctatatcgatagccgtaacaccggcaattttgatgttatccgcgcctcatgggtgggggattataatgaaccctccactttcctgacattattaacgtcaacgcattcaggaaatatttcacgctttaacaatccggcatacgacaaagttctggcccaggcatcgacggaaaataccgttaaagcgcgtaatgccgattacaacgcggcagaaaaaatcctcatggagcaagcaccgattgcaccaatttatcaatataccaatggacgattaatcaagccgtggctgaaaggttatcccattaataacccggaagatgtggcgtacagccggactatgtatattgtgaagcattga

SEQ ID NO: 485381 - DNA, 747 bp, Shigella sonnei
ttgctgattaatcagtttgaaaaacagcagattaaaaaaggtcgcgatatcaccagtgcgcggattatgtcgcgcattatcaaaatcaccattattgtggtgcttgttctgctttatggcgaacatttcggcatgagcctttctggcttgctgacctttggtggtattggtggtctggctgtcggtatggccggtaaagatattctgagtaatttcttttccgggatcatgctctatttcgaccgtcctttcagtattggcgactggatccgttcaccggacagaaatatcgaaggtacagtagcggaaattggctggcgaattaccaaaattacgacctttgataatcgtccattgtacgtaccgaactcgctgttttcgtcgatcagcgtagaaaacccaggacgaatgaccaaccgccgcattaccacgaccattggtttacgttatgaggatgcggcaaaagtgggcgttattgtcgaagccgtacgtgagatgctgaaaaatcacccggccatcgaccagcgacaaaccttactggtttatttcaaccagtttgccgactcgtcattgaatattatggtttattgctttaccaaaaccacggtatgggctgaatggcttgctgcacagcaagacgtttatttgaagattatcgatattgtgcagtcacacggcgcggactttgccttccccagccagacgctgtatatggataacattacaccgccggaacaggggcgctaa

SEQ ID NO: 485382 - DNA, 2574 bp, Shigella sonnei
atgcgtctggatcgtcttactaataaattccagcttgctcttgccgatgcccaatcacttgcactcgggcacgacaaccaattcatcgaaccacttcatttaatgagcgccctgctgaatcaggaagggggttcggttagtcctttattaacatccgctggcataaatgctggccagttgcgcacagatatcaatcaggcattaaatcgtttaccgcaggttgaaggtactggtggtgatgtccagccatcacaggatctggtgcgcgttcttaatctttgcgacaagctggcgcaaaaacgaggtgataactttatctcgtcagaactgttcgttctggcggcacttgagtctcgcggcacgctggccgacatcctgaaagcagcaggggcgaccaccgccaacattactcaagcgattgaacaaatgcgtggaggtgaaagcgtgaacgatcaaggtgctgaagaccaacgtcaggctttgaaaaaatataccatcgaccttaccgaacgagccgaacagggcaaactcgatccggtgattggtcgtgatgaagaaattcgccgtaccattcaggtgctgcaacgtcgtactaaaaataacccggtactgattggtgaacccggcgtcggtaaaactgccatcgttgaaggtctggcgcagcgtattatcaacggcgaagtgccggaaggattgaaaggccgccgcgtactggcgctggatatgggcgcgctggtggctggggcgaaatatcgcggtgagtttgaagaacgtttaaaaggcgtgcttaacgatcttgccaaacaggaaggcaacgtcatcctgtttatcgacgaattacataccatggtcggcgcgggtaaagccgatggcgcaatggacgccggaaacatgctgaaaccggcgctggcgcgtggtgaattgcactgcgtaggtgccacgacgcttgacgaatatcgccagtacattgaaaaagatgctgcgctggaacgtcgtttccagaaagtgtttgttgccgagccttctgttgaagataccattgcgattctgcgtggcctgaaagaacgttacgaattgcaccaccatgtgcaaattactgacccggcaattgttgcagcggcgacgttgtctcatcgctacattgctgaccgtcagctgccggataaagccatcgacctgatcgatgaagcagcatccagcattcgtatgcagattgactcaaaaccagaagaactcgaccgactcgatcgtcgtatcatccagctcaaactggaacaacaggcgttaatgaaagagtctgatgaagccagtaaaaaacgcttggatatgctcaacgaagaactgagcgacaaagaacgtcagtactccgagttagaagaagagtggaaagcagagaaggcatcgctttctggtacgcagaccattaaagcggaactggaacaggcgaaaatcgctattgaacaggctcgccgtgtgggggacctggcgcggatgtctgaactgcaatacggcaaaatcccggaactggaaaagcaactggaagccgcaacgcagctcgaaggcaaaactatgcgtctgttgcgtaataaagtgaccgacgccgaaattgctgaagtgctggcgcgttggacggggattccggtttctcgcatgatggaaagcgagcgcgaaaaactgctgcgtatggagcaagaactgcaccatcgcgtcattggtcagaacgaagcggttgatgcggtatctaacgctattcgccgtagccgtgcggggttggcggatccaaatcgcccgattggttcattcctgttcctcggcccaacgggtgtggggaaaactgagctttgtaaggcgctggcgaactttatgtttgatagcgacgaggcgatggtccgtatcgatatgtccgagtttatggagaaacactcggtgtctcgtctggttggtgcgcctccgggatatgtcggttatgaagaaggtggctacctgaccgaagctgtgcgtcgtcgtccgtattccgtcatcctgctggatgaagtggaaaaagcgcatccggatgtcttcaacattctgttgcaggtactggatgatggtcgtctgactgacgggcaggggagaacggtcgacttccgtaatacggttgtcattatgacctctaacctcggttccgatttgattcaggaacgcttcggtgaactggattatgcgcacatgaaagagctggtgctcggtgtggtaagccataacttccgtccggaattcattaaccgtattgatgaagtggtggtcttccatccgctgggtgaacagcacattgcctcgattgcgcagattcagttgaaacgtctgtacaaacgtctggaagaacgtggttatgaaatccacatttctgacgaggcgctgaaactgctgagcgagaacggttacgatccagtctatggtgcacgtcctttgaaacgtgctatccagcagcagatcgaaaacccgctggcacagcaaatactgtctggtgaattggttccgggtaaagtgattcgcctggaagttaatgaagaccggattgtcgctgtccagtaa

SEQ ID NO: 485383 - DNA, 732 bp, Shigella sonnei
atgagtaagctgattgtcccgcagtggccactgccaaaaggtgttgcggcctgtagctccactcgtatcggcggcgtgagcttgcccccgtatgactcactcaacctcggtgcccattgtggcgataacccggatcacgttgaggagaatcgtaagcgactttttgctgcgggcaatttgccttctaaaccggtctggcttgagcaggtacacggcaaagatgtgcttaagcttactggcgaaccttatgcctcaaaacgagcagatgcctcttatagcaatacgcctggcacggtttgcgcagtgatgactgccgactgcctccctgtgctgttttgcaatcgagcgggaacggaagtcgccgccgttcatgctggctggcgtggactgtgcgcaggcgtgctggaagagacggtttcctgttttgctgataaacctgaaaacattctcgcctggttagggccggcaattggtccacgcgcgttcgaagtgggggcggaggttcgcgaggcgtttatggcagtagacgctaaagcaagtgcagctttcattcagcatggtgataagtatctggcggatatttatcagcttgcccggcagcgtctggcgaacgtgggtgttgagcaaattttcggcggcgaccgttgtacatatacggaaaatgagactttcttctcttatcgtcgcgacaagaccaccggtcgtatggcaagtttcatttggctgatataa

SEQ ID NO: 485384 - DNA, 981 bp, Shigella sonnei
atggcacaacgagtacagctcactgcaacggtgtccgaaaaccaactcggtcaacgcttagatcaggctttggccgaaatgttcccggattattcacgttcgcggataaaagaatggatcctcgaccagcgcgtgctggttaacggcaaagtttgtgataagccgaaagaaaaagtattgggtggcgagcaggttgccatcaacgctgagattgaagaagaagcgcgttttgaaccgcaggatatcccgctggatatcgtctatgaagatgaagatatcattgtcattaataaaccgcgcgacctagtagtacatcctggcgcgggtaacccggatggcacggtactgaatgcgttgcttcattattatccgcccattgccgatgtaccgcgtgcgggcatcgtccatcgtctggataaagacaccaccggcctgatggttgtggcaaaaaccgttccggctcagacgcgtttagtcgaatctttgcaacggcgtgaaattactcgtgagtatgaagcggtggcgattggtcatatgaccgctggcggtacagtagatgaacccatcagccgccacccgaccaaacgtactcacatggcggtgcatccgatgggcaaaccggcggtgactcactatcgcatcatggaacacttccgtgtgcacacgcgtctgcggttgcgtctggaaactggacgtacgcaccagatccgcgtgcatatggcccatatcactcatccgctggtgggcgatccggtttatggtggccgtccgcgtccgccaaaaggtgcttcggaagcatttatctccacgctgcgtaagtttgaccgccaggcgcttcatgcaaccatgctgcgtctttatcacccgatctctggcatcgaaatggaatggcatgcgcctattccacaagatatggtggagctgattgaggtgatgcgcgccgatttcgaagagcataaggatgaagtggactggttatga

SEQ ID NO: 485385 - DNA, 738 bp, Shigella sonnei
atgacgcgcatgaaatatctggtggcagccgccacactaagcctgtttttggcgggttgctcggggtcaaaggaagaagtacctgataatccgccaaatgaaatttacgcgactgcacaacaaaagctgcaggacggtaactggagacaggcaataacgcaactggaagcgttagataatcgctatccgtttggtccgtattcgcagcaggtgcagctggatctcatctacgcctactataaaaacgccgatttgccgttagcacaggctgccatcgatcgttttattcgccttaacccgacccatccgaatatcgattatgtcatgtacatgcgtggcctgaccaatatggcgctggatgacagtgcgctgcaagggttctttggcgttgaccgtagcgatcgcgatcctcaacatgcacgagctgcgtttagtgacttttccaaactggtgcgcggctatccgaacagtcagtacactaccgatgccaccaaacgtctggtattcctgaaagatcgtctggcgaaatatgaatactccgttgccgagtactatacagaacgtggtgcatgggttgccgtcgttaaccgcgtagaaggcatgttgcgcgactacccggatacccaggctacgcgtgatgcgctgccactgatggaaaatgcataccgtcagatgcagatgaatgcgcaagctgaaaaagtagcgaaaatcatcgccgcaaacagcagcaatacataa

SEQ ID NO: 485386 - DNA, 1416 bp, Shigella sonnei
atgaaaatcaaaactcgcttcgcgccaagcccaacaggctatctgcacgttggcggcgcgcgtactgctctttactcctggctttttgcacgtaaccacggcggtgagttcgtgctgcgtattgaagacaccgatcttgagcgttccacgccggaagctatcgaagccattatggatggcatgaactggctgagcctggagtgggatgaaggtccgtactaccagaccaaacgttttgatcgctacaacgcggtgatcgatcagatgctggaagagggcactgcttataaatgctattgctctaaagagcgcctggaagcgctgcgcgaagagcaaatggcgaaaggtgagaagccgcgttatgacggtcgctgccgccacagccatgagcatcatgctgatgatgaaccgtgtgttgtacgttttgctaacccgcaggaaggttctgttgtttttgacgatcagatccgtggtccgatcgagttcagcaaccaggaactggacgatcttattatccgccgtaccgatggttccccaacctataacttctgtgtggttgtcgatgactgggatatggaaatcacccacgttatccgtggcgaagaccatatcaacaacacgccgcgccagatcaacattcttaaggccctgaaagcgccggtgccggtttacgcgcacgtttctatgatcaatggcgatgacggtaaaaaactgtccaaacgtcacggggcagtcagcgtaatgcagtatcgtgatgacggttatttgccagaagcactgctgaactatctggtgcgtctgggctggtcccacggcgatcaggaaatcttcactcgtgaagagatgatcaaatacttcactttgaatgccgtcagcaaatctgccagtgcgttcaacaccgacaagctgctgtggctgaaccatcactacattaacgcgctgccgccggagtatgttgctactcacttacagtggcacattgagcaggaaaatatcgatacccgtaacggcccgcagctggctgatctggtgaaactgctgggcgaacgctgcaagacgctgaaagagatggcacagagctgccgttatttctacgaagattttgctgagttcgatgccgatgcggcgaaaaaacatctgcgtccggtagcgcgtcagccgctggaagtggttcgtgacaaactggccgcgattactgactggaccgctgaaaacgttcatcacgctattcaggcgacggcggatgagctggaagtgggtatgggtaaagttggtatgccgctgcgtgtcgccgtaaccggggcggggcagtctccagcactggatgttaccgttcacgcaattggtaagacccgcagtatcgagcgtatcaacaaagcgctggattttattgctgaacgcgaaaatcagcagtaa

SEQ ID NO: 485387 - DNA, 372 bp, Shigella sonnei
atgaccaccgaagaactggctgaatgcctcggtgtggctaaacaaactgttaaccgttggatcagagaaaaaggctggaaaacggaaaaatttcccggcgtgaaaggcggtcgtgccagacttattctggtcgatacgcaagtttgcgagtttattcagaacacgccagccttccataacacaccaatgttgatggaagctgaagagagaattgctgaatacgctcctggagcacgcgccccggcgtatcgacaaatcatcaacgcgatagataatatgacagacattgagcagggaaaagtcgcgcaatttttgtcacgtgaaggaattcgcaatttcctcgcccgtctcgatattgacgaatcagcataa

SEQ ID NO: 485388 - DNA, 360 bp, Shigella sonnei
atgttcaaggagaggatgacaccagatgaacttgccagactgaccggctatagccgccagaccattaataaatgggtacgcaaggagggctggacaacgtcaccaaaacctggcgtccagggtggcaaagcccgactggttcacgtcaatgaacaggttcgtgaatatattcgcaatgctgaacgtccagaaggtcagggagaagcgcctgccctttctggtgatgcgccgcttgaagtattgctggtgacactggcgaaagagatgacgccagttgaacaaaaacagtttacatccttgcttctgcgggaagggattatcggattgttacaacgcttagggattcgcgatagcaaataa

SEQ ID NO: 485389 - DNA, 1089 bp, Shigella sonnei
atgtttgtggagcataacctgataaaaaatatcaagatattcacactagcgtttacgctcaccgtggtacttattcagctatcccgttttatttcgccacttgccattatccattccagttatatctttctggcgtggatgccactgtgcgtaatgctgtcaatcttgtttatctttggctggcgcggtgtcgttcccgttttatgcgggatgttttgcaccaatctgtggaactttcatctctcttttttacagactgcggtcatgctcggtagccagacgtttgtcgtgttgtgtgcctgcgcaatattacgctggcagctggggacgcgttggcgttatggattgaccagccgatatgtctggcaacgtctgttctggcttggtttggtgacgccgatcggcatcaaatgcagcatgtatcttgtggggagcttctttgatttcccgctaaagatatccacctttttcggcgatgcggatgccattttcacggtcgttgatttgctaagccttttcaccgctgtgcttatttacaacatgcttttctactatctcactcgcatgattgtaagtccccactttgcgcagatattgtggcgcagggatatcgcgccgtcgttgggcaaagagaaacgcgcatttaccttaagctggctggcagcgttaagcgtgcttctacttctgttgtgcacaccttatgaaaacgactttattgccggttacctggtacccgttttcttcatcatctttaccctcggggtcggtaagcttcgctatccgtttttaaatctcaccagggctgtttcaacgctttgccttctgaattacaaccagaactttttgcaaggggtggaaaccgaatattcgctggcatttattcttgcggtgctgatttcctttagcgtttgcctgctctatatggtgcgcatttatcatcgcagtgaatggcttaatcgccgctggcatttgcaggcgctgaccgatccgttaacgctcctgcccaacttccgtgcgttggaacaagcgccggagcaagaggcgggcaagagttttgctgcctgcgcattgataatcttgagtttatga

SEQ ID NO: 485390 - DNA, 1104 bp, Shigella sonnei
atgagtcgtcattacggcttaatgatgcgcgttcactgtatccgatcaatttaccgtacgctgctgccgttgatgcaggaaaacgaaaagttatatcaattgccgggtagtgaactgctgttagtgctgagcgggccggaaacggaagggcgactccagcatatggttaacatcctgaatagtcggcaaattcactggaacaataccgggctggatatgggctatggtgctgcctgggggcgttttgatggaaatcaggaaaccctgcaacccttgttggggcagttaagctggctggcggagcaatcctgcgcacatcatcatgtgctggcgctggatagcagagaggagatggtttccgggcagaccactaaacaggtgctattgctgaataccattcgcacggcgttagatcagggtgatttgctgctctacgcccagccaattcgcaacaaagagggtgaaggttatgatgagatcctcgcgcgactgaaatatgacggcggcattatgaccccggataagtttctgccccttattgctcagtttaaccttagcgcgcgttttgatttgcaagtgctggaatccttgttgaagtggctggcaacacacccttgcgacaaaaaaggaccgcgcttttcagtcaatttaatgccgctcacgctgctgcaaaagaatattgccgggcggattattcgtctgtttaagcgttatcacatctccccgcaggcggtcattcttgagatcaccgaggagcaggcgttttctaacgcagaaagcagcatgtacaacatcgagcagctgcataagtttggtttccggattgcgattgatgactttggcaccggatatgccaactacgaacggttaaagcgtttgcaggctgatatcatcaaaattgatggcgtctttgtgaaagatattgtcacgaatacgctggatgcgatgattgtgagatcaattaccgatctggcgaaagcgaagtcattgagtgtggtcgcggagtttgtcgagacgcaacagcagcaggcgctattgcataagctcggggtgcaatatctgcaagggtatttgattggtcgcccgcagccattagctgattaa

SEQ ID NO: 485391 - DNA, 315 bp, Shigella sonnei
gtgtccgttaaactcaggctacctcaatttgcgctgggaagtggtgcgcaagttgcgtctagtggcgatatttatggttcagtgtgggaaaacaactggttaagcacatggctgcataatcatgtcgttcgggatattcgtcttggcagcattgaatataaaaacgtatggcgcgactacggctttggcgatgcgtcaggttatgttttaacagccgcaattaacagcaatgcggatgatattgtcgacactgttgccagaaggccaattcagaaattgattgggggaatatggtacaacgtggggagtgtttaa

SEQ ID NO: 485392 - DNA, 528 bp, Shigella sonnei
atgatgcacctgaaaaatattaaggccgggaatccgaaaacaccggaacaataccagctaactaaaaaagcgggcgtggtatggctcttttgcgaagatggcaaaaactggtatgaggaacaaaagaattttcagccagacaccataaaaattgcttacgatgagaacaacatcatcgttgctgtcagtaaagacgtttcaactattaatcctgaagggctaagcatagttgaagttcctgatattacggcaaatcgtcacgcagacaataacggaaaatggatgtttctggatggtaaagtagtaaagagggaatatacagaacaggaactgcaacaacaggccgaatcacaaaaggccgcattgctttccgaagctgaatcagtcatccagccgctggaacgagctgtcaggctgaatatggcaacagacgaggaacgcacacgactggaagcatgggaacgctacagtgttctggtcagccgtgtggatacggcaaatcctgaatggccacaaaagcctgaataa

SEQ ID NO: 485393 - DNA, 534 bp, Shigella sonnei
atgcagcatttaaaaaacattgtcgcaggtaatccaaaaaccgttgaacaataccagctaacaaagaattttgatgttatctggttatggtccgaagatggaaaaaattggcatgaggaattaaaaaactttcaggaggatacaataaaactggcttacacagttgagggaataattattgctatagacaaggatgtatcagcaattaatccagaaggtttaagtgtcgttgagttgcctgatattacagcaaatcgccgggctgatatttcgggcaactggatgttcaaagatggtgcggtgataaagcgaacttataccgaggaagagcaaaggcaacaagcggaaaatgaaaagcagagcctgctgcagctcgtcagggataaaacccagctgtgggactctcagctacagctgggcatcatttccgatgagaataaacaaaaattaaccgagtggatgctctatgcgcagaaggttgaatccacagacacctccagcctgccagtaacgtttcccgaacaaccagaatga

SEQ ID NO: 485394 - DNA, 147 bp, Shigella sonnei; identical to SEQ ID NO: 464466

SEQ ID NO: 485395 - DNA, 657 bp, Shigella sonnei
atgaaaacaaacacagatgatggggctaaaatttacacaccacttaccctaaagctttatgactggtgggttttgggagtatcaaatcggcttgcatggggatgtcctacaaaggaacaccttcttccacactttctggaacatttaggtaacaaccatctggatattggtgttggaactgggttttaccttactcacgtacctgagagtagtctgatatctttaatggatttgaacgaagctagcctgaacgcggcatctacaagggctggggaatcaaaaattaaacataaaattagccatgatgtttttgaaccttatcccgcggcgttacatggtcaatttgattccatttccatgttttaccttcttcactgcctgcctggaaatatatctacaaaaagctgtgtaatacgcaatgcggcgcaggccttaactgatgatggaactctatacggagccacaattcttggcgatggagttgtgcacaatagcttcggtcaaaaactgatgcgcatttacaatcagaaaggcatcttttcaaacacaaaagattccgaagaaggcttaacacatatactctcagagcatttcgagaatgttaaaaccagggttcaaggtactgtagtaatgttttccgcttcagggaaaaaatag

SEQ ID NO: 485396 - DNA, 171 bp, Shigella sonnei
atggtccgtctgccccctgtggtgatgtcagcaaaatcagccactgcgcgaaccacaatagcccgggaagatgctgaagatcaccaggtaaagctgtcagcgcagaaactggaagaactgctcgcatcaatggttaaggatgaggttgatcgcaatgatgggatttattga

SEQ ID NO: 485397 - DNA, 558 bp, Shigella sonnei
atgaatacagctataactttttctaacgagtcaccaaaagtctttttcaaagatggtcgcctggttaccacctctcaagctgttgccgactacttcgataaacaacataaacacgttttagctaagattgacacactcgactgctctcccgaatttacatcagccaacttttcggccgatgttcagactgtcgaaattggcaacggcgcagaacgtgaatcacgatgctacctgatcacaaaagacggcttcatgttcctcgtaatgggatttactggcaaaaaagcagccagactaaaagaagcttacattgaaaaatttaacgcaatggaagaagaactccacaaacgtcctcctgcagcacaaaactcccccgccccaaataatggatgcgcattactgatccacttcgataaacacggtcaggtcgagttcacagaaaaagtccccgccgatgcgatggtatgcactctggaacggtttaaattttatctggagcaacatgggtggatcgttgcccgtaaagaacaattggtggaaaggttgatgcggttttaa

SEQ ID NO: 485398 - DNA, 381 bp, Shigella sonnei; identical to SEQ ID NO: 35582

SEQ ID NO: 485399 - DNA, 1392 bp, Shigella sonnei
atgacaacaccagtctggcgtaatgatgacctggaaggcgctgtcattggcgcattctttctgcgtggggcagatcatgaagtgatggatattctgatcacactaccggcggacattttttctgtacgagcgtatcgggatatctacacaggcatctgcagacaggcccgtgtttcaggagtgattgaccccgtgctgttgtgtaatgagatgccggaacttgccccggtgattactgataccgggcgtaaaacctgggtgaagtcttcactggagcactatgttgcagcgttgcggcgcaatgccgcactgcgcgatgcagaaaaaacactgaatgaggcgctgcagaaattacgtgatgcgcatacctgtgaagcagctgaagatgccctgaaggatgcgcagaacatgatggtcacactgtcgacaggaaagggcgtcattcagccggtacatattgatgatgtgcttccggaagtggttgagcgtgttgaatgccggaatcaggggctggagaaatccaggacgttgatgaccggtattgatgaactggacgcaaaaacaggcggtatggagcccggagacctggtattcattgccgcccgtccttcgatggggaaaaccgaacttgcgctggacatcatcgacaaggtgactgagcaggggcatggtgtgcttctgttcaccatggagatggcgaacatccagattggtgaacgtatggtgtctgcggctggagggatgccaggatcacgcctgaaatctgtggctcactttgaagatgaagactgggcgcgtttctcacaaggggtggggcggatgaccgggcgcaatatctggatggtggaccaggcgaacctgaccattgatgagatatgcgcaacaacgaaacaccatctgattaaacatccggaaacggcgctggtggtggttgattatctcgggctgataaaaacccgaaccacggggcgtcatgaccttgccgtgggtgaaatctcaaaggggcttaaaggcctggcaaaatccggtggttttccgttgattgcgctgagccagctctcccgcggtgtggagtccagacccaataaacgtcccatgaactcagacctgaaaaattccggagaaatagaggcggatgcagacatcattctgatgctttacagggatgaagtgtacaacccggatacacaggctacaggcatagcagaaattaatatcacgaaacaacgtaacggttctctggggacgatttaccggcgtttttataacggacattttctgcctgtggaccaggaaagcgcacaggttctttccaccccaatgcggcagccccagccgcgcagatacagcaatacacgtaccgacagcagtaagatggagcgtttcttttga

SEQ ID NO: 485400 - DNA, 258 bp, Shigella sonnei
ttgaacaaccagacaatgacttttacctctgaacaattgcgtaaacacgcgcaggaaatgttgcgacaggcggaacaactggaaaaaacaggtgtaacaaaagatgccattcgtcgggatatggtgccagcgctcagggaactgatgcaggcgaaacatcgcgcacaaaaagcggtggatgagctcgttgattgtgtggcagagctggaaaccaaagttggaaagtttgaaaaaatggtgcaggaggtgctgcgctga

SEQ ID NO: 485401 - DNA, 372 bp, Shigella sonnei
atgcgccatgagtttattttaccttatccgccgacggtgaatacttactggcgacgtcgtggcagcacatattttgtatcaaaagttggtgagcgttatcgccgtgatgtgacgctaattgttcgccagcagcggctgaaattaaacctgtccggaaggctggcgataaagattattgcagagccaccggataagcgccgtcgtgacctggacaatatcctgaaagcaccactggatgcgctgacgcatgccggactactcatagacgacgagcagtttgatgaaatcaatattgtgcgcggtcagctcgttcctggtgggcgactgggcgtgaagatttatgaaatcacaggtgataacgatggcgcgtga

SEQ ID NO: 485402 - DNA, 387 bp, Shigella sonnei
atggcgcgtgatattcagcaggttatggaacggtggggggcttgggctgcaaacactcatgaagatgtatcctgggcgtcgatcgctgctggttttaaagggttaattccgtcgaaagtgaaatcacgccctcagtgttctgatgatgatgcaatgataatttgtggctgtatggcccggttgaacaagaaaaatcaggatttgcacgatttgctggtggattattacgtaggtggaatgacttttatgagtctggcacggaaacatgggtgttcggatacctgtattggcaagcgcctgcagaaagcggaaggggttattgatggcatgttgatgatgcttgatatccggctggagatggacagatacgtagaacgaattatgtag

SEQ ID NO: 485403 - DNA, 564 bp, Shigella sonnei
atgaatcgcacgtctattgaaaaactcccgtcacttacgcataaccatcttcctgtcatgacaacagagctgctggctgatttgtacggaacagagcgccagcgtttgacaaacaatttcaatcgaaacaaagaacggtttatagaaggtaaacattttttcctgatagaaggtgatgcgttacgagagttgaagaacgaaaactctttaagagtttctgtgaaaattgcccgtaacgttcgctccctcatcctctggacagaacgtggcgcagcccgtcacgccaaaatgctcgaaaccgatcaggcgtgggaagtgttcgaaaaactggaagactgttatttcaaccagaaacagccaccagcggcacaaaacacatctatcgaaaatgatggatgcgcattactgagccacttcgataaacacggtcaggttgagttcacggaaaaggtacccgccgatgcgatggtatgtactctggaacggtttaaattttatctggagcaacacgggtggatcgttgcccgtaaagagcaactggtggagcggttgatgcggttttaa

SEQ ID NO: 485404 - DNA, 207 bp, Shigella sonnei
atggaaaaaatatcaacaggcattgcctacggcacctccgccggcagtgccggctactggtttttgcagtggttggatcaggtcagtccatcacagtgggctgcgattggtgtgctgggaagtctgcttctggggcttctgacttatctgacaaatctgtatttcaaaataagagaagacaagcgtaaggctgcgagaggtgaataa

SEQ ID NO: 485405 - DNA, 258 bp, Shigella sonnei
atgaccgaagaagtttacctcgacgaaatggtaggtcgtattaacgccaatatgatccttccgtatccgccgggagttcctctggtaatgccgggtgaaatgatcaccgaagaaagccgtccggttctggagttcctgcagatgctgtgtgaaatcggcgctcactatccgggatttgaaaccgatattcacggtgcataccgtcaggctgatggccgctataccgttaaggtattgaaagaagaaagcaaaaaataa

SEQ ID NO: 485406 - DNA, 1458 bp, Shigella sonnei
atgaaaacaccctcacagccgcgcgcgatatactatatcgtggcgatccaaatctgggagtacttcagtttttacggcatgcgtgccttactcattctctatctcacccatcagcttggttttgatgataaccatgccatcagcctgttcagcgcatatgcttctctggtttacgttacccctattctcggcggctggcttgccgaccgcctgctcggcaaccgcactgcagtgattgccggcgcgctgttaatgacccttggccatgtggtgctgggcattgatacaaattcaacctttagcctgtatctggcgctggcaatcattatttgtggctacggtttattcaaatcaaacatcagctgtttgcttggcgagctctacgacgagaacgatcatcgacgtgatggcggtttttcgctgctgtatgctgcgggcaatatcggttctatcgccgccccaatcgcctgcggcctggctgctcagtggtatggatggcatgttggctttgcccttgcgggtggcggcatgtttatcggtttgttgattttcttaagcggtcatcgtcatttccagtccacgcgtagtatggataaaaaagcgctcactagcgtcaaatttgccttaccagtatggagctggttagtggtgatgctctgtttagccccagtattttttaccctgctgctggagaacgactggtccggatatttgctggcgatcgtttgcctcattgccgcacaaatcattgcccgcatgatgatcaaattccccgaacaccgccgtgctctttggcaaattgtattgttgatgtttgtcgggacgttgttctgggtactggcacaacagggcggcagtaccatcagcttgtttatcgatcgctttgtgaatcgtcaggcattcaatattgaagtacctacagcactattccagtcggtgaatgcaattgcagtgatgctcgctggggttgtactggcctggctggcgtcgccagaaagccgcggcaactcaacattgcgcgtctggctgaagtttgcctttggcttactgctgatggcttgtggctttatgttgttggcatttgatgcccgacatgcagcggctgacggtcaagcgtcaatgggcgtgatgatatccgggttggcgctaatgggctttgcagaactctttattgacccggtggcgattgcgcaaatcacgcgtctgaaaatgtctggcgtattaaccggtatttatatgctggcaacaggcgcggtcgccaactggctggcaggcgtcgtggcacagcagacgacagagtcgcaaattagcggtatggtaattgcagcttaccagcgattcttttctcagatgggagagtggacgttggcttgtgtcgcgatcatcgtcgtattggcctttgctacccgttttctgtttagcacgccgacgaatatgatacaggagagcaacgattaa

SEQ ID NO: 485407 - DNA, 1518 bp, Shigella sonnei
atgtctgaacaagaaacacggggagccaatgaggctattgattttaacgatgaactgagaaatcgccgcgaaaaactggcggcactacgtcagcaaggtgtggcgtttcccaatgattttcgccgcgaccatacctctgaccagttgcacgaagagtttgatgcgaagaataaccaggaactggaatccttaaacattgaagtctcggttgctggccgaatgatgacccgtcgtatcatggggaaagcctcctttgtaacgttgcaggatgtcggtggccgtattcaactgtacgttgcaagagatagcctgccagaaggtgtttataacgatcagtttaaaaaatgggatctgggtgacattatcggtgcccgcggtacgctgtttaagacgcaaacgggtgagctttccattcactgtactgagttgcgcctgctgactaaagcactacgtcctttaccagataaattccatggtctgcaggatcaggaagtccgttatcgtcaacgttatctggacctcatcgctaacgataaatcccgtcaaacgtttgttgtccgttcaaaaattctggccgctatccgtcagttcatggtcgcgcgcggctttatggaagtagaaaccccgatgatgcaggtaattccaggtggggcatctgctcgcccgtttattacccatcataatgctctggatttagatatgtatctgcgtatcgcgccggagctgtatctgaaacgtctggttgtaggcggttttgaacgggtattcgaaatcaaccgtaacttccgtaatgaaggtatttctgttcgccataatcctgagttcacaatgatggaactctacatggcgtatgcggattaccacgatttgattgaactgacagagtcactgttccgcaccctggcacaagaggttctgggtaccactaaagtcacttatggcgagcatgtgtttgatttcggcaaaccgtttgaaaaactcaccatgcgcgaagcaatcaaaaaatatcgtccagaaaccgatatggccgacctggataattttgatgctgctaaagcattagctgaatctatcggaattacggtagagaaaagctgggggctgggacgtattatcacggagatctttgatgaagtggcagaagcacatctgattcagccaacctttattacggaatatccggcagaagtgtcaccgctggcgcgccgtaatgatgttaacccggaaatcaccgaccgttttgaattcttcatcggtggtcgtgaaatcggtaatggttttagcgaattaaacgacgcagaagatcaggctgaacgtttccaggaacaggttaacgctaaagctgcaggtgacgacgaagccatgttctatgacgaagattacgtaactgcgctggaatatggtctgccgccaaccgctggtctgggtattggtatcgaccgaatgattatgctgtttacaaacagtcatactattcgcgacgttattctcttcccggcgatgcgcccacagaaataa

SEQ ID NO: 485408 - DNA, 174 bp, Shigella sonnei; identical to SEQ ID NO: 262397

SEQ ID NO: 485409 - DNA, 297 bp, Shigella sonnei
atggaaggtaaaaacaagttcaatacttatgttgtttcttttgattatccatcatcttattcctcagtgttcttaaggttaagatcattgatgtatgatatgaatttctcttctatcgtggctgatgaatatgggataccacgacaattgaatgaaaattccttcgcaataacgacatcgttagccgcaagtgaaatcgaagatttaatcaggcttaaatgcttagacttaccggatattgattttgacctcaacattatgacagttgatgactatttccgtcagttttacaagtag

SEQ ID NO: 485410 - DNA, 273 bp, Shigella sonnei
atggaaatacgcgaaggccacaataaattttacattaatgacgaacaaggcaagcaaatcgctgaaattgtctttgtgccgactggagagaatttagcgattatcgaacataccgatgtcgatgaaagcctgaaagggcaggggattggtaaacagctggttgcaaaagtcgtggaaaaaatgcgtcgggaaaaacgaaaaattatcccactatgcccatttgcgaaacacgaatttgataaaacgcgggagtatgatgatattcgcagttga

SEQ ID NO: 485411 - DNA, 231 bp, Shigella sonnei
atggatcaggcgctactggacgagggttatcgctgttataccggcgaaaagatcgatgtctatttcaacactgcgatatgtcagcattctggcaattgcgtacgtggcaacggcaagttatttaatctcaaacgaaagccgtggatcatgccggatgaagtcgacgtcgccactgtggttaaagtgattgatacgtgcccgagcggcgcgctgaaataccgtcataaataa

SEQ ID NO: 485412 - DNA, 147 bp, Shigella sonnei
atggcgaattaccgtcttatatcactggcgctgacaataagggacgaacggctgatacaggaacgcgaacatgcgttatccctggagcgtgagcgccagctggaaatacaggaacggacactggatggcccttcgctgggatggtaa

SEQ ID NO: 485413 - DNA, 297 bp, Shigella sonnei; identical to SEQ ID NO: 7202

SEQ ID NO: 485414 - DNA, 198 bp, Shigella sonnei; identical to SEQ ID NO: 7201

SEQ ID NO: 485415 - DNA, 285 bp, Shigella sonnei; identical to SEQ ID NO: 7200

SEQ ID NO: 485416 - DNA, 390 bp, Shigella sonnei; identical to SEQ ID NO: 7199

SEQ ID NO: 485417 - DNA, 558 bp, Shigella sonnei; identical to SEQ ID NO: 469570

SEQ ID NO: 485418 - DNA, 192 bp, Shigella sonnei; identical to SEQ ID NO: 7198

SEQ ID NO: 485419 - DNA, 357 bp, Shigella sonnei
atggggataatgataccgatgaaacgcgagaggatgctcacaatacgggttactgatgatgaacatgcccggttacttgaacgctgtgagggtaaacagctggcggtatggatgcggcgggtctgcctgggtgagccggttgcccgttccgggaggctgccgacactggcaccgccgttactgcgtcagctggccgccatcgggaataacctgaatcagacagcgaggaaggtgaacagcgggcagtggtcttccggtgaccgggttcaggtggtggccgcactgatggccatcggggatgagctgcgccggctgcgtctggccgtcagggaacaggggacgcgggatgatagttaa

SEQ ID NO: 485420 - DNA, 531 bp, Shigella sonnei
atgagcaatcttttacagacgggcgcggagttcgagaaaaagctgaaagagagagccgaatctacagagacaatactgaacgacgagttcaggaagctcgaaaaatctgtaagcaaggctgtgacatcaaacgagacgaaaatcaaagacgctatagccctgttcacagcttcgacagaggaatcactgaaaaaacaccgggaaggggtgaaagaggcgatgatgcagcacaggaaggacgtgttaaagctggcagggaatacgggcatgatgttactggggatggtcattttcctgtttaccgtgagtggcgggacgctctggtatcttggcgggatgatacaggcgaacctggaagaaatcaggaagcagaacgagaatctggagaagctgaacgcgaagacatggggcgtgcgttatcacgaggggagcaacggacgttttctggtgttgcccgaggggatgaaagccgaaacgaactggacgatggaaaacgggaaacagaatgccgtaaggctggtacaggagtaa

SEQ ID NO: 485421 - DNA, 234 bp, Shigella sonnei; identical to SEQ ID NO: 21482

SEQ ID NO: 485422 - DNA, 444 bp, Shigella sonnei
atggttattagtattcgccgctcacggcatgaggaaggggaggaactcgttgcgatttggtgtcgttctgtcgatgccacacacgattttttatcagcagagtatcgggccgagctggaggtgctagttcgttccttcctgccggaagcgccgttgtgggtcgcggttaatgaacgggatcagccggttgggtttatgttgttaagtgggcagcatatggatgcgctgtttatcgatcctgatgtgtgcggctgcggcgtgggtcggatgctggtggagcatgcgctctcgatggcaccggaactgacaaccaacgttaatgagcaaaatgagcaggcggttgggttctataagaaggtgggttttaaggttacgggacgctctgaggtggacgatttggggaaaccgtatccgttgctgaatctggcgtatgtggaggaataa

SEQ ID NO: 485423 - DNA, 930 bp, Shigella sonnei
atgccgattcgtgtgccggacgagctacccgccgtcaatttcttgcgtgaagaaaacgtctttgtgatgacaacttctcgtgcgtctggtcaggaaattcgtccacttaaggttctgatccttaacctgatgccgaagaagattgaaactgaaaatcagtttctgcgcctgctttcaaactcacctttgcaggtcgatattcagctgttgcgcatcgattcccgtgaatcgcgcaacacgcccgcagagcatctgaacaacttctactgtaactttgaagatattcaggaacaaaactttgacggtctgatagttaccggcgcgccgctgggcctggtggagtttaatgatgtcgcttactggccgcagatcaaacaggtgctggagtggtcgaaagatcacgtcacctcgacgctgtttgtctgctgggcggtacaggccgcgctcaatatcctctacggcattcctaagcaaactcgcaccgacaaactctctggcgtttacgagcatcatattctccatcctcatgcgcttctgacgcgtggctttgatgattcattcctggcaccgcattcgcgctatgctgactttccggcagcgttgattcgtgattacaccgatctggaaattctggcagagacggaagaaggggatgcatatctgtttgccagtaaagataagcgcattgcctttgtgacgggccatcccgaatatgatgcgcaaacgctggcgcaggaatatttccgcgatgtggaagccggactagacccggatgtaccgtataactatttcccgcacaatgatccgcaaaacaaaccgcgcgcgagctggcgtagtcacggtaatttgctgtttaccaactggctcaactattacgtctaccagatcacgccatacgatctacggcacatgaatccaacgctggattaa

SEQ ID NO: 485424 - DNA, 1443 bp, Shigella sonnei
atgactgaacaggcaacaacaaccgatgaactggctttcacaaggccgtatggcgagcaggagaagcaaattcttactgccgaagcggtagaatttctgactgagctggtgacgcattttacgccacaacgcaataaacttctggcagcgcgcattcagcagcagcaagatattgataacggaacgttgcctgattttatttcggaaacagcttccattcgcgatgctgattggaaaattcgcgggattcctgcggacttagaagaccgccgcgtagagataactggcccggtagagcgcaagatggtgatcaacgcgctcaacgccaatgtgaaagtctttatggccgatttcgaagattcactggccccggactggaacaaagtgatcgacgggcaaattaacctgcgtgatgcagttaacggcaccatcagctataccaatgaagcaggcaaaatttatcagctcaagcccaatccagcggttttgatttgtcgggtacgcggtctacacttgccggaaaaacatgtcacctggcgtggtgaggcaatccccggtagcctgtttgattttgcgctctatttcttccacaactatcaggcactgttggcaaagggcagcggtccctatttctatctgccgaaaacccagtcctggcaggaagcggcctggtggagcgaagtcttcagctatgcagaagatcgctttaatctgccgcgcggcgccatcaaggcgacgttgctgattgaaacgctgcccgccgtgttccagatggacgaaatccttcacgcgctgcgcgaccatattgttggtctgaactgcggtcgctgggattacatcttcagctatatcaaaacgttgaaaaactatcccgatcgtgtcctgccagacagacaggccgtgacgatggataaaccattcctgaatgcttactcacgcctgctgattaaaacctgccataaacgcggtgcttttgcgatgggcggcatggcagcgtttattccgagcaaagatgaagagcgtaataaccaggtgctcaacaaagtaaaagcggataaagcgctggaagtcaataacggtcacgatggcacatggatcgctcacccaggccttgcggacacggcaatggcggtattcaacgacattctcggctcccgtaaaaatcagcttgaagtattgcgcgaacaagacgcgccgattactgccgatcagctgctggcaccttgtgacggtgaacgcaccgaagaaggtatgcgcgccaacattcgcgtggctgtgcagtacatcgaagcgtggatctccggcaacggctgcgtgccgatttatggcctgatggaagatgcggcgacggctgaaatttcccgtacctcgatctggcagtggatccatcatcaaaaaacgttgagcaatggcaaaccggtgaccaaagccttgttccgctag

SEQ ID NO: 485425 - DNA, 159 bp, Shigella sonnei
atgctgggcgaagagatgaaagtcattgccagcgaactgggcgaagaacgtttctcccagggccgttttgacgatgccgcacgcttgatggaacagatcaccacttccgatgagttaattgatttcctgaccctgccaggctaccgcctgttagcgtaa

SEQ ID NO: 485426 - DNA, 1113 bp, Shigella sonnei
atgaaaacccgtacacaacaaattgaagaattacagaaagagtggactcaaccgcgttgggaaggcattactcgcccatacagtgcggaagatgtggtgaaattacgcggttcagtcaatcctgaatgcacgctggcgcaactgggcgcagcgaaaatgtggcgtctgctgcacggtgagtcgaaaaaaggctacatcaacagcctcggtgcactgactggcggtcaggcgctgcaacaggcgaaagcgggtattgaagcagtctatctgtcgggatggcaggtagcggcggacgctaacctggcggccagcatgtatccggatcagtcgctctatccggcaaactcggtgccagctgtggtggagcggatcaacaacaccttccgtcgtgccgatcagatccaatggtccgcgggcattgagccgggcgatccgcgctatgtcgattacttcctgccgatcgttgccgatgcggaagccggttttggcggtgtcctgaatgcctttgaactgatgaaagcgatgattgaagccggtgcagcggcagttcacttcgaagatcagctggcgtcagtgaagaaatgcggtcacatgggcggcaaagttttggtgccaactcaagaagctattcagaaactggtcgcggcgcgtctggcagctgacgtgacgggcgttccaaccctactggttgctcgtaccgatgccgatgcagcggatctgatcacctccgattgcgacccgtatgacagcgaatttattaccggcgagcgtaccagtgaaggcttcttccgtactcatgcgggcattgagcaagcgatcagccgtggcctggcgtatgcgccatatgctgacctggtctggtgtgaaacctccacgccggatctggaactggcgcgtcgctttgcacaagctatccacgcgaaatatccgggcaaactgctggcttataactgctcgccgtcgttcaactggcagaaaaacctcgacgacaaaactattgccagcttccagcagcagctgtcggatatgggctacaagttccagttcatcaccctggcaggtatccacagcatgtggttcaacatgtttgacctggcaaacgcctatgcctag

SEQ ID NO: 485427 - DNA, 1044 bp, Shigella sonnei
atgaacgatagattatgctttgaagtgcacgataacaagggttatttcgtatttccggatacctggtttggcccattgctgggggagtttgaagaagtgcttgatgcatacgacgctgatgaaatcagcgagacgagttacatcaacaaactccgacgccttgctcaacgggagccggactttattgatatacacgctcatctggcatatgcatttctggaacagaatgccccgcgtaaggcactgaacgcctctcttaaaggactggcggcaggtaatcgtatcatcccggaaagtttctgtggtgaaataatctggatgcatcccgaaaaccggccttatctgcgcgcgctttatgcagcaattctcgcaaatgtgcacttacagcgccatcaggatgcggttatgctcactgataaaatactggcatacaatcctgaagataatcagggggctcgctggttgttgggttcagagctgttacgcaccggcgatcatgagcgagccttcagtgtactgaaagagcatgctgatgaattttcaccttactggtatgaactcggtctcctgcattttctgaacggggaacatgttaaggccgccacagcttttcgccatggctttgccacaaacacttacatcgcagaaatgctgtgcggaaatctgcatccatttccacttgctgtgtggcatgacttctccggctctctggatacggcagaagattactatgcaacatactcaccattatggggacaatatctggaagcattgctgtttgtaaactggctctataaccattcctccgtgctgcatgaacgatcagaaatcattaaatgcgccgaaatgctgattcaggaagatgatttcgaaatatgcgaaagtattttaagacagcaggagcacctgtggaaaagaattgacaagacactttctgaggaaattgtacagaaatgcagaaatatgaacggtgaatatatctggccctggatattgcccttttccgcagcagggatgaaacattcaagcatccagtatcagtag

SEQ ID NO: 485428 - DNA, 1185 bp, Shigella sonnei; identical to SEQ ID NO: 21666

SEQ ID NO: 485429 - DNA, 1224 bp, Shigella sonnei
atgaagagtgaagtgttgtccgttaaagagaaaattggttatggcatgggagacgccgccagccacattattttcgataacgtaatgttatatatgatgttcttttataccgatatttttggcattcctgccggatttgtcggaaccatgtttttggtcgctcgtgcactggatgcgatttccgatccttgcatggggttgttggccgatcgaacgcgctctcgctggggtaaatttcgtccgtgggtactgtttggcgcactgccattcgggatcgtctgtgtactggcctatagcacgccagatctcagtatgaacggcaaaatgatctatgcagcaattacttacaccctacttaccttactttataccgtcgtcaatatcccttactgcgcattgggtggtgtaatcaccaatgacccgactcagcgtatctcgctgcaatcctggcgttttgtgctggcgaccgcgggaggcatgctttctactgttctgatgatgccactggttaatttaattggcggtgataataaaccactcggtttccagggcggtatcgcggtcctttccgtggtggcattcatgatgctggcattttgtttcttcaccactaaagaacgcgttgaagcaccacctacaacaacgtctatgcgggaagatttacgtgatatctggcaaaacgaccagtggcggattgtcggtttactaaccattttcaatatcctggcggtgtgcgtacgcggtggagcgatgatgtattacgtcacatggattttgggcacgccggaagtgtttgtcgcttttctcaccacttattgcgtgggtaacctgattggttccgcactggcaaaacctctgaccgactggaaatgtaaagtcactatcttctggtggacgaacgccctgctggcagtgattagcctcgcgatgttctttgttcccatgcaggccagcatcactatgtttgtcttcatcttcgtgattggtgtgttgcatcaactggtgacacctatccagtgggtaatgatgtccgataccgtcgactacggcgagtggtgcaatggtaaacgcctgaccgggatcagttttgctggcacgctgtttgtgctcaaactggggttggccttcggcggcgctcttatcggctggatgctggcttatggcggatatgatgcggcagaaaaagcgcagaacagcgccacggtgatgctgccaacttactga

SEQ ID NO: 485430 - DNA, 771 bp, Shigella sonnei
atgagcaaaattaaagcaataaggagggggctgcctgatgctccacttgaagacatcaccacaaaagaaattgcggcaatgctcaatggatacatagacgagggcaaggcggcatcagccaagttaatcagatcaacactgagcgatgcattccgagaggcaatagctgaaggccatataacaacaaaaccggtcgctgccactcgcgcagcaaaatcagaggtaaggagatcaagacttacggctgacgaatacctgaaaatttatcaaacagcagaatcatcaccatgttggctcagacttgcaatggaactggctgttgttaccgggcaacgagttggtgatttatgcgaaatgaagtggtctgatatcgtagatggatatctttatgtcgagcaaagcaaaacaggcgtaaaaattgccatccctacaacattgcatgttgatgctctcgggatatcaatgaaggaaacacttgataaatgcaaagagattcttggcggagaaaccataattgcatctactcgtcgtgaaccgctttcatccggcacagtatcaaggtattttatgcgcgcacgaaaagcatcaggtctttccttcgaaggggatccacctacctttcacgagttgcgcagtttgtctgcaagactctatgagaagcagataagcgataagtttgctcaacatcttctcgggcacaagtcggacaccatggcatcacagtatcgtgatgacagaggcagggagtgggacaaaattgaaatcaaataa

SEQ ID NO: 485431 - DNA, 1284 bp, Shigella sonnei
gtgaacacattttcagtttcccgtctggcgctggcattggcttttggcgtgacgctgaccgcctgtagctcaaccccgcccgatcaacgtccttctgatcaaaccgcgcctggtacctcttctcgcccgattctgtcggcaaaagaagcgcagaatttcgatgctcaacactattttgcatccctgacaccaggtgctgcagcgtggaatccttccccgattaccctgcctgcgcaacctgactttgttgtcggcccggcgggcactcaaggtgtaacgcataccacgattcaggcggcggtagatgcggcaattatcaagcgtaccaacaagcgccagtatattgccgtgatgcctggtgagtatcagggaacggtatatgtccctgccgctccgggtggaattactctgtacggtacaggtgaaaaaccgattgatgtgaagattgggctttcccttgatggtggcatgagccctgccgactggcgtcacgacgtcaacccgcgcggcaaatatatgccaggtaaaccagcgtggtatatgtacgatagctgccagagcaaacgcagcgacagtatcggtgttctctgctctgcggtcttctggtcacaaaacaatggcctgcaactgcaaaatctgaccatcgaaaacacgctgggcgatagcgtagatgcaggtaaccatccggcggtggcactgcgtactgatggtgaccaggtacagattaacaacgttaacattctcggtcgtcagaacaccttctttgtcaccaacagcggtgtgcagaaccgtctggaaacgaatcgtcagccgcgtacgctggtgaccaacagctacattgaaggggatgtggatatcgtttctggtcgcggcgcagtggtgttcgataacaccgaattccgcgtggtgaactcacgtactcagcaagaagcgtatgtgtttgcaccggctacgctgtccaacatgtactacggtttcctcgccgtaaacagccgtttcaatgctttcggtgatggtgtggcgcaactgggccgctcgctggatgttgatgccaataccaacggtcaggtggtgatccgtgatagcgccatcaacgaaggttttaacacggctaaaccgtgggccgatgcggtgatctctaatcgtccgtttgcgggtaataccggcagcgtagatgataacgacgaaatacagcgcaatctgaatgacactaactacaaccgcatgtgggaatacaataaccgcggcgtgggtagtaaagtggttgcagaggcgaagaagtaa

SEQ ID NO: 485432 - DNA, 2112 bp, Shigella sonnei
atggataaacttaaaattaagtttgattcattagcctctcacgatattacctttgttggtattgtacagaccgctaaagcgtccggaatggaacgtttcccgctgccgtatgtgctgaccaactgccataactcactctgcgccgtcggcggcaccattaacggtgatgaccatgtttttggtttatcggcagctcagcgttatggcggtatttttgtgcctccgcatattgcggtcatccatcaatatatgcgtgagatgatggcaggcgggggcaaaatgatcctcgggtcagacagccacacccgttacggtgcattagggacaatggcagtcggtgagggtggcggtgagttggtaaaacagctgcttaatgacacctgggatatcgactatccgggcgtggttgcggtgcatctgaccggaaaacctgcgccgtatgtggggccacaggatgtggcgctggctatcattggcgcggtgttcaaaaacggttacgtcaaaaacaaagtcatggagttcgttggaccgggcgttagcgcgctctctaccgatttccgtaacagcgttgacgtgatgaccacggaaaccacctgtttaagctccgtctggcaaactgatgaagaagtgcataactggctggcgctgcacggtcgcggccaggattactgccagcttaaccctcaaccgatggcgtactacgatggctgcatcagcgttgatttaagcgccatcaaaccaatgattgcgctgccgttccacccgagcaacgtgtatgaaatcgacacactgaaccagaacctgaccgacattctgcgtgagattgaaattgagtccgaacgcgtggcgcacggtaaagccaaactctcgctgctggataaagtggaaaatggtcgcctgaaagtgcagcaggggattatcgcgggctgttctggcggtaactacgaaaacgtcatcgcggcggcgaatgcactgcgcggtcaatcctgtggcaatgacaccttctcgctggcagtttacccgtcatcacagccggtgtttatggatctcgccaaaaaaggtgtggtagcagatttgattggcgcaggcgcaatcatcagaaccgcgttctgcggcccatgctttggcgcgggcgatacgccaatcaacaacggtttgagtattcgccacaccacgcgtaacttcccgaaccgcgaaggctctaagccagctaatgggcagatgtcagcggtggcgttgatggacgctcgttctatcgctgcgactgcggcaaacggtggctatttaacctctgccagcgaacttgattgctgggacaacgtgccggagtacgccttcgatgtaacgccgtataaaaaccgtgtttatcagggctttgtgaaaggggcaactcagcaaccgctgatttacgggccgaacattaaagactggccggaattgggtgcgctgactgacaatatcgtcctgaaagtgtgctcgaagatcctcgacgaagtgaccaccaccgacgaactgattccttccggtgaaacctcttcttatcgttcaaatccgattggtctggcggagtttaccctgtctcgccgtgatcccggttatgttggcagaagtaaagcgactgctgagctggaaaatcagcgtctggcggggaatgtcagcgagctgacagaggtgtttgcgcgcattaagcagattgctggtcaggagcatattgatccgctgcaaactgaaattggcagcatggtctatgcggtgaaaccaggcgatggttctgcgcgtgaacaggcggcgagctgccagcgtgtgattggcggtctggcgaatattgccgaggagtacgcgactaaacgctaccgttctaacgtcatcaactgggggatgttacctctgcagatggcggaagtgccaacctttgaagtgggggattacatttacatccctggcattaaagcggcgctggataatccgggtacgacgtttaaaggttatgtgatccatgaagatgcgccggtaacggaaattacgctctatatggaaagtctgactgctgaagagcgcgagattatcaaggcgggtagtttgattaacttcaataaaaaccgtcagatgtaa

SEQ ID NO: 485433 - DNA, 1947 bp, Shigella sonnei
atgaagtcaatgaatattgccgccagtagtgaactggtatcccgactttctactcatcgccgcgtggtggcgttgggagatactgattttacggatgtcgcggcagtcgtcattaccgctgcggatagtcgcagtggcattcttgcgttgcttaagcgcaccggttttcatctaccggtgtttttgtattccgaacatgctgttgaattacctgcgggcgttacggcggtaatcaacggcaacgagcagcagtggctggagctggaatccgcagcctgtcagtatgaagagaatttgctgccaccgttttatgacacgctgacgcagtacgttgagatgggcaacagcacctttgcttgccctggacatcaacatggtgcgttttttaaaaagcatcctgccggacgccatttttacgatttctttggtgagaacgtctttcgcgccgatatgtgtaacgctgacgtaaaattgggcgatctgcttattcatgaaggatcggcgaaggatgcgcagaaattcgcagccaaagtctttcatgccgataaaacctattttgtgctgaacggcacatcggcagcgaataaagtggtgacgaatgcgctgttaacgcgtggcgatctggtgctcttcgaccgtaacaaccataagtcgaatcatcacggcgcgctgattcaggcgggggcgacgtcggtctatctggaagcttcacgcaacccgtttggtttcattggcggtattgatgcgcactgttttaatgaagagtatctgcgccagcaaattcgcgacgttgcgccagaaaaagccgagctgccgcgcccgtttcgcctggcgattattcagctgggaacctatgacggaactgtctataacgcccgtcaggtgatcgataccgttgggcatctgtgtgattacattctgtttgattccgcgtgggtcggttacgaacagtttatcccgatgatggcggatagctcgccgctgctattagaacttaacgaaaacgatccggggatctttgtgactcagtcggtgcacaaacagcaggcgggattctcacagacgtcgcagatccataaaaaagataaccatatccgcggacaggcgcgtttttgcccgcataagcggttgaataacgcctttatgctccatgcttctaccagccctttctatccgctgtttgctgcactggatgttaacgccaaaattcatgaaggggagagtgggcgtcggctgtgggctgagtgcgttgagttgggtattgagtcgcgcaaggctattcttgcgcgctgtaagctgttccgcccgtttatcccgcccgttgttgatggcaaattgtggcaggattatccgacatctgtgttagccagcgaccgccgttttttcagttttgagccgggggcgaagtggcacggctttgaaggatatgccgcggatcagtattttgttgatccgtgcaagctgttactcactacaccaggtatcaatgccgaaaccggcgaatatagcgactttggcgttccggcgacgattctggcgcactatctgcgtgagaacggcattgtgccggagaagtgcgatctcaactccattctgttcttattaactccggcggaaagccacgagaagctggcacaactggtggcgatgctggcgcaatttgaacagcatattgaggatgactcgccgctggctgaggtgttgccgagcgtttataacaaatatccggtgcgctatcgcgactacaccctgcgccagttgtgtcaggagatgcacgatctgtatgtcagtttcgacgtcaaagacctacaaaaagcgatgttccgccagcagagtttcccgtcagtggtgatgaacccccaggatgcgcatagcgctgatatgactttccgtgtcaaaccggaatctctaatttcgacgattttctttttaggtttaattccctga

SEQ ID NO: 485434 - DNA, 708 bp, Shigella sonnei
gtggtcatcggcccttttatcaacgctagtgcagtcttactgggtggcgttctcggcgcactgctcagccaacgcttaccggaacgtatccgcgtctccatgacatctatttttggtctggcatcgctggggattggtattttactggttgtgaaatgcgccaaccttccagcgatggttttagctacgctacttggcgctctaattggcgaaatttgtttgctggagaaaggtgtcaatacagcagtcgccaaagcacaaaatctgtttcgtcactcacgtaagaagccagcgcatgaatcttttattcagaattatgtcgcgattattgtcctgttttgcgccagcggcaccgggatcttcggggcgatgaacgaagggatgaccggcgatccgagtattttaatcgccaagtcatttcttgatttctttacggcgatgatcttcgcctgctcgctgggtattgcggtgtcggtaattagtatcccattactgatcatccagctaacgctagcgtgggctgccgcgctgatattaccgctgaccacaccgtcgatgatggcagacttcagcgccgtaggcggtttattgctgctggcaaccggattacgcatctgtggcattaaaatgttcccggtggtcaacatgcttccagcactccttctggcaatgccgctttccgccgcctggaccgcctggtttgcctga

SEQ ID NO: 485435 - DNA, 1005 bp, Shigella sonnei
atggcactgactgacgcaaaaatccgggctgcaaagcccactgacaaggcttataaactcactgacggggctggcatgttcctgctggtacatcctaatggctcccgttactggcgtctccgttatcgtattctgggtaaggagaagactctggcacttggtgtgtatccagaagtttctctctccgaagctcgtacaaaacgggatgaggcccgaaaactgatttcggagggggttgacccttgcgaacagaaaagagctaaaaaagtagtccctgatttacagctctcttttgaacatattgcgcgacgctggcatgccagtaataaacaatgggcacaatcacacagcaataaagtactcaaaagccttgagactcacgttttcccctttatcggcaaccgggatatcacaacactcaataccccggatctgcttatccctgttcgtgctgcagaagctaaacaaatttatgaaatcgccagtcgtctgcagcaaagaatatctgccgtaatgcgttatgccgtacagtctggcatcatcagatataatcctgctctggatatggctggcgcattgactacggtaaaacgccagcatcgccccgctcttgatctttctcgcctgcctgaacttttgtcgcgtattggcagttacaaagggcaacctgtcacccagcttgccgttatgctgaatttactggtttttattcgttccagtgaactcagatacgcccgctggtctgaaattgatattgacaatgccatgtggactattccagccgaacgcgaacccctgccaggcgtaaaattctcacaccggggctccaagatgcgaacaccacatcttgtgccactcagcaaacaggctgtagccatactgacagaactacagacatgggctggtgaaaatggtctgatctttacgggagcacatgacccgcgtaaaccaatcagtgaaaatgtaatgaacgcatcccacacaattaaacacggagcagtatga

SEQ ID NO: 485436 - DNA, 1083 bp, Shigella sonnei
atgaaaaaattaacagtggcaatttctgctgtagctgcatcagtactgatggcgatgtctgctcaggcagctgaaatttataataaagacagtaacaagctggatctgtacgggaaagttaatgctaagcactacttctcctctaatgatgcagatgatggtgatactacttatgcccgtcttggcttcaaaggtgaaacccaaatcaacgatcaactgactggtttcggtcagtgggaatatgaattcaaaggcaaccgcgctgaatctcaaggttcctccaaagataaaacccgtcttgccttcgctggcctgaaattcggtgactacggctccatcgattacggccgtaactacggtgtagcatacgacatcggtgcgtggactgacgtcctgccagaattcggtggtgacacttggactcaaacagatgtgttcatgactggtcgcaccactggtgttgcaacttatcgtaacaacgacttctttggtctggttgatggtctgaactttgctgctcagtatcagggtaaaaatgaccgcactgacgtaactgaagctaatggtgatggtttcggtttctccactacttatgagtatgaaggattcggtgtaggtgcaacctatgctaaatctgaccgcactaataatcaggttatctacggtaacaacagcctgaatgcatctggtcaaaatgctgaagtatgggcagctggtctgaaatatgatgcgaacaacatctatctggctaccacctattctgaaacccagaacatgactgtttttggtaataaccatattgccaacaaagcacaaaacttcgaagtagttgcacaatatcagttcgacttcggtctgcgtccgtccgttgcttacctgcaatctaaaggaaaagacttgggtgcgtggggtgatcaggacctggttgaatatattgatgtaggtgcaacctattacttcaacaaaaatatgtccacttttgttgattacaaaatcaacctgattgataagagcgatttcacgaaagcatctggcgttgctaccgatgatatcgttgctgtaggtatggtttaccagttctaa

SEQ ID NO: 485437 - DNA, 384 bp, Shigella sonnei
atgcgtgatattcagatggttcttgagcgttggggagcgtgggcggctaataatcatgaagatgtgacctggtcgtccattgccgccggttttaagggattaattacttcaaaagtaaaatctcgcccgcaatgttgtgacgatgacgcgatgattatttgcgggtgcatggcccgtctgaaaaagaacaacagcgatttgcacgatttattagtagattattatgtagtcggtatgacattcatgtcactggcaggtaagcattgctgctctgatggttatatcgggaaaaggttacagaaggctgagggcataattgaagggatgttaatggcattagatatccggttagagatggatatcgttgttaataactctaattaa

SEQ ID NO: 485438 - DNA, 363 bp, Shigella sonnei
gtgaatacctacagcatcacattaccctggcctccgagcaataaccgctattaccgccataatcgcgggcgcacacacatcagcgcagaagggcaggcataccgcgataacgtcacccgaatcattaaaaacgcaatgctggatatcggcctggctatgccagtgaaaatccgtattgagtgccacatgccggatcgccgtcgccgtgacctggataatctgcaaaaagccgcttttgacgcactcaccaaagcaggtttctggctggatgatgctcaggtcgttgattaccgcgttgtgaagatgcctgttaccaaaggtgggaggctggaactgaccatcaccgaaatggggaatgaatga

SEQ ID NO: 485439 - DNA, 291 bp, Shigella sonnei
atggctgatttgagaaaagcagcgcgtggtcgggaatgccaggtaagaatccctggcgtatgtaatggcaatcctgaaacgtcagtactggcacatatccggctggctggattgtgcggtaccggtatcaaaccgccagacctgattgccaccattgcatgttctgcctgtcacgacgaaatcgaccgccgcacatattttgtcgatgctgagtatgcaaaagaatgcgcgctggaaggtatggcgagaacgcaggttatctggctgaaagagggggttattaaggcgtga

SEQ ID NO: 485440 - DNA, 171 bp, Shigella sonnei
atggctacaccgcttattcgtgtcatgaacgggcacatctacagagtatcaaatcgtcgtaagcgtaagcctgagctgaagccatccgaaataccaacactgctcggatataccgctagcctggttgataaaaaatggttgcgactggcagcaaggaggaatcatggctga

SEQ ID NO: 485441 - DNA, 456 bp, Shigella sonnei
atgactctgccagtagacggcatcaaactccatcgcggtaacttcgcggccatcggccagcagattcagccattgctggatgccgggcaatgcttacgcctgcaggttaagccgtggcgcgagaagcgcagcctgtcgcagaacgcgctcagccacatgtggtacacggagatcagcgaatatctcatcgcccgcggcaagaccttcgctacgcctgagtgggtcaaagacgcgatgaagcacacctatctcggctacgaaagcaaagaccgtgtagatgtcgtgtccggcgaggtcaccaccgtccaatccctccgccatacgtcagagctggaaaccggcgagatgtacatcttcctgtgcaaagtcgaagcctgggcgatgaatatcggctgccacctgacaattccgcagagctgtgaataccagcagctgcgcgataagcaggaggcgtaa

SEQ ID NO: 485442 - DNA, 378 bp, Shigella sonnei
atgaccaacaaagaaaacaaagataaatatattaacaagttcaagaaagagctttcaaaatatatacaaccaactgctggagtggacattcaattatttaactctaaggatggtggtggtgtaattaaagccactttgaatagaagtggaaaaagaaaatcatctattgctggtaattttactaaattaggtgaggcaattacctcgagtgggcagagggtttttggtggtgatctatcaaatgtgaatttttacggaacaaatacgatttttgatggagatacaatatttttaattaaatcacctgattcagaggagtggtcatcacaaaaagcttccaaagacgtagagggcatcgtatttggagggaaaaaatga

SEQ ID NO: 485443 - DNA, 354 bp, Shigella sonnei
atggcacatatacaactggtcaaacaaacctcttccggattacttctcccggcgacgccggagagttgcgattttctgcatcaaatcaaaataggtgagtggatacacgcagactttaagcgtgtgtgtaactacgcattccacaagcgttttttcaaactcctgcaactgggtttcgattactggactccggtcggtggggcgatcacgcctcgcgaacgaaaactggtgtccggtttcgttgattacctgtgtgaatcagtaggccgggaacatacgccagctctgagcgaagccgcagagcaattgaggtgtactggcaatagcggacactaccatttgttctttttttaa

SEQ ID NO: 485444 - DNA, 288 bp, Shigella sonnei; identical to SEQ ID NO: 461426

SEQ ID NO: 485445 - DNA, 213 bp, Shigella sonnei; identical to SEQ ID NO: 461425

SEQ ID NO: 485446 - DNA, 666 bp, Shigella sonnei; identical to SEQ ID NO: 474531

SEQ ID NO: 485447 - DNA, 357 bp, Shigella sonnei
atggaaataaaaccagaagatgagttaagcaatatcgttttatttccggtaaaagaggatgaccctcgtaatcaggttaattttctttatgagccatcggaaagaccatattgccatcacgcctctgtacgggttgacgaaaaagagcgtcaggtccgctgtaaaatctgcggtgcggttgtggagccgtttgactggatgctctctgtggcaaaaagagaaaccagactggcagatgatgtaaggctattgcgccaggaggaacaggaaaggcggagaaatatagaaaagctgatacagattgagcgtaacgcgaaagcgcggatacgcagggcgacaaaatccagaactgaataa

SEQ ID NO: 485448 - DNA, 423 bp, Shigella sonnei
atggcgaaaccttttactcccgaacagcgggaagaactgaagacgcgaattgtggaactcgtgcatcaggacggtcgggtcacgattcggcagttgtcagatgaaacaggtatcagtcgtgcgtctgtcggtcgcttatgcatagaactggtcgcaagtggtgatgtatataattctggctacggcttattcccgtctgaacaggctcgcaaggactggcaaagcgcccgcaaaaaactctcgagagtaaaggtgaggaaaccggttgttgttgatccggaccttatctggtcattacctgacggagaaatacgccgctacgacaggcgcctgaatataatctgtcgcgagtgccggaagagcgaagctatgcagcgtgtactggctttctatcagggtaattttcaggaggcgatactgtga

SEQ ID NO: 485449 - DNA, 747 bp, Shigella sonnei
atgaaaaatattgcgacaggcggcgttctggaacgcatccgccgactgaccccgccacatgtaaccgccccattcagaacggtagcggagtggcgcgagtggcaacttgctgaaggccagaaacgtagcgaggagatcaaccgcctgaatcgccagttgcgggtggaaaaaattctgaatcgctcaggcatccagccgttgcaccgtaaatgctcgtttgcgaattaccaggtgcagaacgacggccagcgatacgcgttaagccaggcgaaatccatcgccgatgaactgatgaccgggtgtacaaattttgcgttcagcggaaaacctggtaccgggaagaatcacttagcggcagctatcgggaatcgcctgctgaaagacggtcagacagtgattgtggttaccgtggctgatgttatgagcgccctgcacgccagctatgacgacgggcagtcaggcgaaaaatttttgcgggagctgtgcgaagtggatctgctggttcttgatgaaattggcattcagcgcgagacgaaaaacgagcaggtggtgctgcaccagattgttgatcgccggacagcgtcgatgcgcagcgtggggatgctgacaaacctgaactatgaggtgatgaaaacattgctcggcgagcgggtgatggatcgcatggtcatgaacggcgggcgctgggtgaattttaactgggagagctggcgtccgaatgttagccattcgagggttgttaagtag

SEQ ID NO: 485450 - DNA, 627 bp, Shigella sonnei
gtgcattatcagttcctcgaaaacgatgatttcagtttcggcctgaccggcggtttccgtaattatggttatcactacgttgatgaaccgggtaaagacacggcgaatatgcagcgctggaaaatcgcgccagactgggatgtgaaactgactgacgatttacgtttcaacggttggttgtcgatgtataaatttgccaacgatctgaacactaccggttacgctgatacccgtgtcgaaacggaaacaggtctgcaatataccttcaacgaaacggttgccttgcgagtgaactattatctcgagcgcggcttcaatatggacgacagccgcaataacggtgagttttccacgcaagaaattcgcgcctatttgccgctgacgctcggcaaccactcggtgacgccgtatacgcgcattgggctggatcgctggagtaactgggactggcaggatgatattgaacgtgaaggccatgattttaaccgtgtaggtttattttacggttatgatttccagaacggactttccgtttcgctggaatacgcgtttgagtggcaggatcacgacgaaggagacagtgataaattccattatgcaggtgtcggcgtaaattactcgttctga

SEQ ID NO: 485451 - DNA, 999 bp, Shigella sonnei
atgtcccctactatttatgatattgccagggttgcaggcgtatcaaaatccaccgtatcacgcgtgctgaataagcaaactaatatctccccggaagcgcgcgaaaaagtgttacgggccattgaagaattacagtatcagccaaacaagctagcccgcgcgctgacctcttcgggttttgatgccattatggtgatttctacccgttcgaccaaaactacggcgggtaatccgtttttctctgaagttttgcatgccatcaccgccaaagctgaagaagaaggtttcgacgtgatattgcagacgtcgcacaacccggcagaagacttacaaaaatgtgaaagcaaaattaagcagaaaatgattaaaggcattattatgctaagttcgccagcggatgagtcattttttgcccaactcgataaatacgatattccggtggtggtgattggcaaagttgaaggtcaatatgcccatgtttattctgtcgataccgataattttggcgacagcattgcgttgaccgatgcattaattgaaagtgggcatcaaaatattgcctgcctgcatgctccgcttgatgtccatgtttcagtggatcgggtaaatggttataagcagagcctggctgcgcataatattgcagtgcgtgatgaattgattgttgacggtggttatacccatgaaacagcactgcaagccgcgagagaattattaagccagtcaccgttgcctgaggcggtgtttgccactgacagtctgaaattaatgagtatttatcgtgcggcagcagagaaaaatattgctattccgcagcagttagcggtggtgggttatagtaatgaaacgctgtcgtttatattaacgcctgcaccgggcggcatcgatgttccgacgcaggagttaggtcaacaaagctgcgagttattattccgcttaatttctggaaaaccgtcaccacagaatattaccgttgccacgcatatgacgctgaaataa

SEQ ID NO: 485452 - DNA, 1398 bp, Shigella sonnei
atgaagcgacttaaaaatgaacttaatgcgctggtgaatcggggtgtcgacagacatctgcgcctcgccgtaaccggactaagccgcagcggcaaaacagcgtttatcactgcgatggtcaatcagttgctcaatattcacgccggagcacgcttgccgctgttaagcgcggtgcgtgaagagcgcctgctgggcgtaaaacgcattcctcagcgtgactttggcattccgcgcttcacctatgatgaaggactggcgcagttatatggcgatcctcccgcctggccgacgcctacgcgcggcgtcagtgaaatccgcctggcgctacgttttaaatcgaacgattcgctgctacgccacttcaaagacacctccacgctgtatctggagattgtggattatcccggcgaatggttgctcgacctgccgatgctggcgcaggactatttaagctggtcacgccagatgacgggcttactcaatggtcagcgcggcgaatggtcggtcaaatggcgaatgatgtgcgaagggctggacccgctagcacctgccgacgaaaaccggctggcagacattgccgccgcgtggaccgattatctccaccactgtaaacagcaggggctgcactttattcagccagggcgctttgtcttgccaggagatatggcaggtgcgcccgcgctgcaattcttcccgtggccggatgtcgatacctggggcgagtccaaactggcgcaggccgataagcacaccaatgccggaatgctgcgcgagcggtttaattattactgcgagaaggtggtgaaggggttctataagaatcattttctgcgctttgaccgccagattgtgctggtggattgcctgcaacctctcaacagtgggccacaggcatttaatgatatgcgtctggcactgacgcagctgatgcaaagtttccactacgggcagcgcacgctctttcgccgcttattctcgccggttatcgacaaactgctgtttgccgcaacgaaagcggaccatgtaacggtcgatcagcacgccaatatggtttcattactgcaacaactgattcaggatgcctggcaaaatgcggcgtttgaagggattagtatggattgcctggggctggcctcggtgcaggcgaccaccagcggcattattgatgtcaacggcgagaaaattccggcattgcgcggtaatcggctcagcgatggtgcgcctctcaccgtttaccccggtgaagttcctgcgcgtttgcccggtcaggcgttctgggacaagcaagggttccagtttgaagcgtttcgcccgcaggtgatggatgtcgacaaaccgctgccgcatattcgtcttgatgccgcgctggaatttttaataggagataaattgcgatga

SEQ ID NO: 485453 - DNA, 1062 bp, Shigella sonnei
atgaccgaaccgttaaaaccacgtattgatttcgacggtccgctggaggtcgatcagaatccaaaattcagggcgcagcagacctttgacgaaaatcaggcgcaaaattttgccccggccacgctcgatgaagcgcctgaagaagaggggcaagttgaagcggtaatggatgcagcgttacgtccgaaacgcagcctgtggcgcaaaatggtgatgggcgggctggctctgtttggcgcaagtgttgtcgggcagggtgtacagtggacaatgaatgcctggcaaacccaggactgggtagcgctgggtggatgtgccgctggggcattgattatcggcgctggcgtaggttctgtggtaacagagtggcagtgcttatggtgcttgcgacagcgcgcccatgaacgcgacgaagcgcgtgatttattgcatagccacggcacgggcaaaggccgcgcattttgcgaaaaactggcgcagcaggcgggtattgatcagtcgcatccggcgctgcaacgctggtatgcctcaatccatgaaacgcaaaacgaccgtgaagtggtcagcctgtatgcgcatttggtccagccagttttagatgcccaggcgcggcgcgaaatcagccgttcggcggcggaatcaacgttgatgattgcggtcagcccgctggcgttggtcgatatggcgtttatcgcctggcgcaatctgcgtttaattaatcgcatcgccacgctgtatggcattgaactggggtattacagccgtttgcgtctgtttaagctggtattgctgaatatcgcttttgccggagccagcgaactggtgcgcgaagtggggatggactggatgtcgcaagatctcgctgctcgtttgtctacccgcgcagctcaggggattggtgcaggacttctgacggcacgactcgggattaaagctatggagctttgccgcccgctgccgtggattgacgatgacaaacctcgcctcggggatttccgtcgtcagcttatcggtcaggtgaaagaaacactgcaaaaaggcaaaacacccagcgaaaaataa

SEQ ID NO: 485454 - DNA, 759 bp, Shigella sonnei
atgagccaaattttactgcaacctgctaacgcgatgattacgctggaaaacgtcaataaatggtatggacaattccatgttttgaaaaatataaatttaaccgtgcaactgggagaacggatcgttctgtgtggcccttctggttccggtaaatcgacaaccattcgttgtattaatcatctggaagaacatcaacagggacggatcgtagtagatggcatcgaacttaatgaagatatccgcaatattgagcgcgtcaggcaggaagtgggaatggtctttcagcatttcaatctcttccctcatctgaccgttctacagaactgtaccctggcaccgatttgggtacgcaagatgccaaagaaagaggctgaagctctggcgatgcattaccttgagcgggtgagaattgccgaacatgcgcataagtttcccggacaaatttctggtggtcagcagcaacgcgttgccattgcgcgttcgctgtgtatgaagccgaaaattatgttgtttgatgagccaacgtcggcgctcgatccggagatggtgaaagaggtgctggatacgatgattgggctggcgcaatcgggtatgacaatgttgtgtgtaacgcatgagatggggtttgcgcgaaccgtcgctgaccgggtgatttttatggatcgtggggaaatagtggagcaagctgcacctgatgaattttttgcgcatcctaaatcagagcgtacgagggcatttttatcgcaggtaatccattaa

SEQ ID NO: 485455 - DNA, 1104 bp, Shigella sonnei
atgacaaaagtattgctgtctcagccctcgcgcccagcgagccataactcaagccgcgcgatggtgtgggtgcgaaaaaatctgttctccagctggagcaatagcctgctgactattggctgcatatggttgatgtgggaactgatcccaccgttgctgaactgggcatttttgcaggctaattgggttggctcaacgcgtgccgactgcacaaaagccggtgcctgttgggtcttcatccacgaacgatttggtcagtttatgtatggactttacccacacgaccaacgctggcgaattaacctggcattactgattggccttgtgtcaatcgcaccaatgttctggaaaatactcccgcatcgcggtcgctatattgcggtctgggcggtgatttacccactgattgtctggtggctgatgtatggcggtttttttggtctggagcgggttgaaacccggcaatggggcgggctgacgctaactttaattattgcatccgttgggattgcgggggcgctaccgtgggggatcttactggcgttaggtcgccgctcccatatgccgattgtgcgtatcttatcggtcatttttatcgagttctggcgcggcgtaccgctgattaccgtattgtttatgtcttcggtcatgctgcctttgtttatggcagaaggcaccaatatcgacaaactgatccgcgcgctggttggcgtgatcctgtttcagtcagcatatgttgcggaagtcgtgcgaggcggattacaggcgctgcctaaagggcaatatgaagcggcagagtcactggcattgggttactggaaaactcaggggctggttattctgccacaggcgttgaagctggtaattcctgggctggtaaataccatcatcgcactcttcaaagataccagcctggtgatcattatcgggttgttcgatcttttcagtagcgttcagcaggcaaccgttgatcccgcctggttgggtatgtcgacggaagggtatgttttcgccgcactgatctactggatcttctgtttcagcatgtcgcgctatagccagcatctggaaaaacgttttaacaccgggcgtacaccgcattga

SEQ ID NO: 485456 - DNA, 234 bp, Shigella sonnei; identical to SEQ ID NO: 461299

SEQ ID NO: 485457 - DNA, 924 bp, Shigella sonnei
atgtctcatcgccgctcaaccgttaaaggctcactctcttttgccaaccctacggttcgtgcctggttattccagatccttgccgttgttgctgttgtcggcattgttggttggttatttcacaacactgtaacgaatctcaataatcgtggcattacttcaggttttgcctttctggatcgcggcgctggcttcggtattgtccagcatttgatcgattaccagcagggcgacacctacggacgcgtttttattgtcggcttactcaatacgctactggtttctgcattgtgtattgtgttcgcttctgttttgggcttctttatcggtctggcgagactttcggataactggctgctacgaaagctttccacaatttatattgagatcttccgtaatattcccccgctgctgcaaatcttcttctggtactttgccgtgttgcgcaatttgcccggaccacgccaggctgtgagcgcgtttgatctggcctttttgagcaatcgtgggctttatattccgtcaccgcagctgggagacggatttattgcgtttatcctggctgttgttatggctatagtcctttctgttgggctattccgctttaataaaacataccagataaagaccggacaactgcgccgcacctggccgatcgccgcagtgttgatcattggtttgcctttactggcgcaatggctttttggcgcagcactacactgggatgtcccagccctacgaggctttaacttccgcggcgggatggttttaattcctgaactggcagccttaacgctggcactttcggtttatacatctgcatttatcgccgagattatccgcgctgggatccaggcagtgccttatggtcaacatgaagcggctcggtcactgggattacccaacccggttacgctacgctag

SEQ ID NO: 485458 - DNA, 1026 bp, Shigella sonnei
atgaaaaagatgatgatagccacactggctgccgccagcgtgctgcttgccgttgcaaatcaggcgcatgctggcgcgacgcttgatgccgtacagaaaaaaggttttgtgcaatgcgggatcagtgatggattacctgggttctcttatgccgatgcagacggtaagttttcaggtattgatgtagatgtttgtcgtggtgttgccgctgctgtatttggtgacgacacgaaagtgaaatataccccgctcactgcaaaagaacgcttcaccgctttacagtcaggggaggtggatttgctctcccgtaatacgacctggacttcatctcgcgatgccgggatgggaatggcatttactggcgtcactgattacgacggcattggcttcctgacgcacgataaagcggggctaaaaagcgcgaaagaactggatggcgctaccgtctgtattcaggcgggtacagataccgaactcaacgtcgccgactatttcaaggcaaacaatatgaagtacacaccggtgactttcgatcgctctgacgaatcagcgaaggcactggaatctggtcgctgcgatacgctggcctcggatcagtcgcaactgtatgccctgcgcatcaaattaagcaacccagctgaatggattgtcttaccggaggttatctctaaagaaccgcttgggccggtagttcgtcgtggcgatgatgaatggttctcgattgtacgctggacgcttttcgccatgctgaatgctgaagagatgggcatcaattcccagaacgtcgatgaaaaagcggctaatccagcaacgcctgatatggcacatctgctgggtaaagaaggcgattacggcaaggatctgaagctggataataaatgggcctataacatcatcaaacaggtgggtaactactcggaaattttcgagcgtaacgtaggttcagaaagcccgctgaaaattaaacgtgggcaaaataatctctggaataacggcggtattcagtacgcgccgcccgtgcgttaa

SEQ ID NO: 485459 - DNA, 411 bp, Shigella sonnei
atgatgattaatgttaacgggcgacccgtgtcgaccggggcttcgatcgaccttctgacgcgtgctgtgattatttcgctttttacatggcggcgtgccgggcgtgatgatgcaccacggatatttggatggtggggggatacctggcctgcggttcagaatgatcgcacggggtcgcgtttgtatctgttgcgacgcagcaagctgacaaataaaaccccgcagcttgccagagattatgtccgtgaggcgctggcgtggatggtggaggatggtgttgcttcccgtcttgatattaacgctgtccggaccgggacagactcgctggcacttgccattaccatttaccagcgtgacggcaatattcacaacattatttttgatgatatctggagtgaactgaatggctga

SEQ ID NO: 485460 - DNA, 534 bp, Shigella sonnei
atgaacgggttttctcttcgtaatctgatttcccgggctgtcatcacggcggtggattccgccagaaagtgtcagtctgtagggttgaaaatgatagccggagatcagaaacaacacgttgagcaccttgaaccttatggttttacatctgccgcacagaacggtgctgagggcgttgctttatttccggcgggcgatcgttctcatggtgtggttgtggtcgtggctgacagacgttaccggctgaaaggactgaaacgtggggaagtggcgctttatgacgatctgggacagtccgttgtcctgacccgttccggtattgtggtggacggggccgggaaggccataatttttaaaaacgcgcctaaagcgcgctttgaaatgccagtcgaatccaccgccgatattactgacaattgcgacagtggcggactcagcatgcagcaaatgcggcaggcctacaatgcccacaaacataccgaaaatggtgatggtggcgggatcactgacacgccggatcaaccgatgggctga

SEQ ID NO: 485461 - DNA, 1101 bp, Shigella sonnei
atgaatgataccgttttacttcgggtttccggtcgcgaatggggcggctggacatccgtccgtatcagtgcgggcattaaccgtattgcccgggattttaatgttgccattaccacccgctggcccggaagccgggattatcaaccccggataaaaaatggtgagctggttgaagtgcttatcggggatgagcctgtgctcaccggatatgtggaggcactaccgcttcgttatgacgccagcagcgtcagcatgggaattgtcgggcgaagcaaaacagccgatctggttgactgctctgctttgccactccagcagagcggaaaaaacctgctcagaatagtcagtgaactggctgcgccatttggcatcaccgttgttgatgctggcgtgccgcagacagcggtgattgatgcccagccggaacacggcgaaaccgttgccgattgtcttaaccggttactggggcaggttcagacgctggcttatgacgatgaatgcgggcgactggttctgggaaaacccggaacaggtaaagcggcgacggcgctggtgctggtgctggtgctggtgctggtgctgggagagaatattctttcctgtgacacggaaagaagcatcagagagcggttttctgaatatcaggtcagtgggcagcgcccgggcaacgacgatgattttggtgaggccaccattgccgcaatacgtcagaccattcaggacagtggcgtgacccgttatcgccctttgttgattcagcagtcaggcacagcaacgacagcaacctgtaaggcccgttgtgaatttgaagcgcgccaacgggctgcgcttacccgtgagacaacatatacggttcagggctggcggcagggcagtggcgcgttatggcgtccggggttatctgtcatcgttttcgacccgctgaataattttgataatgatgaactggtgatcgcagaagttacctataaccaggacgaccggggcacgacgactgaattacgggttggcccggcagatgcttatctccccgagcctgttaccgccaggaagaaaaaaatgttgaggaggatttctgatgaacgggttttctcttcgtaa

SEQ ID NO: 485462 - DNA, 1392 bp, Shigella sonnei
atggacttaccttctttaccttctctttcttcactcttttctgcatcttcaggtatcaattggcgcgataatctttacgacgcttcatttcgtggcgttccgttttcggtggagagcgacgagggttcgttcggacgccgcgttcaggtccatgaatacccaaaccgtgacaaaccgtacacggaagatctcgggcgtgccacgcgacggctgacgattaatgcgtatctcgttggtgatgattacgcagagcagcgcgacaggctgattacagcgattgaaaccgccgggccggggacgctgatccatccgcagttcggtgaaatgcagggctgtattgacgggcaggtgaccgtttctcactccggcactgaaggccgtatgtgccgggtttcatttcagtttgttgagagcggggaactgtcatttccggtcgccggagctgcaaccgccagaaaactggaggagtcgtccgtattcctggatgagttgattgaagacatgttcggcgattttgatctcgcgggaataccggactttattcagaacgatgttattgcccggacgaccgatatgctgggaaccgttcagacagctttcaaaatggttaattcggctgtttctgccggagcgagactactgcagggcgatttatccgtcattctgatgccgccgtcggttgccagtgattttgtgcatacgttgcaggatacctggcgggccggaacccggctggtggataacacacaggatctggtgcagtccataacgacaatgtccggcattacgctggacccaggactggcaccgcgtgcggtgtggcccacagattccgcatcggttatcaggcaaaaacagcagacaaaccttgtggctgctgtcatccggacgacggcaatcagcgaagccacaagggcggtcacttcactgccacaacccggaagcctggtgaaaaatcagcaggcggttgtggctgttggtggttccactgaacgtcagtccgatattattcacgtttctcatccggcacttgacagcgtggcagccagcacaggacaggatgagagagcgcaaccacccacgcgggaaaatctcaccatcatacgcaaatcgctgaacgcggcgattgaacaggagctcaggcgtacggcggatgacaggctgttttttcagctgacgtcattacgtacagaactgaaccgggatattcaggcgcgtctggttcagacggaggaaaccgcagagcgaacgccagcggaagttctgcctgcgcttgttctggctgcgtcatggtacgacgatgcgtcccgtgaaactgatatcctggatcgaaatgccatctctcatccgggctttgttccggtcagggcattaagggtacccgtcagatga

SEQ ID NO: 485463 - DNA, 390 bp, Shigella sonnei
atgaacaacaataacacattgtacgtcgggttagatgttcacaaagaatcgattactgtcgcttatgctatcaattcagaacctgttgaactgatgggtaaaattggcacatcacctactgatattcagaatctttgtaaacgtctcaggtcaaagtcatcgcaggtcagtatcgtttatgaagcggggccctgtggttatggactttatcgccggctggtgaaatccggttttgactgcatggtctgcgccccctcacttatcccgaaaaaaccgggggagcgggttaaaaccgatcgccgtgatgccatcagacttgtgcgttcactgcgtgcaggagtgtcaacgccacgatgtttgaccgttatttgccattttcatgcccgctaa

SEQ ID NO: 485464 - DNA, 1167 bp, Shigella sonnei
gtgaaacatctgcatcgattctttagcagtgatgcctcgggaggcattattcttatcattgccgctatcctggcgatgatgatggccaacagcggcgcaaccagtggatggtatcacgactttctggagacgccggttcagctccgggttggttcactcgaaatcaacaaaaacatgctgttatggataaatgacgcgctgatggcggtatttttcctgttagtcggtctggaagttaaacgtgaactgatgcaaggatcgctagccagcttacgccaggccgcatttccggttatcgccgctattggtgggatgattgttccggcattactctatctggcctttaactatgccgatccgattacccgcgaagggtgggcgatcccggcggctactgacattgcctttgcacttggtgtgctggcgctgttgggaagtcgtgttccgttagcactgaagatctttttgatggctctggctattatcgacgatcttggggccatcattatcatcgcattgttctacactaatgacttatcgatggcctctcttggcgtcgcggctgtagcaattgcggtactcgcggtattgaatctgtgtggtgtacgccgcacgggcgtctatattcttgttggcgtggtgttgtggactgcggtgttgaaatcgggggttcacgcaaccctggcgggggtaattgtcggcttctttattcctttgaaagagaagcatgggcgttctccagcgaagcgactggagcatgtattgcacccgtgggtggcgtatctgattttaccgctgtttgcatttgctaatgctggcgtttcactgcaaggcgtcacgctggatggcttgacctccattctgccattggggatcatcgctggcttgctgattggcaaaccgctggggattagtctgttctgctggttggcgctgcgtttgaaactggcgcatctgcctgagggaacgacttatcagcaaattatggcggtggggatcctgtgcggtatcggttttactatgtctatctttattgccagcctggcctttggtagcgtagatccagaactgattaactgggcgaaactcggtatcctggtcggttctatctcttcggcggtaattggatacagctggttacgcgttcgtttgcgtccatcagtttga

SEQ ID NO: 485465 - DNA, 900 bp, Shigella sonnei
atgtctcatatcaattacaaccacttgtattacttctggcatgtctataaagaaggttccgtggttggcgcagcggaggcgctttatttaactccacaaaccattaccggacagattcgagcgctggaagagcgcctgcaaggcaaattatttaaacgcaagggacgtggtctcgaacccagcgagctgggagaactggtctatcgctatgccgataaaatgttcaccttaagccaggaaatgctggatattgtgaactatcgcaaagaatccaatttattgtttgacgttggcgtggctgatgcactttccaaacgcctggtcagtagcgtacttaacgccgcagtggtagaaggcgagcccattcatcttcgctgcttcgaatccacccacgaaatgctgctggagcaattaagtcagcataaactggatatgatcatttctgactgtccgatagactctacgcagcaggaaggcctgttctccgtgagaattggcgaatgtggcgtgagtttctggtgtacaaatccaccaccagaaaaatcgttcccggcttgtctggaagaacggcgacttttgattcctgggcgacgttcaatgttagggcgcaaattgcttaactggtttaactcccagggattaaacgtagaaatcctcggcgagtttgatgatgccgcgttgatgaaagcttttggtgcgatgcacaatgcaatcttcgttgccccaacgctttatgcatatgacttttatgccgataaaactgtcgtagaaattggtcgcgtcgagaatgtgatggaagagtaccatgctatttttgctgagcggatgattcagcacccggcggtacagcgaatctgcaatacggattattctgcgctttttagtccagcggcgcgttaa

SEQ ID NO: 485466 - DNA, 960 bp, Shigella sonnei
atgaagtggcttttattaatcaccttgagtctatattcttttattgtgcaaagtgctccctgtgcattgaccaatgtcggggaacaacgtggaacatatatactcaagccactgagtatgaaaggtaatctcaccgccgaaaaaattgaaaacaccggaaatatcattgagtgtgcagacttacaagagacgaccaacgccattaaagttcattttttaacacagaacgctttaaggtttaaagtcggaagtcgtcattatattattaatttcccctttgaatctgacggtaaaaaaatagagcttccaggaaggtcatcttataatttagaagaaatgctatctgcgataaatttcaccattccatactctatcgcatctgtatcagatagttccaacaccgcagatatttttccaggaactccttttcctttgttgttcgaaattgaagtgagttcatgtacagggaataatactaattgtaatagcgtccgctttaattataatttaaatactattttacaggtaaatttaatgacctgtggttttgaagatcaatccatcgacactggacgatttgtactgtctcgtatcaataatgaaaattatcagtttcatcatataagatttgactgcatccagggcgagcaaggtgaattagtttttgaacccagtgatgttgaatattactttgaaccagtgacgatacaggagtcaggaaccagcatattaaaaaatgagttagaaaacagtgaggacggtgcgggtcaagtaggctttcaaccctccaatgatggtacgaatgaaatccagtatggtaaaagcaattactactcttttcagcatccccatgaaggaagtaatcagattcctctatttattcgcccgcgtacatatggaaataatgtctcaagcgggcaaataatgagccgagtcaaaatcgtggttatgtacaactaa

SEQ ID NO: 485467 - DNA, 804 bp, Shigella sonnei
ttggcagcatcacctgatattgccaaaacacgtcaccaaattaacttatcgaattcgacctcattttccaaagatggctattcctccaacaatactggaattactggcatagccggtgaacatgatcagttaaattatggtatatatgttaatcagcaacaacaaaataatgatacctcgcttggtacgaatttaagctggagaactcccatcgccataatagatggcagctatagtcattctaaaaacgcctggcaaagtggtggaagtattagtagtggattagttgtctggcccggtggtattaatatcactaaccagttatccgatacatttgcaattctggatgcgcctgggttagaaggtgcacatattaatggacaaaaatacaatcgaacaaacagcaaaggccaggttgtttacgacctgataatacctcatcgtgaaaaccatctggtacttgatatagcaaacagtgaaagtgaaacagaattgcagggcaatcgtcaaattattgcaccttaccgtggagcagtttcttatgtgcagtttacaactgaccaacgtaagccctggtatatacaggcactgcgtcccgatggttcgccattaacctttggctatgacgtactggatctccaggaaaataatattggagtcgttggccagggtagtcgcctttttattcgcgtagatgaaattcccactggaataaaagttgctctcaatgatgaacagaacttattctgtactattacttttcaacacgttatcgatgaaaacaaaacatatatatgccagtaa

SEQ ID NO: 485468 - DNA, 1950 bp, Shigella sonnei
atggctgacagttttcagctgaaggcgatcatcactgccgtggataaggtatcggcaccgctgaagggaatgcagcgccagctgaaaggttttaaaaaggagtttgccagcctgttactgggcgcagcgggtgccggaaccgcagtactgggggcgctggcgctcccggtcaaatctgccattgcccttgaatcaaaaatggcggatgtccggaaagtggtggatggtctggatacgccggaagcgtttaaggcaatgacggagcaggtgcgcgacctgtcaacagaactgcccatgtcggcggaaggtatcgccgaaattgtggcggcgggtggtcaggctggtatcgcccgtgacgagctgatgcagtttactgacgatgccgtgaagatgggcgtggcctttgacaccacggcagaagaatccggtcagatgatggcgcagtggcgcactgcctttaaactgacacagggagaggtggcagggcttgcggataagattaactatcttggtaataccggtcctgcaagtgcgaaaaagatttctgatgttgtgacccgtattggccctttaggcagtgttgcgggtgtggcctccggagagattgccgcaatgggggcaaccattgccggaatgggggtggagtcagaaattgctgcgacggggataaagaattttatgttgtcgctgacagcgagggattctgccaccaaatcgcagaaaaaagtgctccgctcgttgcgcattagcccgaaaaaactggcggcggatatgcagaaagacgcccgcggggccatgctgcacgtactggattctctggcaaaagtgccgaaagaaaaacaggctgctgtgctgaaagcgctgttcgggaaggaatccctgggggccattgcgccgctgctcacgaatctggatttgttgcgaaccaactttaatcgtgtggcggatgcgcagcagtatggcggctcaatgcagaaagaatatgccgcccgtgccgcgacgacagaaaatcagttgttgctgctgcagaaccagatcaatgcgatttcttccacgctgggggaaaccttcctgccttcactcaatgaaggcataaaagagatgaagccttttctggaagaagtgcgcacgtttgtcagagaaaatcctgaggtcgtaaaaaccatcgcgaaaactggtgcggcattactgacgatgggcgtggcgattggcacattgacacgcataacaaaaatcatgggtagcgtgatgaatatgacgccggcaaagggattaattgcgcttctcgtcggtggtgcatatctcataattgataactgggaaacggtcggtccggttgtgaaaaaagtctggcaggaggttgatcaggttgtcagagcaatggggggatgggaacaggcagtaaaaacaatagcaacggtttctgccctgtatattggtgtgaaggcggtggcaagtattcgtgcggcaacagtcgcccagaatcaatggacaacggcggcaggaaaaacagggctgaaattaaagggcctcggaaagatcagtctgattggtggattgcttgaactgggcatgatggcgcaggagtttgaaaaagcacatccctggcttgttaaaaattttgtggctgatgcactgaacagtggatttggtctgaatgataagttcgacgagtggggcaaacagttccatgattttgtctatgacatgaccggatggcagatgccacgtggtgatgggtatttatctcccgataaacgctacaccccgaatgtatcactggaaaggaatcagctgttaagccttgcatcttcaccggcaacccgcagcgaacttaaggtgacgtttgacaacgcgccgcctggaatgcgcgttatcgatttgccgaaaacaggcgatccctttatgaaaatcacccatgatgttgggtattctccatttaaaaggtga

SEQ ID NO: 485469 - DNA, 336 bp, Shigella sonnei
atggcaatgaacgttacagaaatagttttaaaaaaaccggtgacagcgcataacgaaatgctgcatgtgctggagttgcgcgagcccacgtatgacgaaatcgaggcgctgggttttcctttcattatttccggtgaaggcagtattaaactggacagccaggtggcactgaaatatatcccgttgctggcggggatcccgcgttcatcggcggcgcagatggcaaaactggatatttttaagaccagcatgcagatcctgcgtttttttacccagtcggagacgggaagcacctccggaaacgactctacaatgttgcctggttctggaaactga

SEQ ID NO: 485470 - DNA, 357 bp, Shigella sonnei; identical to SEQ ID NO: 474992

SEQ ID NO: 485471 - DNA, 1497 bp, Shigella sonnei
atgacgataagttttaatactgttccgtcgaatacgctggtgccgttgttctacgccgagatgaacaattctgcggcaaatacagcggtgaccagcgcgcctgcattactgatcgggcatgccagcaacgatgcagccattgaggttaacagcctggtgctgatgccatcggcagattatgcccgccagatttgtggggcggggagccagctggcgcgtatggtggaagtctaccgtcagacagatcctttcggtgaactgtatgttattgcagtaccggaagccagaggggcggcggcgacggtcagggtgacggttgccggagaagcagaggaaagcggcaccctgagtctgtatgtcgggcgctcccgtgtacaggtgcctgtggtgaatggcgatgatgccactgcggttgccaccgcgattaaggaagcggtaaacggggttatcaccctgccgtttacggcgtcatctgatgcaggtgtggtgacgctgactgcccgtcataaggggctgtatggtaatgagttaccggtctgtctgaattattatggttctggtggtggtgagattctgccagcagggcttcgggtggtgacggaagtcggtgctgccggtagcggagcgcctgatcttaccgccgctgttgctgctatgggcgatgaggcattcgactttatcggtctgccgttcaacgatgccgcctccatcaatatgatgatgaccgaaatgaatgacagcagcggtcgctggagttatgcgcgccagttatacgggcatggctataccgcaaaactgggaacgctgtcagagctggttggtgccggagatatgcataatcagcaacatatcacgcttgccggttacgaaaaagaaacccagtcgcctgtcgatgaactggttgccagtcgccttgcccgtgaagcggtatttatccggaatgatcctgcccgtccgacacagacgggggagctggtggggatgcttccggcaccgaaaggtaagcgattcatcatgacagagcagcagacccttttatctcacggcgtggcgacggcttatgtggaaggcggcacgttgcagatccagcgttccgtaaccacctacaaaaagaatgcgtatggcgtggcagacaacagctatctggacagtgaaactctgcataccagtgcatatgttcttcgcaaactgaaatcggtcatcacaagcaagtacggacgtcacaagctggcaaatgatggtacccgttttggtccggggcaggcgattgtcactcctgccgttatcaaaggggaacttctggcgacatatcgtcagatggagcgtgccggtattgtggaaaattacgatctgtttaaacagtatctgatagttgagcgtgatgcagataacccgaaccgactgaatacgctgttcccgccggattatgttaatcagttacgtgtctttgcggtggttaaccagttccgtcttcagtattcagaggagtcagcataa

SEQ ID NO: 485472 - DNA, 1479 bp, Shigella sonnei
atgttagttagtaaaagcaacgaatttaacactagctcatttatagatagtggaaattgtaatgaaagaaaatcttctgaatccatggagctactagcttatagtattataaatttaatttgtaaggaagctgcctcagggacgtatcgcggtgctcttgaaactttacaaaaaatgatgtctgaatgtatatatcatgaaggcaacgcctttgtcattatgggatctggagagcaattaaaacgtattaaatatgatgttgatgaaaataacttaaaagtattcaacgtatactttgataataatgaagagttagttactgatggtgagcctgacgtagtatgtttaagcaagcaggtctgggaagatcttctcattaaactaaagctggagaacaaagaaaatgcggtttctgaaactgacctgtcatcgaataaaaataatgttgatcagtttattgaatgcgctaagagaaatgaacagaccctattcgataatataagaaaaagtgattttcatgttgattcatttaagccaggtagtacacgtagtgttattttagaaacacaaccaaatgtctgtatggaaccacataatttatatgacaaccaaatagataaggtttcacctgtaactaaaaattctcagcaagttaaaggccactatggagataaatttaaagaaatgcagatgttccttaaccagatgagcaatgcacttcaacagactccatctttgtcagagtcaaaggaacacaccatagatattcaaaaaataacggatgcctttgtgaaagaattccggggggtattaattgataaaaatgggaattgttcagaacgtttattcaatttttatgagtgctgctataagtttttaccaagagcgcagcctcaagataaaatcgaaagctataattcagcactacaagctttttccatctttcgttcatctactttgaataataatgatgtagggtttaattttaaattattcccagaagtcaagctgtctggtgaaaatcttgaaacggtattcaaatacaaaaaaggaagttttgtccgggagatagccagaattaacattactctccaaaaagaagaggatggtttatataatttaggtggattggattttaagggatgcttcttttctggacagaacttcagtaactatgatattcaatatgtgaactggagaacgtcattgtttgatcttgatactccgtgtatttttaatgcgcctgcttacaacaagagtaatgaaaaatcattaaaacctgtgagcgaaaacggtttaagtggagtcttgactgatcgtaataataaaataaaactcatcacgggcgtggcaccattcgatgatattttatttatggatgatgactttgatgatagttcctctgaggatgatcccgttgagaatagtcctgttgtgactagtcccgttgtatcaagttctaaaagcagttttcaatga

SEQ ID NO: 485473 - DNA, 1380 bp, Shigella sonnei
atgaacaggaccagtccccattattgtcgccgctcagtactttccttattgatatctgccttgatatatgccccgcccgtgatggcggcctttactactaatgttattggtgtggtaaacgatgagactgtagatggcaaccaacgagtagatgaacgaggtacaacaaataacactcatattatcaaccatggccagcagagtgtttatggcggagtatctaatggaagtcttattgaatctggtggatatcaagatgttggaaggaataacaattatatggggcagtctaataatacaaccattaacggaggaagacagacaattcatgacgggggcatttccaccggtacgataatcgacagtggcaatcaggacgtttatacaggcggtatcagcaatggaacgacaattaagggtggtaattcacacataagtggggggactgcgaatggaaccatcattgatggtggagggcagacagtaacaactcaggggcatgttgatggtacaacgataaataagtccggttatcaggacatcacgcaaggaagtatggcaacgaacacaatcataaatggtggacgacagtatgttgaacagagcacagtaggaacaaccaccattaaaaatggcggtgagcaaagagtatatgaaagccatgcgctggacacgacgattgaaggtggaactcagtctctgaataataagtcaacggcaaaaaatactcagatctattctggtggtacgcaaattgttgattacaccagctcctcggatgttattgaagtttattccggtggcgtgcttgatgttagtggtggtacggcaacaaatgttacccagcacgatggtgcaattttaaaaacaaacactaacggtacgacggtgagcggtacgaatagtgaaggtgcattctccatccacaatcacgtggcagacaatgtgttgctggaaaacggtggtcatttagacataaacgcatatggttcggcaaataagacgattattaaagataaaggaacaatgtcagttttaacgaatgctaaagctgatgcgacccgaatagataacggcggggtaatggatgttaccagaaacgcgaccaataccataatcaatggtggtacacagaatattaataatcatggtattgccacgggtaccaatatcaacagcggaacacaaaatatcaagagcggcgggaaagctgacacgacaaatatttccaccgggagccggcaggttgttgagaaagatggtacggcaactggcagcaatattagcgccggaggctcgctgattgtctataccggcggtatagcacatggggttaaccaggagacgggcagtgctttagttgctagactggccccctga

SEQ ID NO: 485474 - DNA, 129 bp, Shigella sonnei
atgggctggcaaaagtgtagcggtattaagcgcagctatttaggcttgctgatcccgcgcaacaaaacgccatgctttgctcgcagatggttggcaaccgacgacagtcctgctaaaacgttcgtttga

SEQ ID NO: 485475 - DNA, 1104 bp, Shigella sonnei
atgagtgacagccagacgctggtggtaaaactcggcaccagtgtgctaacaggcggatcgcgccgtctgaaccgtgcccatattgttgaacttgttcgccagtgcgcgcagttacatgccgccgggcatcggattgttattgtgacgtcgggcgcgatcgccgccggacgtgagcacctgggttacccggaactgccagcgactatcgcctcgaaacaactgctggcagcggtagggcagagtcgactgattcaactgtgggaacagctgttttcgatttatggcattcacgtcgggcaaatgctgctgacccgtgctgatatggaagaccgtgaacgcttcctgaacgcccgcgacaccctgcgtgcgttgctcgataacaatatcgttccggtaatcaatgagaacgatgctgtcgctacggcagagattaaagtcggcgataacgataacctttctgcgctggcggcgattctggcgggtgccgataaactgttgctgctgaccgatcaaaaaggtttgtataccgctgacccgcgcagcaatccgcaggcagaactgattaaagatgtttacggcattgatgacgcactgcgcgcgattgccggtgacagcgtttcaggcctcggaactggcggcatgagtaccaaattgcaggccgctgacgtggcttgccgtgcgggtatcgacaccattattgccgcgggcagcaagccgggcgttattggtgatgtgatggaaggcatttccgtcggtacgctgttccatgcccaggcgactccgcttgaaaaccgtaaacgctggattttcggtgcgccgccggcgggtgaaatcacggtagatgaaggggcaactgccgccattctggaacgcggcagctccctgttgccgaaaggcattaaaagcgtgactggcaatttctcgcgtggtgaagtcatccgcatttgcaacctcgaaggccgcgatatcgcccacggcgtcagtcgttacaacagcgatgcattacgccgtattgccggacaccactcgcaagaaattgatgcaatactgggatatgaatacggcccggttgccgttcaccgtgatgacatgattacccgttaa

SEQ ID NO: 485476 - DNA, 1254 bp, Shigella sonnei
atgctggaacaaatgggcattgctgcgaagcaagcctcgtataaattagcgcaactctccagccgcgaaaaaaatcgcgtgctggaaaaaatcgccgatgaactggaagcacaaagcgaaatcatcctcaacgctaacacccaggatgttgctgacgcgcgagccaatggccttagcgaagcgatgcttgaccgtctggcactgacgcccgcacggctgaaaggcattgccgacgatgtacgtcaggtgtgcaacctcgccgatccggtggggcaggtaatcgatggcggcgtactggacagcggcctgcgtcttgagcgtcgtcgcgtaccgctgggggttattggcgtgatttatgaagcgcgcccgaacgtgacggttgatgtcgcttcgctgtgcctgaaaaccggtaatgcggtgatcctgcgcggtggcaaagaaacgtgtcgcactaacgctgcaacggtggcggtgattcaggacgccctgaaatcctgcggcttaccggcgggtgccgtgcaggcgattgataatcctgaccgtgcgctggtcagtgaaatgctgcgtatggataaatacatcgacatgctgatcccgcgtggtggcgctggtttgcataaactgtgccgtgaacagtcgacaatcccggtgatcacaggtggtataggcgtatgccatatttacgttgatgaaagtgtagagatcgctgaagcattaaaagtgatcgtcaacgcgaaaactcagcgtccgagcacatgtaatacggttgaaacgttgctggtgaataaaaacatcgccgatagcttcctgcccgcattaagcaaacaaatggcggaaagcggcgtgacattacacgcagatgcagctgcactggcgcagttgcaggcaggccctgcgaaggtggttgctgttaaagccgaagagtatgacgatgagtttctgtcattagatttgaacgtcaaaatcgtcagcgatcttgacgatgccatcgcccatattcgtgaacacggcacacaacactccgatgcgatcctgacccgcgatatgcgcaacgcccagcgttttgttaacgaagtggattcgtccgctgtttacgttaacgcctctacgcgttttaccgacggcggccagtttggtctgggtgcggaagtggcggtaagcacacaaaaactccacgcgcgtggcccaatggggctggaagcactgaccacttacaagtggatcggcattggtgattacaccattcgtgcgtaa

SEQ ID NO: 485477 - DNA, 159 bp, Shigella sonnei
atgaaaaacattgcagcaatcaaacgtaataaccgcaagattcacgctcgtaagttcctgtctacgccagaaggaaaagcctggctagagcgtaaacagagagagaacgaagaaagaaaactccttagtgagttgaaatggcttagagaggatttctga

SEQ ID NO: 485478 - DNA, 171 bp, Shigella sonnei
atgttcggcaatgatattttcacccgcgtaaaacgttcagaaaataaaaaaatggcggaaatcgcccaattcctgcatgaaaatgatttgagcgttgacaccacagtcgaagtatttattaccgtaacccgcgatgaaaagcttatcgcgtgcggtggaattgccgggtga

SEQ ID NO: 485479 - DNA, 1659 bp, Shigella sonnei
atgttgcagcttaacgagaataaacagtttgcatttttccaaagactggcatttccgctgcgtatctttttgctgattctggtgttctcaatatttgtcattgtagccctggcgcaatattttacggccagttttgaggactatttaacgcttcatgtacgcgacatggcaatgaatcaggcgaaaattattgcctccaatgacagtgtcatctctgcggtgaaaacgcgtgactacaaacggctggcgaccatcgctaacaaattacaaagagataccgattttgattatgtggtgattggcgaccggcactcgatccgcctttaccatcttaatccggagaaaattggttatcctatgcagttcaccaaacagggcgcgctggagaaaggggagagctacttcattaccgggaaaggggcaatggggatggcgatgcgcgccaaaacgccaatctttgatgacgatggaaaagtcatcggcgtggtgtcgattggctacctggtgagtaaaatcgatagctggcgggctgagtttttattaccgatggcaggcgtgtttgtcgtgctgttagggattctgatgttgctgtcgtggttcctggccgcgcatatccgtcgacaaatgatgggcatggagccaaagcaaatcgcacgcgtggtccgtcagcaagaggcgctgtttagttcggtttatgaagggctgattgcggtggatccgcatggttacattaccgccatcaatcgtaacgcaagaaagatgctggggctgagctctcccggacggcaatggttgggtaaacccattgctgaagtggtcaggcccgccgatttctttaccgaacagattgatgaaaaacgtcaggatgtggtggcgaactttaatggtctgagcgttattgccaaccgggaagctattcgttcaggtgatgatttgctgggggccattatcagctttcgtagtaaagacgaaatttccaccctcaatgcgcaactgacgcaaataaaacaatacgtcgagagccttcgtacattgcgacacgagcatctcaattggatgtcgacgctcaatggtctgttgcagatgaaagagtatgatcgcgtgctggcgatggtgcagggggagtctcaggcccagcaacagcttattgacagcctgcgtgaggcgtttgccgatcgccaggtggcggggctgctttttggtaaagtgcagcgcgcccgcgaactggggctaaaaatgatcatcgtccccggtagccagctttcgcaactgccgccaggactggatagcaccgagtttgccgccattgttggcaatttacttgataacgccttcgaagccagcctgcgtagcgatgaaggaaacaagatcgttgaattattcctcagcgatgaaggcgatgatgtggtgattgaagtcgccgatcagggctgcggcgttccagagtctctaagagacaaaatatttgagcagggggtcagtacgcgtgctgacgagcccggtgaacatggcattgggttgtacttgattgccagctacgtaacgcgctgcggtggtgttatcactctcgaagataatgatccctgcggtaccttattttcaatctatattccgaaagtgaaacctaatgacagctccattaaccctattgatcgttga

SEQ ID NO: 485480 - DNA, 681 bp, Shigella sonnei
atgacagctccattaaccctattgatcgttgaggacgaaacgccgctggcagagatgcatgcggaatatattcgtcacattcccggattcagtcagatattactggcgggaaatctggcgcaggcccgaatgatgatcgagcgttttaagccggggctaatcttgctcgataactatcttcctgacggtagagggattaatttactgcatgaactggtgcaggcgcattatcccggcgacgtggtgtttaccactgcagccagcgatatggaaacggtgtctgaagccgtacgttgtggtgtatttgattatctcattaagcccattgcctatgaacggctggggcaaacgctaacccgtttccgccagcgtaaacatatgctggaaagtattgatagcgccagccagaagcaaattgatgagatgtttaatgcttatgctcgcggtgaacctaaggacgagctaccgaccggcattgaccccttgacgctaaacgcggtgcgaaaactgtttaaagagcctggtgtgcaacatacggcagaaacggtggcgcaggcactgaccatcagctgcaccactgccaggcgttatcttgaatattgcgccagccgccatctgattattgctgaaattgttcacggcaaagttggcagaccacaacgcatataccacagtgggtga

SEQ ID NO: 485481 - DNA, 1353 bp, Shigella sonnei
gtggttattgtgggtgtagctcgctacatcattaaagggtattccgccactggtgtgttatttgtcggtggcctgttattgctgattatcagtgccattatggggcacaaagtgttaccgtccagccaggcttcaacaggctacagcgccacggatatcgttgaatacgttaaaatattactaatgagccgcggcggcgacctcggcatgatgattatgatgctgtgtggatttgccgcttacatgacccatatcggcgcgaatgatatggtggtcaagctggcgtcaaaaccattgcagtatattaactccccttacctgctgatgattgccgcctattttgtcgcctgtctgatgtctctggccgtctcttccgcaaccggtctgggtgttttgctgatggcaaccctatttccggtgatggtaaacgttggtatcagtcgtggcgcagctgctgccatttgtgcctccccggcggcgattattctcgcaccgacttcaggggatgtggtgctggcggcgcaagcttccgaagtgtcgctgattgacttcgccttcaaaacgacgctgcctatctcaattgctgcaattatcggcatggcgatcgcccacttcttctggcaacgttatctggataaaaaagagcacatctctcatgaaatgttagatgtcagtgaaatcaccaccactgctcctgcgttttatgccattttgccgttcacgccgatcatcggtgtactgatttttgacggtaaatggggtccgcaattacacatcatcactattctggtgatttgtatgctgattgcctccattctggagttcctccgcagctttaatacccagaaagttttctctggtctggaagtggcttatcgcgggatggcagatgcgtttgctaacgtggtgatgctgctggttgccgctggggtattcgctcaggggcttagcaccatcggctttattcaaagtctgatttctatcgctacctcgtttggttcggcgagtatcatcctgatgctggtattggtgattctgacaatgctggcggcagtcacgaccggttcaggcaatgcgccgttttatgcgtttgttgagatgatcccgaaactggcgcactcttccggcattaacccggcgtatttgactatcccgatgctgcaggcgtcaaacctgggtcgtaccctatcacccgtttctggcgtagtcgttgcggttgccgggatggcgaaaatctcaccatttgaagtcgtaaaacgcacctcggtgccggtgcttgttggtttggtgattgttatcgttgctacagagctgatggtgccaggaacggcagcagcggtcacaggcaagtaa

SEQ ID NO: 485482 - DNA, 588 bp, Shigella sonnei
atgtctgataccaaacgtaatacaatcggcaaattcggcttgctctcgctgacttttgccgccgtttacagctttaacaacgttatcaataataatattgatcttggactggcctcggcaccgatgtttttcctcgcgacgattttttattttattcccttctgtctgatcatcgcagaatttgtttcgttaaataaaaactcagaagccggtgtctacgcatgggtaaaaagttcgctgggcggacgttgggcatttattactgcctatacctactggttcgtaaacctgttctttttcacctcactgttgccgcgcgttattgcttatgcttcgtatgccttcctcggatacgaatatattatgacgccggttgccaccaccattatcagtatggtgctgttcgccttctccacctgggtttccaccaacggggcgaaaatgttggggccaattacctccgtcacttcaacgctgatgctgctgttaacgctctcctacattttactggcaggtacggcgctggttggcggcgtacagcctgctgacgccatcaccgttgacgcgatgatcccgaacttcaactaa

SEQ ID NO: 485483 - DNA, 450 bp, Shigella sonnei; identical to SEQ ID NO: 261904

SEQ ID NO: 485484 - DNA, 2826 bp, Shigella sonnei
atgaatcgctgggaaaacattcagctcacccacgaaaaccgacttgcgccacgtgcgtactttttttcatatgattctgttgcgcaagcgcgtacctttgcccgcgaaaccagcagcctgtttctgcccttaagcggtcagtggaatttccacttttttgaccacccgctgcaagtgcctgaagccttcacctctgagttaatggctgactgggggcatattaccgtccccgccatgtggcaaatggaaggtcacggcaaactgcaatataccgacgaaggttttccgttccccatcgatgtgccgtttgttcccagcgataacccaaccggtgcctatcaacgtattttcaccctcagcgacggctggcagggtaaacagacgctgattaaatttgacggcgtcgaaacctattttgaagtctacgttaacggtcagtatgtgggtttcagcaagggcagtcgcctgaccgcagagtttgacatcagcgcgatggttaaaaccggcgacaacctgttgtgtgtgcgcgtgatgcaatgggcggactctacctacgtggaagaccaggatatgtggtggtcagcggggatcttccgcgatgtttatctgatcggaaaacaactaacacatattaacgatttcaccgtgcgtaccgactttgacgaagcctattgcgatgccacgctttcctgcgaagtggtgctggaaaatctcgccgcctcccctgtcgtcacgacgctggaatataccctgtttgatggcgaacgcgtggtgcacagcagcgccattgatcatttggcaattgaaaaactgaccagcgccagctttgcttttactgtcgaacagccgcagcaatggtcagcagaatccccttatctttaccatctggtcatgacgctgaaagacgccaacggcaacgttctggaagtggtaccacaacgcgttggcttccgtgatatcaaagtgcgcgacggtctgttctggatcaataaccgttatgtgatgctgcacggcgtcaaccgtcacgacaacgatcatcgcaaaggccgcgccgttggaatggatcgcgtcgagaaagatctccagttgatgaagcagcacaacatcaactccgtgcgtaccgctcactacccgaacgatccgcgtttttacgaactgtgtgatatctacggcctgtttgtgatggcggaaaccgacgtcgaatcgcacggctttgctaatgtcggcgatatcagccgtattaccgacgatccgcagtgggaaaaagtctacgtcgagcgcattgttcgccatattcacgcgcagaaaaaccatccgtcgatcatcatctggtcgctgggcaatgaatccggctatggctgtaacatccgcgcgatgtaccacgcagcgaaggcgctggatgacacgcgactggtgcattacgaagaagatcgcgatgctgaagtggtcgatattatttccaccatgtacacccgcgtgccgctgatgaatgagtttggtgaatacccgcatccgaagccgcgcatcatctgtgaatatgctcatgcgatggggaacggaccgggcgggctgacggagtaccagaacgtcttctataagcacgattgcattcagggtcattatgtctgggagtggtgcgaccacgggatccaggcacaggacgaccacggcaatgtctggtataaattcggcggcgactacggcgactatcccaacaactataacttctgtcttgatggtttgatctattccgatcagacgccgggaccgggcctgaaagagtacaaacaggttatcgcgccggtaaaaatccacgcgcgggatctgactcgcggcgagttgaaagtcgaaaataaactgtggtttaccacgcttgatgactaccccctgcacgcagaggtgcgcgccgaaggtgaaacgctcgcgacgcagcagattaaactgcgcgacgttgcgccgaacagcgaagcccccttgcagatcacgctgccgcagctggacgcccgcgaagcgttcctcaacattacggtgaccaaagattcccgcacccgctacagcgaagccgggcattctatcgccacttatcagttcccgctgaaggaaaacaccgcgcagccagtgcctttcgcaccaaataatgcgcgtccgctgacgctggaagacgatcgtttgagctgcaccgttcgcggctacaacttcgcgatcaccttctcaaaaatgagtggcaaaccgacatcctggcaggtaaatggcgagtcgctgctgacccgcgagccaaagatcaacttcttcaagccgatgatcgacaaccacaagcaggagtacgaagggttgtggcagccgaatcatttgcagatcatgcaggaacatctgcgcgactttgccgtagaacagagcgagggtgaagtgttgatcatcagccgcacggttattgccccgccggtgtttgatttcggaatgcgctgcacctacatctggcgcatcgctgccgatggccaggttaacgtggcgctttccggcgagcgttacggcgactatccgcacatcattccgtgcatcggtttcaccatgggaattaacggcgaatacgatcaggtggcgtattacggtcgtggaccgggcgaaaactacgccgacagccagcaggctaacatcatcgatatctggcgcagcaccgtcgatgccatgttcgagaactatcccttcccgcagaacaacggtaaccgtcagcatgtccgctggacggcactgactaaccgccacggtaacggtctgctggtggttccgcagcgcccaattaacttcagcgcctggcactatacctag

SEQ ID NO: 485485 - DNA, 660 bp, Shigella sonnei
atggatcgtattgttagttcttcacatgaccgtacatcactgcttagcacccataaggtgctgcgtaatacctattttctgctgagcctgacgctggccttttcggcgattaccgcaactgccagtacggtgctgatgctgccatctccgggtctgattctgacgctggtgggtatgtatggtttgatgttcctgacctataaaacggcgaataagccgaccgggattatctccgcattcgcctttaccggttttctgggttatatcctcggacctattctgaacacctatctgtctgccggaatgggtgacgtaatcgctatggcactgggcggaacggcgttagtgttcttctgctgctctgcatatgtgctgaccacccgcaaagatatgtcgttcctcggcggtatgctgatggcgggtattgtggtggtgctgattggtatggttgctaatatcttcctgcagctgcctgctctgcatctggcgatcagcgcggtcttcattctgatctcctctggcgctattttgtttgaaaccagcaacatcgttcatggcggtgaaacgaactatattcgtgccacggttagcctgtatgtttcgctgtacaacatcttcgtcagcctgctgagcattctgggcttcgccagccgcgattaa

SEQ ID NO: 485486 - DNA, 330 bp, Shigella sonnei; identical to SEQ ID NO: 458546

SEQ ID NO: 485487 - DNA, 279 bp, Shigella sonnei
atgtcgaaagtctgcataattgcctgggtttacgggcgagttcagggcgtaggatttcgctacaccacacagtacgaagcgaaaagactgggtttaaccgggtacgccaaaaatcttgacgatggcagcgtggaagtggttgcctgcggtgaagaagggcaggtggaaaaattaatgcagtggttaaagagtggcggcccgcgttctgcgcgtgtagaacgggtgctcagcgagccgcatcatccctcgggggaattaaccgattttcgtatccgttaa

SEQ ID NO: 485488 - DNA, 261 bp, Shigella sonnei
gtgttagccaaagggcgcgaaaaatcattacttcgtcgccatccgtgggtcttttccggggccgttgcccgcatggaaggtaaagccagcctcggtgaaaccatcgatattgttgatcatcagggaaaatggttagcacgcggcgcttattcgccagcttcgcaaatccgggcgcgcgtctggacgtttgacccgtctgagtctatcgacattgcttttttttcccgccgtttgcaacaagcacaaaaatggcgtgactga

SEQ ID NO: 485489 - DNA, 387 bp, Shigella sonnei
gtgctgcaactgctgagtgctggggcagaatatcagcgcgcggcattaattagtgccctgcaaacgctgtacccggaatgtgcgatttacgatcgcagcgatgttgcggtacgtaaaaaagaagggatggagctgacccagggcctcgtcaccggcgagttgccgcctgccctgctgccgattgaagaacacggcatgaagctgctggtggatattcagcacggacacaaaacgggctactacctggaccagcgagacagccgcctggctacccgccgctacgttgaaaataaacgtgtgctgaactgtttctcctataccggtggtttcgccgtatcggcactgatgggcggttgcagccaggttgtcagcgttgatacctcctag

SEQ ID NO: 485490 - DNA, 345 bp, Shigella sonnei
ttgctgcgtacttatcgcgatcgcggtgaaaaatttgacgttatcgtgatggacccgccgaagtttgttgagaataaaagccagttgatgggcgcgtgtcgtggctataaagatatcaacatgctggcgattcagttgctgaatgaaggcggtattctcctgactttctcctgttccggtctgatgaccagcgatttatttcagaaaatcatcgcggatgccgcaattgatgccggccgtgatgtacaatttatagagcagttccgtcaggcagccgatcatccggtgatcgctacctatccggaagggctatatctgaaagggtttgcctgtcgcgtcatgtaa

SEQ ID NO: 485491 - DNA, 318 bp, Shigella sonnei
atgattgccagcaaattcggtatcggccagcaggtccgccattccctgttaggttatctcggagtggtcgtggatatcgacccggtttattcgctctctgaaccgtcgcctgatgagctggcggtaaatgacgagcttcgcgccgctccgtggtatcacgtagtgatggaggacgataacggcctaccggttcatacctacctggctgaagcccagctaagtagcgaattgcaggatgaacatcctgaacagccatccatggatgagctggcgcagaccatccgcaaacaactccaggccccgcgtctgcgtaactga

SEQ ID NO: 485492 - DNA, 414 bp, Shigella sonnei
atgaaagaaaccgatattgcaggcattttaacgtccactcacaccattgcgctggtgggggcaagcgacaaacccgatcgtcccagctatcgcgtgatgaaatatctactcgaccaggggtatcacgtcattccggtttcgccaaaagttgccggcaaaacgctgctgggccagcaggggtatggcacgctggcagacgttccggaaaaggtcgatatggtcgatgttttccgtaattcagaagcggcgtggggcgtggcacaggaagctattgccattggcgcgaaaaccctctggatgcaactgggggtgattaatgagcaagcggcagtactggcacgggatgccgggttgaatgtggtgatggatcgctgcccggctattgagatccctcgcctgggcctggccaaataa

SEQ ID NO: 485493 - DNA, 609 bp, Shigella sonnei
atgaaactcgtcggtagctacaccagcccgtttgtacgcaaactttctattctgttgttagaaaagggcataactttcgaatttattaatgaactgccctataacgcggacaacggcgtggcgcaatttaacccgttaggaaaagtgccggtgctggtgaccgaagagggcgaatgctggtttgattcgccgatcatcgctgaatatattgagttaatgaatgtcgctccggcgatgttgccgcgcgatccgctggagtcgttgcgggtgcgcaaaattgaggcgctggcggatggcattatggatgccgggctggtatcggtgcgtgaacaggcgcgtccggcggcgcagcagtctgaagatgaattgttacgccagcgggagaaaatcaaccgcagtctggatgtgctggaaggatatctggtcgatggcacactcaaaaccgatacggtcaatctggcgactatcgccattgcctgtgctgtcggatatctcaatttccgccgcgttgcgccaggttggtgtgtcgaccgcccacacttagtcaaactggtcgaaaacctgtttagccgcgaaagttttgctcgcaccgaaccgccaaaggcttga

SEQ ID NO: 485494 - DNA, 1392 bp, Shigella sonnei
atgacaaccgaaacgcgttccctctatagtcaacttccggctattgatcgcttattgcgcgatagctccttcctttctttgcgtgatacttatggtcacacccgcgtggtggaattgttgcgtcagatgctcgacgaagcgcgagaagtgattcgtgacagccagacgcttcctgcgtggtgtgaaaactgggcgcaagaagtcgatgcccggttgacgaaagaggcgcagagcgcgctgcgtccggtgatcaacctgacgggaaccgtgctgcataccaaccttggacgagctttacaggcggaagccgcggtggaagccgttgcgcaggctatgcgttcgccagtgaccctcgagtacgatctggacgacgccggacgcggacatcgcgatcgggcgctggcgcaactgctgtgccgtattacgggggcggaagatgcctgtatcgtcaataacaatgcggcggcggtgttattgatgttggcggccactgccagcgggaaagaggtggtagtatctcgcggcgaattggtggagattggcggcgcgtttcgtattcccgatgttatgcgtcaggcaggctgcaccctacacgaagtagggaccaccaaccgcacgcacgcgaatgattatcgtcaggcggtgaatgaaaataccgcactgttgatgaaagtacataccagtaactacagcattcaggggttcaccaaagcgatagatgaagcggaactggtggcgctcggcaaagagctggatgttcccgtagtgactgatttaggcagtggctcgctggtcgatcttagccagtacggtttgccgaaagagccaatgccgcaggagttgattgcggcgggcgtcagtctggtgagcttctccggcgacaagttgttaggcgggccgcaggcagggattatcgttggtaaaaaagagatgatcgcccgcctgcaaagccacccgctgaagcgtgcattacgcgcggataaaatgaccctcgcggcgctggaagccacgttgcgtctttatttacaccctgaagctctgagtgaaaaattaccgaccctgcgcctgcttacccgcagcgcagaggtcattcaaatccaggcacaacgtttacaggctccccttgccgcacattacggcgcggagtttgcggtacaggttatgccatgtctttcgctgattggcagtggttcgctgccggttgatcgcctgccgagcgcggcattaacgtttacaccccatgatggacgcggtagccaccttgagtcattagccgcccgctggcgtgaattgccagtgccgatgattggtcgtatttatgacggacgattgtggctggatttacgctgccttgaagatgagcaacggtttttggagatgttgttgaaatga

SEQ ID NO: 485495 - DNA, 1845 bp, Shigella sonnei
atgattattgcgactgccggacacgttgaccacggcaaaacaaccttattgcaggtgattactggcgtaaatgctgaccgtctgccggaagaaaaaaagcgcggcatgaccatcgatctcggctatgcctactggccgcagccggatggtcgcgtgcctagttttatcgacgtacccggtcatgaaaagtttctttccaacatgctggcgggcgttggtggtatcgatcacgcgctgttggtggtggcgtgcgatgacggcgtgatggcgcagacccgtgagcatctggcgattttgcagctgaccggtaacccgatgctgacagtggcgctgaccaaagccgatcgcgtggacgaagcgcgtgttgatgaggttgaacgccaggtaaaggaggtgctgcgggaatacggttttgctgaggcaaaactgtttatcaccgcagcaaccgaaggtcggggaattgatgccctgcgcgagcatctgcttcagttaccaggacgtgaacacgccagccaacatagtgtccgcctcgcgatcgaccgcgcatttaccgtaaaaggtgccggtctggtcgtcaccggtacggcgttaagcggggaagtgaaggtaggcgattcactctggctgactggtgtaaataaaccgatgcgtgtacgtgcgctgcatgcacaaaaccagccaacagaaaccgcccatgccgggcagcgtatcgcgcttaacatcgcgggtgatgcggaaaaagagcagattaaccgtggcgactggctgcttgccgatgcgccgccagagccgttcacacgggtgattgtcgagcttcaaacccatacgccgctgacccagtggcagccgctgcatattcaccacgccgccagccacgttacgggacgcgtttcgctgctggaagataaccttgccgagctggtgttcgacacgccgctgtggctggcggataacgatcgcttagtgctgcgcgatatctcggcccgcaacacgctggcgggggcgcgtgtggtgatgcttaacccgccgcgtcgcggtaaacgtaagccggaatatctgcaatggctggcgtctcttgcacgggcgcagagcgatgccgatgcgttatctgttcatctggaacgcggcgcggttaaccttgcggatttcgcctgggcgcgccagctcaacggcgaagggatgcgcgaattgctgcaacagcctggctatattcaggctggttatagcttgttgaatgcgccggttgccgcccgctggcagcggaaaattctcgacacattagcgacttatcatgagcaacatcgcgatgaacctggtcctgggcgcgaacgtctgcgacgtatggcgttgccaatggaagatgaagcgctggtactgttgctgattgaaaagatgcgcgaaagcggcgacatcctcagtcatcacggttggctgcatctgccggatcacaaagcgggcttcagcgaagagcagcaggccatctggcaaaaagcagagccgctgtttggtgacgagccgtggtgggtgcgtgatctggcaaaagagacgggtaccgacgagcaggcaatgcgcctgacgctacgccaggcggcgcagcaaggaataattaccgcgatcgtcaaagatcgttattaccgtaacgatcggattgtcgaatttgccaatatgatccgcgatctcgatcaggagtgtggttcaacctgcgcggcggatttccgcgatcgcttaggcgtaggccgaaagctggcaattcagattctggaatattttgaccgcattggctttacgcgtcgtcgtggaaatgatcatttattgcgcgacgcattattatttccggaaaaataa

SEQ ID NO: 485496 - DNA, 768 bp, Shigella sonnei
atgaaactgacaacacatcatctacggacaggggccgcattattgctggccggaattctgctggcaggttgcgaccagagtagcagcgatgcaaaacacattaaagttggcgttataaatggcgcagaacaagatgtcgcggaagtcgctaaaaaggtggcaaaagagaaatatggcctcgatgttgaactggtaggatttagcggttcgttgctaccgaacgatgcgacaaatcatggcgaacttgatgcgaatgtcttccagcatcgaccctttcttgaacaagataatcaggcgcatggttataaactggtagcgctgggaaatacgtttgtcttccctatggcgggttattccaaaaaaatcaaaaccgtggcgcaaataaaagaaggcgcgacagtggcgatccccaacgacccgaccaaccttggtcgcgcacttttactgttgcaaaaagagaagctaattactctgaaagagggaaaagggttattacctaccgcgctggatataaccgataatcctcgtcatttgcagattatggaactcgagggggcgcagctcccgcgcgtactggatgatcccaaagttgatgtagcgattatcagcaccacttacattcagcagacagggctttctccggtgcacgacagcgtatttattgaagataagaattcgccgtatgtgaatattttggtggcacgggaagataataagaatgcagaaaacgtgaaggaatttctgcaatcttatcaatcacccgggtga

SEQ ID NO: 485497 - DNA, 294 bp, Shigella sonnei; identical to SEQ ID NO: 462534

SEQ ID NO: 485498 - DNA, 1146 bp, Shigella sonnei
atgttaaagtggtcggcttttcccctgaaacatgccacgggtaacaccatgagtgaatttattgccgaaaaccgcggcgcggatgccatcacccgaccgaactggtcagccgttttctcggtggcgttttgtgtcgcctgtctgattatcgttgagtttttgcccgtcagtttgttgacgccaatggcccaggatttaggcatttcggaaggggttgccgggcaatcggtgaccgtgaccgcctttgtggcaatgtttgccagtttgtttattacccagacaattcaggctactgaccgccgcaacgttgttattttgtttgccgttttgctgacgctctcctgcttgctggtttcctttgctaactcattcagtttgcttttaatcggtcgtgcctgtctggggctggcgctgggcgggttctgggcgatgtcggcgtcgctgaccatgcgtctggtgccgccgcgtacggtgccgaaggcgctgtcggtgatcttcggcgcggtttctattgcgctggtgattgccgcgccgttgggcagttttttaggcgagcttatcggttggcgcaatgtctttaatgcggcggcggtgatgggcgtgctgtgtattttctggattatcaaatcattgccttcactgccaggcgaaccctcgcatcagaaacaaaatactttccgcttattacaacgtccgggtgtgatggcagggatgatcgccatcttcatgtctttcgccgggcagtttgctttcttcacatatattcgcccggtgtatatgaacctggcgggattcagcgtggatggcttaacgctggtgctgttgagttttggcattgccagctttatcggtacgtcgctttcgtcattcattcttaaacgttcggtaaaactggccttagcaggcgcgccgttaatactggctgtgagtgcgttggtgctgacgttgtggggaagcgataaaatcgttgctaccggcgtggcgattatctgggggctaacttttgcattggttcccgtcggctggtcaacgtggatcacccgctcactggccgatcaggcagaaaaagccgggtctattcaggtggcggttattcagcttgtggcgcggcaatcggcggttatgcgctggataatattggtctga

SEQ ID NO: 485499 - DNA, 453 bp, Shigella sonnei
atgatctggataatgctcgccacgctggcggtagtgtttgtggttggttttcgggtgctgacatccggggccagaaaagcgattcgccgtctcagtgatcggctgaatatcgatgtcgtacccgtggagtcgatggtcgatcaaatgggaaagtcagccggtgacgaatttttacgttatttgcatcgcccggatgagtcgcacctgcaaaacgccgcgcaggtgttgctcatctggcaaattgtcattgtcgatggtagcgaacagaacctgctgcaatggcatcggattttacaaaaagcccgcctttccgcgccgattaccgatgctcaggtcaggctggcgctgggttttctgcgcgaaaccgaacctgaaatgcaggatattaatgcttttcagatgcgctataacgcgttctttcagcctgccgagggcgttcactggctgcattaa

SEQ ID NO: 485500 - DNA, 858 bp, Shigella sonnei
atgggattaaaaaatactggcgttattgtcgccaataaagacacgctggtgatgattggcgatttaagttctcacggcgtgttgttaggtattttagggttttttattataaccgtgttgtcatcacgtcattttcatgccgcggtgctggtttctattgtggtgacgtcttgctgtggattatttttcggtgatgttcattttagcggcgtctattccattccgcctgatattagcggcgtcattggtgaagtagatttgagcggcgcgttaacacttgaactcgccggtatcattttctcctttatgctgatcaacctatttgattcatcaggaacattaattggtgtaactgataaagcgggcttaatagatggtaacggtaaattccccaatatgaataaggcgctgtatgttgatagcgtcagttcggtggcgggtgcgtttatcggcacctcgtctgttactgcctatattgaaagtacttctggtgtggcagtcggtggccgcacggggctgactgcggttgtggttggcgttatgttcctgttggttatgttcttctccccgctggtggcgatggttcctccttacgcaaccgccggagcgttaatctttgttggcgtgctgatgacttcgagcctggcgcgcgttaactgggatgattttaccgaatcggtgcctgcgtttattaccacggtgatgatgccctttactttctcgatcaccgaagggattgcactcggctttatgtcgtactgcatcatgaaagtgtgcaccgggcgctggcgcgatctgaacctgtgtgtggtggtggtcgcatctctgtttgcactgaagattattctggtggattag

SEQ ID NO: 485501 - DNA, 561 bp, Shigella sonnei
atgggtagtaatatacatggaattagttgcactgcaaataattatttgaaacaggcctggaacgatataaaaaatgagtacgaaaaaaatcaaacatattcaatcacgctttttgaaaacacactggtgtgttttatgcggttatacaatgaactcagacgtaaagtaaatgaagaggatactccatgtctggaatgtgaatcactagaaaaagaatttgaggaaatgcagaatgataatgatctatcattatttatgagaatattgcgtactaatgatacacaaatttattcaggggtttcaggaggtattacatatactatacaatatgttcaaaatgttgatattgttagagtgtccttgccgggcagaggttcagagtctatcacagattttaaaggttattattggtatggctttatggaatatattgaaaacattactgcgtgtgatgatattttttctgagtattgtttagatgatgaaaatatgagtatccagccagaacagataaatacgccgggaatatctgatttagatactggttttaaaagaacatga

SEQ ID NO: 485502 - DNA, 1242 bp, Shigella sonnei
atgaacaaaacgctaatcgccgcaactgtggcagggatagttttactcgcttcaaatgctcaggcacaaaccgtaccggaaggctatcagctacagcaagtgctcatgatgagccgccataacttacgtgcgccgctggcgaacaatggcagtgtgctggagcagtcgacgccgaataaatggccagaatgggacgtccccggtgggcaactcaccaccaaaggtggcgtgctcgaagtgtatatgggccattacatgcgtgaatggctggcagagcaggggatggtgaaatcgggggaatgcccgccgccggacaccgtttatgcctatgccaatagtctgcaacgtaccgttgcgaccgcacagttctttattaccggcgcattcccggggtgtgatattcctgtgcatcaccaggaaaaaatgggcactatggacccaacctttaacccggtgatcaccgatgattccgccgcattcagtgaacaggcggtggcggcaatggagaaagagctcagcaaactccagcttaccgacagctaccagctactggaaaaaatcgttaactataaagattcccctgcctgtaaagagaaacaacagtgttcgctggtggatggcaaaaatacctttagcgccaagtatcaacaagaaccaggtgtttccgggccgctgaaagtcggcaactcgctggtagatgcgtttactttgcaatattacgaaggttttccgatggatcaggtggcctggggagaaatcaaatctgaccagcagtggaaggtgttgtcgaagcttaaaaacggctaccaggacagcctgtttacctcaccggaagtggcgcgcaatgttgcgaaaccgctggtcagttatatcgacaaagctctggtcaccgatcgcaccagcgcaccgaaaattacagtgttggttgggcacgactccaacattgcctctctgttaacggcgctggatttcaaaccgtatcagttgcatgaccagaacgaacgcacgccgattggcggcaaaatcgttttccagcgttggcatgacagcaaagccaatcgcgatttgatgaaaattgaatatgtgtatcagagtgcggaacagttacgtaatgccgatgcgttaaccctgcaggcacctgctcagcgtgtgacgctggaattaagcggttgcccgatagatgccaacggtttctgcccgatggataaatttgatagcgtgttgaatgaagcggtgaaataa

SEQ ID NO: 485503 - DNA, 228 bp, Shigella sonnei
atgccaactcaagaagcgaaagctcatcacgtcggtgaatgggcatctctgcgcaatacgtcgccggaaatagccgaggccattttcgaagtcgccgggtacgacgaaaaaatggcagaaaagatttgggaagaaggtagcgatgaagtgttagtcaaagcctttgctaaggccgataaagattcgcttttttggggcgaacagaccatcgaacgtaaaaacgtttaa

SEQ ID NO: 485504 - DNA, 606 bp, Shigella sonnei
atgagtgttaaggcaagaatactagtgctttattattccatgtacggacatattgaaacgatggcacgcgcagtcgctgagggtgcaagcaaagtcgatggcgcagaagttgtcgttaagcgtgtaccggaaaccatgccgccgcaattatttgaaaaagcaggcggtaaaacgcaaactgcaccggttgcaaccccgcaagaactggccgattacgacgccattatttttggtacacctacccgctttggcaacatgtccggtcaaatgcgtaccttcctcgaccagacgggcggcctgtgggcttccggcgcactatacggaaaactggcgagcgtctttagttccaccggtactggcggcggtcaggaacaaactattacttcaacctggacgacccttgcgcatcacggcatggtgattgtccccattggctacgcagcgcaggaattatttgacgtttcacaggttcgcggcggtacgccgtacggcgcaaccaccatcgcaggcggtgacggctcacgccagccaagccaggaagaactgtctattgctcgttatcaaggggaatatgtcgcaggtctggcagttaaacttaacggctaa

SEQ ID NO: 485505 - DNA, 1032 bp, Shigella sonnei
atgcgcctgacggcggtctattcttgcgtcagggtgctggcagagtctgttggtatgctgccctgcagtctctacaaaatcagcggtaccctgaaaacacgggcggtggatgaacgactgcataagttggtttcggcaaaacctaatggctacatgacaccgcaggaattctgggagctggttattgtctgcctgtgtctacgggggaatttttacgcctacaaggtaaaggcactgggagaagtggtggagcttcttccgatagatccgggctgtgtggaaccgaagctgaacagccagtggcagccggtttatcaggtgacgtttccggatggttccgtggatgtgttgacccagaatgaaatctggcatgtgcgcaccctgacgctggatggacttgtcgggctgaatcccattgcgtatgcgcgtgaggccatttcactggcagcggcaaccgaggagcacggtgccaggttgtttagtaatggtgcggtgacatccggtgtgttgcgtacggaacaaaagctcacgccggatgcttacgagcgtctgaagaaagattttgaggagtgtcacacggggcttggcaatgctcaccgcccgatgattctggaaatggggctggactggaagtcgatggcgctgaacgccgaggacagtcagttcctggaaacccgcaagtttcagctggaagaaatctgtcgtctgttccgggtgccgttgcacatggtgcagaacaccgatcgcgccaccttcaacaatatcgaagagctggggctgggatttatcaactattcactggtgccgtatctgacccgcatcgaacagcggatcaacaccggactggtacgaaaaagtaagcagggcgtttattacgccaaatttaacgccggggcgttactgcgcggggatatgaagtcccgttttgaagcctacgccaccgggatcaactggggaatttactcttccaatgactgccgcgacctggaagatatgaatccgcgtcccggtggtgtaatgccgatcagttaa

SEQ ID NO: 485506 - DNA, 183 bp, Shigella sonnei
atgatcatgctgattctcgcgcctctggtgggcgtgctgggtgcgcttttgctggcgtatggtgcctggctgatttatcccccggcgggttttgttgttgccggggcgctgtgcctgttctggtcgtggctggtggcgcgatatctcgaccgtacacggcagtctgtcggcggaggtaaatag

SEQ ID NO: 485507 - DNA, 1734 bp, Shigella sonnei
atgagccggaaatcttaccccaacgtaaatgctgcaaatcagtatgcccgggatgtcgtgcgcggaaagattgttgcctgccagtttgtgattcaggcctgccagcgccatcttgatgacctgatggcggaaaaaagtaagtcgtttcgttaccgcttcgacaaggacctggctgaacgggccgcgaaatttattcagctgttgccgcacaccaagggggagtgggcattcaaacggatgcccatcacgctggagccgtggcagctatttgtgatctgctgtgcgtttggctgggtcaataaaggcacccggttgcgccgcttccgggaggtgtacaccgaaatcccccgtaagaacggcaaatcagcaatctctgccggtgttgccctgtattgttttgcctgtgataacgagtttggcgcggaagtgtattccggtgccacgacagagaaacaggcgtgggaagtctttcgcccggcgcgactgatgtgtaaacgcacacccatgctgacggaagcgttcgggattgaggttaacgcctcaaacatgaaccgtccggaggatggcgcgcggtttgaaccgctgatcggcaacccaggtgatggttcatcaccccactgtgccgtggttgatgaatatcacgagcatgccaccgatgcgctttataccacaatgcttaccgggatgggggcgcgacgtcagccactgatgtgggccatcaccaccgccgggtacaacattgaggggccgtgctacgacaagcggcgggaagtcatcgagatgctcaacggctcggtgcctaacgatgaactgttcgggatcatctataccgttgatgaaggtgacgactggaccggcccgcaggtgctggaaaaagccaatccaaatattggcgtgtcggtttatcgcgaatttttgttaagtcagcagcagcgtgcgaaaaataacgcccgtctggcaaacgtctttaaaacaaaacacctcaatatctgggtgtcggcgcgttcggcgtatttcaacttggtgagctggcagagctgcgaggataaatcactgacccttgagcagttcgaggggcagccgtgcattctggcctttgacctggcgcgtaagctggatatgaacagcatggcgcgactttatacccgcgagattgacggtaaaacgcattactacagtgtggccccgcgtttctgggtaccgtatgacacggtgtacagcgtcgagaaaaatgaagatcgacggacagccgaacgctttcagaaatgggtggaaatgggcgttctgaccgttaccgatggtgcggaggtggattatcgctacatcctcgaggaggccaaagcggcgaacaaaatcagcccggtcagtgagtcacccatcgaccccttcggggcgaccgggttgtcacatgaccttgctgatgaagacctgaatcccgtcactatcgtccagaacttcaccaatatgtccgatccgatgaaagagctggaagcagcgattgaatcgggacgttttcatcatgacggcaatcccatcatgacctggtgtatcggcaacgtggtcggcaaaaacatgccgggtaacgatgatgtggtgaaacccgtcaaagagcaggcggaaaacaaaatcgatggtgcagttgcgctgattatggcggttggcagagccatgctgtacgagaaagaagacacgctgtctgaccacattgagtcctacgggatccgctcgctttaa

SEQ ID NO: 485508 - DNA, 495 bp, Shigella sonnei
atggctggaacggcggggcgttccgggcgtcgccccaagccaacggcgcgcaaggcgctggccggaaaccccggcaagcgagccctgaacaaagatgaacctgtttttacgcccatcaaaggtgttgagccaccagagtggttcgctgaagaagatctccctctcgccacgatcatgtggcaactgacaaccaaagaactctgcggtcagggcctgctgtgcgtgactgacctggcggtacttgagcggtggtgcgtggcctatgagttctggcgacgtgccgtgaaaaatattgccatacagggcaacaccatcaccggtgcaatgggcggcagggtcaaaaatccggagctgaccgccaaaaaagaacaggagtccgagatgagcagcacgggggcaatgctcggactcgaccccagcagccgccagcgtctgattggcctggcggggcagaagaaagccactaacccgtttctgaaaattatcgaatcatga

SEQ ID NO: 485509 - DNA, 351 bp, Shigella sonnei
atgccatcactaatcccacgtgcctgccgtaagcgtggatgtgcaggtacaaccacagacagttcgggttactgcgataaacatcgcggtgaaggctgggtgcagcaccagcgcggactgagccgccaccagcgtggctatggctcaaaatggacggtgattcgtgcccgtattctgaagcgcgataaaggtctgtgtcagttgtgtctgcgtgtcggtgtggtgagcgaggcgaaaaccgtcgaccacattatcccgaaagcgcatggcggaacagacgcagacagcaacctgcagagtctgtgctggccctgccataaagcgaaaacagcgcgcgaacgaatccggtga

SEQ ID NO: 485510 - DNA, 183 bp, Shigella sonnei
atgcgaaagctgaaaatgaaactctgcgcgctgatgttgccgctggtcgtcgtcggttgcacatcaaagcagtctgtcagtcagtgcgtgaagccaccaccgcctccggcgtggataatgcaaccagcccccgactggcagacaccgctgaacgggattatttcaccctcagagagcggctga

SEQ ID NO: 485511 - DNA, 729 bp, Shigella sonnei
atgaccgtaacccgcccacgcgccgaacgcggcgcatttccgcccggaacagaacattacggacgttcattattgggcgcgccgttaatctggtttcctgcccctgcagccagccgcgaaagtggtttgattctggctggcactcacggtgatgaaaactcttcggtcgtcacgctctcctgtgctctgcggacgttgacaccttctttgcgccgccatcatgtggtgctgtgtgtgaatcctgacggctgccagctggggttacgggccaatgctaatggtgtggatttaaacagaaactttccggcggcgaactggaaggaaggtgaaacggtttatcgctggaacagcgccgctgaagaacgtgatgtcgtattactgacaggtgacaaacctggctcagaacctgaaacccaggcgctgtgccagcttatacaccgcattcaacctgcctgggtggtctcattccacgatccactggcctgtattgaagatcccagacacagcgaattaggcgaatggctggcccaggcgtttgaattgcctctggtaaccagcgtcggttatgaaacgcctggctctttcggcagttggtgtgcagatctcaacttgcattgcatcaccgcagagtttccgcccatctcctccgacgaagccagcgaaaaatatctctttgcgatggcaaacttgctgcgctggcatcctaaagatgcaattcgcccgtcgtga

SEQ ID NO: 485512 - DNA, 966 bp, Shigella sonnei
atgagaaccgttaaggtatttgaggaagcctggcccttacataccccgtttgtgattgcccggggaagtcgcagtgaagcgcgcgtggtggtggttgaactggaagaagagggtattaaaggcaccggcgaatgcacgccgtatccgcgttatggagaaagtgatgcctcggtaatggcgcaaattatgagcgtcgtgtcgcaattagagaaagggctgacacgggaggagttgcaaaaaattctccctgccggcgcagcacgtaatgcgctggattgtgcattgtgggatctggccgcgcgaaaacagcagcaatcgctggctgatttgatcggcataacgcttcccgagacagttatcactgcacagacggtagtcatcggtacgcctgatcagatggccaatagtgcatcaacactctggcaggcaggcgcgaaattactgaaagtgaagctggataaccatcttattagtgagcggatggtggcaattcgcacagctgtgcccgatgcgacgctgatcgttgatgcaaatgaatcctggcgtgcagaaggggtggcggcgcgttgccagctattggcggatttaggcgttgcgatgcttgaacaaccccttcctgcgcaggatgatgcggcgctggagaattttattcatccgttgccgatttgtgctgatgagagttgtcatacacgtagcaatctgaaggcgctgaaagggcgctatgagatggttaacattaagctcgataaaatcggtggtctgacggaagcgctggcgctggcgactgaagcgcgtgcacaaggtttcagtctgatgctgggctgcatgttgtgtacctctcgtgccattagcgccgctttaccgctggtgccgcaggtcagtttcgccgatcttgacggaccgacctggctggcggtagatgtggaaccggcgcttcagttcacgacgggcgaattgcatctttag

SEQ ID NO: 485513 - DNA, 507 bp, Shigella sonnei
atgtcacaaaccgttcatttccagggcaacccggttacagtcgccaattccatcccgcaggcgggtagcaaagcgcagacttttactctcgtggcaaaagatctgtctgacgtcaccctcggtcagtttgcgggtaaacgcaaagtgctgaacattttcccgagtattgataccgatgtttgcgccgcatcagtacgcaagtttaaccaactggcaactgagatcgacaacaccgttgtgctgtgtatctctgccgatctgccgttcgcccagtctcgtttctgcggcgcagaaggtctgaacaacgttatcaccctctccactttccgtaacgctgaatttctgcaagcttacggtgtggcaattgctgatggcccactgaaaggtctggcagcgcgtgccgttgtggttattgacgaaaatgacaatgtgattttcagccagctggtggatgaaatcaccaccgagccggattacgaagcagctctggctgtactgaaagcataa

SEQ ID NO: 485514 - DNA, 1542 bp, Shigella sonnei
atgcgtctggaagtcttttgtgaagaccgactcggtctgacccgcgaattactcgatctactcgtgctaagaggcattgatttacgcggtattgagattgatcccattgggcgaatctacctcaattttgctgaactggagtttgagagtttcagcagtctgatggccgaaatacgccgtattgcgggtgttaccgatgtgcgtactgtcccgtggatgccttccgaacgtgagcatctggcgttgagcgcgttactggaggcgttgcctgaacctgtgctctctgtcgatatgaaaagcaaagtggatatggcgaacccggcgagctgtcagctttttgggcaaaaattggatcgcctgcgcaaccataccgccgcacaattgattaacggctttaattttttacgttggctggaaagcgaaccgcaagattcgcataacgagcatgtcgttattaatgggcagaatttcctgatggagattacgcctgtttatcttcaggatgaaaatgatcaacacgtcctgaccggtgcggtggtgatgttgcgatcaacgattcgtatgggccgccagttgcaaaatgtcgccgcccaggacgtcagcgccttcagtcaaattgtcgccgtcagcccgaaaatgaagcatgttgtcgaacaggcgcagaaactggcgatgctaagcgcgccgctgctgattacgggtgacacaggtacaggtaaagatctctttgcctacgcctgccatcaggcaagccccagagcgggcaaaccttacctggcgctgaactgtgcgtctataccggaagatgcggtcgagagtgaactgtttggtcatgctccggaagggaagaaaggattctttgagcaggcgaacggtggttcggtgctgttggatgaaataggggaaatgtcaccacggatgcaggcgaaattactgcgtttctttaatgatggcactttccgtcgggttggcgaagaccatgaggtgcatgtcgatgtgcgggtgatttgcgttacgcagaagaatctggtcgaactggtgcaaaaaggcatgttccgtgaagatctctattatcgtctgaacgtgttgacgctcaatctgccgccgctacgtgactgtccgcaggacatcatgccgttaactgagctgttcgtcgcccgctttgccgacgagcagggcgtgcagcgtccgaaactggccgctgacctgaatactgtacttacgcgttatgcgtggccgggaaatgtgcggcagttaaagaacgctatctatcgcgcactgacacaactggacggttatgagctgcgtccacaggatattttgttgccggattatgacgccgcaacggtagccgtgggcgaagatgcgatggaaggttcgctggacgaaatcaccagccgttttgaacgctcggtattaacccagctttatcgcaattatcccagcacgcgcaaactggcaaaacgtctcggcgtttcacataccgcgattgccaataagttgcgggaatatggtctgagtcagaagaagaacgaagagtaa

SEQ ID NO: 485515 - DNA, 936 bp, Shigella sonnei
atgcgtctgttttctattcctccacccacgctactggcggggtttctggcggtattaattggctacgccagttcagcggcaataatctggcaagcagcgattgtcgccggagccaccactgcacaaatctctggctggatgacggcgctggggctggcaatgggcgtcagtacgctgactctgacattatggtatcgcgtacctgttctcaccgcatggtcaacgcctggcgcggctttgttggtcaccggattgcagggactaacacttaacgaagccatcggcgtttttattgtcaccaacgcgttaatagtcctctgcggcataacgggactctttgctcgtctgatgcgcattattccgcactcgcttgcggcggcaatgcttgccgggattttattacgctttggtttacaggcgtttgccagtctggacggtcaatttacgttgtgtggaagtatgttgctggtatggctggcaaccaaggccgttgcgccgcgctatgcggtaattgccgcgatgattattgggatcgtgatcgttatcgcgcaaggtgacgttgtcacaactgatgttgtctttaaacccgttctccccacttatattacccctgatttttcgtttgctcacagcctgagcgttgcactccccctttttctggtgacgatggcatcgcaaaacgcaccgggtatcgcagcaatgaaagcagctggatattcggctcctgtttcgccattaattgtatttactggattgctggcactggttttttcccctttcggcgtttattccgtcggtattgcggcaatcaccgcggctatttgccaaagcccggaagcgcatccggataaagatcaacgttggctggcagctgccgttgcaggcattttctatttgctcgcaggtctgtttggtagtgaggtgtactggcaatag

SEQ ID NO: 485516 - DNA, 537 bp, Shigella sonnei
atggaaaatctcgctcgctttttatccactacacttaaacaactacgccagcagcgcggctggagtctttcgcgactggcagaagcgacgggcgtttctaaagcaatgttagggcagattgagcgtaatgagtccagtccgacggtcgcgacattatggaaaattgccaccgggttgaacgtaccattttcaacatttatttctccgccgcagtccgctatgccttcagtttatgatccacaacagcaggcgatggtgatcacttcgctgtttccttatgatccacaactctgctttgaacacttctcgattcagatggcatctggtgcaataagcgaatcgacgccccatgagaagggggtaatcgaacatgtcgtcgtcattgatggacaacttgatctgtgcgttgatggggaatggcagacccttaattgtggggaaggcgttcgatttgctgcagacgtcacgcatatctatcgtaatggtggggagcaaaccgtacattttcattccctcatccattacccgcgcagttaa

SEQ ID NO: 485517 - DNA, 2004 bp, Shigella sonnei
gtggctaaaatagccgccatttttcagctactggataagaatgtgaccgtatcttctcatcgacttgaactgttaagcccggcacgcgatgccgccattgcccgcgaagctattttgcacggtgccgatgctgtttatatcggcggccctggttttggtgcccgtcataatgccagtaatagcctgaaagatattgccgagctggtgccgtttgcccatcgttatggtgcaaaaattttcgtcacgcttaacaccattttgcatgatgatgagctggaacccgcgcaacggctgattactgacctctaccagaccggtgtcgatgcgctgattgttcaggatatggggattctggaacttgatattccgccgattgaactgcacgccagtacgcagtgcgacattcgtacagttgaaaaagcgaagttcctctctgatgttggcttcacgcagattgtgctggcgcgagagctgaatcttgatcagatccgcgcgattcaccaggctacggacgcgaccattgaattctttattcatggggcactgtgcgtggcctattcgggtcagtgctacatttctcatgcgcaaacagggcgtagcgccaaccgtggcgattgctcgcaggcgtgccgtttgccatacacattgaaagacgatcaggggcgggtggtttcctatgaaaaacatctgctgtcgatgaaagataacgatcagactgccaacctcggcgcgctgattgatgctggcgtacgctccttcaagattgaagggcgttacaaagatatgagctacgtgaagaatatcaccgcccattatcgccagatgctggatgccattattgaagaacgtggcgatctgacgcgtgcttcatcaggtcgtactgaacatttctttgttccatcgacggaaaagactttccaccgtggtagcacagattattttgtgaatgcccgtaaaggcgatattggcgcgttcgattcgccgaaatttatcggcctgccggtgggtgaagtattgaaagtggcgaaagatcatctcaatgttgccgtcaccgagccactggcaaatggtgatggcctgaacgtgatgattaaacgtgaagtcatcggttttcgtgccaatacggtcgagaaaaccggagaaaatcagtaccgcgtctggcccaatgaaatgccagcagatttgcacaaaattcgtccacatcacccactaaaccgtaatcttgatcataactggcagcaggcactgacaaaaacctccagcgaacgtcgggtggcggtagacattgaactgggcggctggcaggaacaactgattctgaccctcaccagtgaagagggtgtcagcatcacgcatacgctggacgggcagttcgacgaagccaataacgccgaaaaagcaatgaacaatctgaaggatggtctggcaaaactggggcaaaccctctattacgcccgcgatgtgcaaattaatttgccgggggcgctgtttgtaccaaacagtctgttaaaccagttccgccgtgaagctgctgacatgctggatgctgcgcgtcttgccagttaccagcgcggcagccgtaaaccggttgctgatcctgcgccggtttttccgcaaacgcatctgagtttcctcgcgaacgtatacaaccagaaagcgcgtgaattttatcatcgctatggtgtgcagctgattgacgcggcgtatgaggcacatgaagagaagggcgaagtcccggtgatgatcaccaagcattgtctgcgctttgcctttaatctgtgcccgaaacaggcgaaaggcaatatcaaaagctggaaggcgacgccaatgcaactggttaacggcgatgaagtattaacgctaaagtttgattgccgcccatgcgagatgcacgtcattggcaaaatcaaaaatcacatactgaaaatgccgttaccgggaagcgtagtggcatccgtaagtccggatgagctgctgaaaacattgcctaagcgaaaagggtaa

SEQ ID NO: 485518 - DNA, 171 bp, Shigella sonnei; identical to SEQ ID NO: 463200

SEQ ID NO: 485519 - DNA, 264 bp, Shigella sonnei
atgtatccagatagccagcaagggtttgccccaacggtacgtgggattgcccgtacggcggcccagctaacgattcggcaaaatggttttattatctatcaaagctatgtttcccccggtgcttttgaaattactgatttgcacccgacatcttcaaatggcgatctggatgtcaccatcgacgagcgcgatggcagaattacacaattccgtattcaacagtgccgattttacaacgcgaagggcgtttcaaatttgacctga

SEQ ID NO: 485520 - DNA, 1554 bp, Shigella sonnei
gtgccgattttacaacgcgaagggcgtttcaaatttgacctgacggcgggcgattttcgtagcggtaatagtcagcaatcatcacctttcttttttcagggcacggcactcggtggtttaccacaggaatttactgcctacggcgggacgcaattatctgccaattacaccgcctttttattagggctggggcgcaacctcgggaactggggcgcagtgtcgctggatgtgacccatgcgcgcagccagttagccgacgacagtcgtcatgagggggattccattcgcttcctctatgcgaaatcgatgtacaccttcggcaccaattttcagttaatgggttaccgctattcgacacaaggtttttatacccttgatgatgttgcgtatcgtcgaatggaggggtacgaatatgattacgattacgacggtgagcatcgcgatgaaccgataatcgtgaattaccacaatttacgctttagccgcaaagaccgtttgcagttaaatatttcacaatcacttaatgactttggctcgctttatatctctggtacccatcaaaaatactggaatacttcggattcagatacctggtatcaggtggggtataccagcagctgggttggcatcagttattcactctcattttcgtggaatgaatctgtagggatccccgataacgaacatattgtcggacttaatgtttcagtgcctttcaatgttttgaccaaacgtcgctacacccgggaaaatgcgctcgaccgcgcttatgcctccttgaacgctaaccgtaacagcaacgggcaaaatagctggctggcaggcgttggtgggaccttactggaaggccacaacctgagttatcacgtaagccagggcgatacctcgaataatgggtacacgggcagcgccacggcaaactggcaggccacttacggtacgctgggggtcgggtataactacgaccgcgatcaacatgacgttaactggcagctgtctggcggtgtggtcgggcatgaaaatggcataacactgagccagcctttaggggataccaatgttttgattaaagcgcttggcgcaggcggtgtacgcattgaaaatcaaactggcattttaaccgactggcgcggctatgcggtgatgccgtatgccacggtttatcggtataaccgtatcgcgcttgataccaatacgatggggaattccatcgatgttgaaaaaaatattagcagcgttgtgccgacgcaaggcgcgttggttcgtgccaattttgatacccgcataggcgtgcgggcgctcattaccgttacccagggcggaaaaccggtgccgtttggatcactggtacgggaaaacagtaccggaataaccagtatggtgggtgatgacgggcaagtttatttaagtggtgcgccattgtctggtgaattactggttcagtggggagacggcgcgaactcacgctgcattgcgcactatgtattgccaaagcaaagcttacagcaagccgtcactgttatttcggcagtttgcacacatcctcgctcataa

SEQ ID NO: 485521 - DNA, 1008 bp, Shigella sonnei
atgaagataatctgcagattattattggcaatggcatgtttgtgtctggcaaacatatcctgggctactgtttgtgcaaatagtactggcgtagcagaagatgaacactatgatctctcaaatgtctttaatagcaccaataaccagccagggcagattgttgttttaccggaaaaatccggctgggtaggtgtctcagcaatttgtccactcggcacgctggtgaattatacataccgtagttatgtcactaactttattgttcaggaaactatcgataattataaatatatgcaattaaatgattatctattaggtgcgatgagtctggttgatagtgtgatggatattcagttccccccgcaaaattatattcggatgggaacagatcctaacgtttcgcaaaaccttccgttcggggtgatggattctcgtttgatatttcgtttaaaggttattcgtccctttattaacatggtggagatccccagacaggtgatgtttaccgtgtatgtgacatcaacgccttacgatccgttggttacacctgtttataccattagttttggtggccgggttgaagtgccgcaaaactgcgaattaaatgccgggcagattgttgaatttgattttggtgatatcggcgcatcgttatttagtgcggcagggccggggaatcgaccagctggcgtcatgccgcaaaccaagagcattgcgatcaaatgtacgaatgttgctgcgcaggcttatttaacaatgcgtctggaagccagtgccgtttctggtcaggcgatggtgtcggacaatcaggatttaggttttattgtcgccgatcagaacgatacgccgatcacgcctaacgatctcaatagcgttattcctttccgtctggatgcagctgcggcagccaatgtcacacttcgcgcctggcctatcagtattaccggtcaaaaaccgaccgaagggccgtttagcgcgctggggtatttacgcgtcgattatcaatga

SEQ ID NO: 485522 - DNA, 516 bp, Shigella sonnei
atgagaagagtactctttagctgtttctgcgggttactgtggagttccagtggatgggcagctgaccctttgggaacgattaatatcaatttgcacggtaacgttgttgatttctcctgtaccgtaaacactgcggatattgataagacggtagatttaggcagatggcctacgacacaattactgaacgctggcgataccacggcactcgtcccttttagcctgcggctggagggatgtcctccgggttccgttgcgattttatttacgggaacgccggcatccgataccaacctgctggctctggatgatcccgcaatggcacaaaccgtcgccatcgaattacgtaatagcgatcgctcccggctcgcactgggggaggcgagcccgactgaggaagtagatgcaaatggcaatgtcacactaaacttttttgccaattatcgagcgttagccagcggtgttcagccaggtgtggagaaagcggatgcgatatttatgatcaattataattaa

SEQ ID NO: 485523 - DNA, 597 bp, Shigella sonnei
atgactagtctaaaaactagtattaagactatcacttatttaagtgatactggttgtctggagattcagggggccagtctaataaccatcgattatctccgaacccgtcctgttgatttaatcattatggatatagacttgcccggaacagacggttttaccttcctgaaaaggatcaaacaaatccagagcacagtgaaagtgttatttttatcatcgaaatcagaatgcttttatgctggcagagcgatacaagctggtgctaacggttttgtcagtaaatgcaatgatcagaatgatatttttcatcccgttcagatgatcctctccggatacacgttttttcctagcgaaacgctcaactatataaaaagcaataaatgtagtacgaatagttcaacggtcactgtgctatctaatcgtgaagtgaccatattacgttatctggttagcggattatctaataaagaaattgccgataagttattacttagcaataaaacagttagtgcgcataaatctaatatttatggcaaactaggtttgcattcaattgtagagcttatcgactacgccaaattatacgaattaatataa

SEQ ID NO: 485524 - DNA, 240 bp, Shigella sonnei
atgcttgttgttgatatgaagacagtaatggttttttcacaacgagctgaatcactggggttatactcgaataatcgcttgcttatcaatataattgccgaacatatccatagtgatatatatctaaccaagtatcagcaacaatatccagatgccaatgcattaataaatactttgcatgaatctggcaatgatatggtgcaggatgaaaaacatttgagtgatagcaaaaaccgttaa

SEQ ID NO: 485525 - DNA, 1869 bp, Shigella sonnei
atgattttttttaacgatataaagcccactggttggttaaagaataagatggaatggtatatgaacggtcatataggagaactggataaattagttccccatcttattacggagcataaaatatatggaagagatcgtataactccacgcactgtatctgctgaagatggcgttattaaaaaacagaataatcccgatgataacatgatgcaatattattggtgggatagtgaaactcaatcgaattggaaggatggatattgccgcagtgcctacttgttagataataaagaatggcaggaaaaagcgagcgatttatgtttggaacttatcgatacgcaagatgatgatggctacattggaatttatgattcatcattaaaatttaactgtaaagcagaaaacggagagttctgggcacaagctactgccttgcgttttgtgcttggatgttatgagtccacccgtaatgagagtttattaacttctcttacccaagccgcacaatgcattatggctggctaccctaaagaaacgtcacatcctttcgttgtggaacagggttttgctggacatagccacggattaacaataacagatgttttctaccgcctttatgaaataaccaataacattgaatatctctcatattgcttgtggctgtatgaagattattccgcaggatgcgtgtcggagcaagatctgcaatataaaaatgtcatagaccctggttaccttcttaaaggtcatggcgtacatacgtatgagcatattagggcattagccatcgcagcgagccaacggccgcagtatcaaactgcattagatatttttttatcccagttgaaatattatcttacaccatctggcgctcccattggtgatgagtggattacaggacgcacagctaatgccacttatacaggctatgaatattgttctgttcatgaactatttagcacttatgttatgttaataaaactgaccactaatattggtctggccgatgatgctgagtggctattctataatgctagttttggcatgcagcatcccatacttcacgcgataatgtactgtaagactgataattgttatgaagcaaatgaaaggaaacatcctgacagtaatcagtttaataccagatataaatactcccctactcatgaggaggctgctgtctgctgcgtaccgaatacagcaagaaccataccggcttttgtcgaaaatatgtttcaagaaaataacaatggttttactgcattattttatggcccgtgtgagttttatggcacatttaataatgttgcaattaaaattacacaattaactgaataccctcatgatttaagcgtaaaatgtctcattgagcctgagtcatctgttcgttttgctctcagtttccgttaccccggctgggcaaaaatgatgattattaatggtgttacttttactaaaaatgatactcaaaactcacttattattttagatagaacatggcaacatcatgatgtgattgacattaaatttatagctgatatacagtttaatactgacttatgtggtgacacttatatttccagaggtcccgttttatatgcaattgagcttgagagcgatattttaatcaaaaaaaacctgctgaacgggaaatattttgactcaggatacataccctgtagtagagctgatgaatctatccagttctcttatgctgatatggaatctttttcatattcaacctcaccagagggcaaacaatacattgaaggctgtttttatttaaacaagactaaaatagtcagaaaacttataccatttggtcaaaccattcttcgcaaagtaactttctccaatatagagagttaa

SEQ ID NO: 485526 - DNA, 1386 bp, Shigella sonnei
atgtaccttactgataatattatcaaactgtcgaataaaataggtcagcgtgtttatactgttgtctctgaaatgtcgattgaagcatggataacaaaagaaccgcagccttttgtttatcgccgtagcggcgcttaccagaaactcaccattggctcagactggggtcaactgtttgactgtgcctggatgcgagtttatggtaaacgtccagcagataaatttagacacaaactcgtcgctctcgttgatatcggtggcgaaggtcttattgtggataagaatggttcacccatctgcggcatcacgaataaagcatcatcttatggcgtaccgccagataaaccaggtaaatgggtggttgacctttctctcgttagtgaaaatgacgaggttgagttttggattgatgctgcctgcaacgatttatttggctatgttactaatggagggattattactgatgttcatatcgcgacacgtaatcaactactgaaatccctttattatgatattgaggtgcttttcgactggattaatgatggtcagaagtttgaatccatacatcctaaaggtatcaccccagaacaatttattgccaaaagaagtgagcgtactgacgaaatcataagtactctcgaatatattgataatacgttaattacctttagcaatgaagaaataattaaatgtcaaattgcaatccaatccataatcaataaaaacaataatccttcagagttcaggattatggctactggtcatgcccatttagatatagcgtggatgtggcctttaagagaaggacgcagaaaagcaataagaacatttgccaccgcccttgcaaacattgaaaaatatcctgattacatttttggcgctagtcagtaccaactttttcactggataaaaaaagattatccctatttcttcgaaaagttaaaaaaacaaatcgccgcaggccgctttgagttacaaggttgcttctgggtcgaatgcgatttaaatctggtaagtggtgaatcgctgataaggcaaatcatgcatgggacacgattcacactgcagaatttttcaaaaaagataaattatgtctggcaaccggatgtctttggattccccgcaacgcttccacaaattctcaaaaaatcaggcattaactatattgcatcgcaaaagctctcacaaaacaagattaataaatttaataattaccttttccgctggcagggcctggatggctcagaaattctgatgcataactttcctgaagacacttatgatagccgagcacgtgctcgctctttagaatatattgaacaaaactataatgaaaaagagatctgtccctatgcgcttatggtgtatggtgtatggtgtcggtga

SEQ ID NO: 485527 - DNA, 198 bp, Shigella sonnei
atgtcaccctgtggaaatgacacccctataaactggaaacgaaacctgatcgtcgcctggctaggctgttttcttaccggtgccgccttcagtctggtaatgcccttcttacccctctacgttgagcagcttggcgttaccggtcactccgccctgaatatgtggtccggtattgtcttcagtataataccttcctaa

SEQ ID NO: 485528 - DNA, 921 bp, Shigella sonnei
atgacgaatctacccaagttctccaccgcactgcttcatccgcgttattggttaacctggttgggtattggcgtactttggttagtcgtgcaattgccctacccggttatctaccgcctcggttgtggattaggaaaactggcgttacgttttatgaaacgacgcgcaaaaattgtgcatcgcaacctggaactgtgcttcccggaaatgagcgaacaagaacgccgtaaaatggtggtgaagaatttcgaatccgttggcatgggactgatggaaaccggtatggcgtggttctggccggaccgccgaatcgcccgctggacggaagtgatcggcatggaacacattcgtgacgtgcaggcgcaaaaacgcggcatcctgttagttggcatccattttctgacactggaactgggcgcgcggcagtttggtattcaggaaccggggattggcgtttaccgcccgaacgataatccactgattgactggctacaaacctggggccgtttgcgctcaaataaatcgatgctcgaccgcaaagatttaaaaggcatgattaaagccctgaaaaaaggcgaagtggtctggtacgcaccggatcatgattacggcccgcgctcaagcgttttcgtcccgttatttgccgttgagcaggctgcgaccacgaccggaacctggatgctggcacggatgtccggcgcatgtctggtgcccttcgttccacgccgtaagccagatggcaaagggtatcaattgattatgctgccgccagagtgttctccgccactggatgatgccgaaactaccgccgcgtggatgaacaaagtggtcgaaaaatgcatcatgatggcaccagagcagtatatgtggttacaccgtcgctttaaaacacgcccggaaggcgttccttcacgctattaa

SEQ ID NO: 485529 - DNA, 369 bp, Shigella sonnei
atgccagtgttacacaaccgcatttccaacgacgcgttaaaagccaaaatgttggttgagagcgaaccgcgaaccaccatttcgttttacaagtatttccacatcgccgatcctaaggcgacccgtgacgctttatatcagctgtttaccgcgctgaatgtttttgggcgagtgtatctggcgcatgagggcattaacgcgcaaatcagcgtacctgcgagcaatgttgaaacatttcgcgcgcagctctatgccttcgacccggctttagagggtttacgcctgaatatcgcgttggatgatgacgggaaatccttctgggtacttgcgcatgaaggtacgcgatcgcattgttgccgacggtattga

SEQ ID NO: 485530 - DNA, 576 bp, Shigella sonnei; identical to SEQ ID NO: 458744

SEQ ID NO: 485531 - DNA, 567 bp, Shigella sonnei; identical to SEQ ID NO: 458743

SEQ ID NO: 485532 - DNA, 504 bp, Shigella sonnei
atgccgggcaactgcacgcattatgggcgttggcctcaacacgattttacgtcacttaaaaaactcaggccgcagtcggtaacctcgcgcatacagccgggcagtgacgtcatcgtctgcgcggaaatggacgaacagtggggctatgtcggggctaaatcgcgccagcgctggctgttttacgcgtatgacagtctccggaagacggttgttgcgcacgtattcggtgaacgcactatggcgacgctggggcgtcttatgagcctgctgtcaccctttgacgtggtgatatggatgacggatggctggccgctgtatgaatcccgcctgaagggaaagctgcacgtaatcagcaagcgatatacgcagcgaattgagcggcataacctgaatctgaggcagcacctgacacggctgggacggaagtcgctgtcgttctcaaaatcggtggagctgcatgacaaagtcatcgggcattatctgaacataaaacactatcaataa

SEQ ID NO: 485533 - DNA, 1248 bp, Shigella sonnei
atggcactgaatattccattcagaaatgcgtactatcgttttgcatccagttactcatttctcttttttatttcctggtcgctgtggtggtcgttatacgctatttggctgaaaggacatctagggttgacagggacggaattaggtacactttattcggtcaaccagtttaccagcattctatttatgatgttctacggcatcgttcaggataaactcggtctgaagaaaccgctcatctggtgtatgagtttcatcctggtcttgaccggaccgtttatgatttacgtttatgaaccgttactgcaaagcaatttttctgtaggtctaattctgggagcgctcttttttggcctggggtatctggcgggatgcggtttgcttgacagcttcaccgaaaaaatggcgcgaaattttcatttcgaatatggaacagcgcgcgcctggggatcttttggctatgctattggcgcgttctttgccggcatattttttagtatcagtccccatatcaacttctggttggtctcgctatttggcgctgtatttatgatgatcaacatgtgttttaaagataaggatcaccagtgcgtagcggcggatgcgggaggggtaaaaaaagaggattttatcgcagttttcaaggatcgaaacttctgggttttcgtcatatttattgtggggacgtggtctttctataacatttttgatcaacaactttttcctgtcttttatgcaggtttattcgaatcacacgatgtaggaacgcgcctgtatggttatctcaactcattccaggtggtactcgaagcgctatgcatggcgattattcctttctttgtgaatcgggtagggccaaaaaatgcattacttatcggtgttgtgattatggcgttgcgtatcctttcctgcgcgctgttcgttaacccctggattatttcattagtgaagctgttacatgccattgaggttccactttgtgtcatatccgtcttcaaatacagcgtggcaaattttgataagcgcctgtcgtcgacgatctttctgattggttttcaaattgccagttcgcttgggattgtgctgctttcaacgccgactgggatactctttgaccacgcaggctaccagacagttttcttcgcaatttcgggtattgtctgcctaatgttgctatttggcattttcttcctgagtaaaaaacgcgagcaaatagttatggaaacgcctgtaccttcagcaatatag

SEQ ID NO: 485534 - DNA, 201 bp, Shigella sonnei
atgcaacacgaactacaacctgattcactggttgatttgaaattcatcatggctgatactggcttcggtaagaccttcatctatgaccggattaagtccggcgacctgcctaaagccaaagttatccacggacgagcaagatggttatatcgtgaccattgtgaattcaaaaataagctcttaagccgcgccaatgggtaa

SEQ ID NO: 485535 - DNA, 345 bp, Shigella sonnei
atgtcagatttggctatgaaggttttgaaatggcaatcaactggcgatgtcggcatcagtagcgcaactcttgcctcaatcgcatgtggcctgaaaaagaatatctatggtcatcacttcggcgctccccatgacgcagcagactttcggcgatgcgttgcacttgttgagcagattccagaaatcagagattcattcgacaaggttgcaaagcgcgttccggcattcaaaggaatcctcaacgaatgggattcactcgttgctctgttgaagtctgaaatgaagacgtacgggaacaaagcaccagagacttacagaagaatcagcgagctacgcaaggactaa

SEQ ID NO: 485536 - DNA, 150 bp, Shigella sonnei
gtggatgaccccgatctacatgagaatattcgcatttgctatccgtatggcaattatgagtacgataatattatctatgttgaaaagaaaattaatacattaggtgcggtagtgacatatgcacagaccgcgcgtgatgatactgaatga

SEQ ID NO: 485537 - DNA, 459 bp, Shigella sonnei
atggacttagaaaataaattctcatatcattttcttgagggattaacgctcacggaagatggaattcttactcaaggaaatgagcaagtttatattccacagaaagagttaggtgtattaatagtattacttgaatccgctggtcatgttgtactgaaagatatgatcatcgaatcagtatggaaaaatattattgttagtgacgagtccctgacaagatgtatctattctttgcgctgcatttttgaaaaaattggctatgatcgttgcatagaaacaatctaccggaaaggttatcgtttcagcgggcaggttttcaaaactaaaattaatgaagataatacttcagactattccatagctatattccctttcactacttcattgaatacactggatccattaatacttaatcaggaattagtgcaaatcatttcaaataaaaaaatcgatggttag

SEQ ID NO: 485538 - DNA, 492 bp, Shigella sonnei
atgagcacagaaacaattgaaatattcaataatagtgatgaatgggcaaatcaactaaaacacgcattatcgaaaggagaaaatctggcattactacatggtttaactcctgatatccttgatagaatatatgcatatgcattcgactaccatgaaaagggtaatataacggacgcagaaatttattataaatttttgtgcatttatgcgttcgaaaatcatgagtatctaaaagattttgcatcagtatgtcagccaaaaaagaaatatcaacaagcatatgacctttacaaactaagttacaattactccccgtatgatgactattcagttatttatcgtatgggtcaatgtcagattggggctaaaaatatcgataacgcaatgcaatgtttctatcacattattaacaattgtgaggatgatagtgttaagagtaaagcgcaggcatatattgaactcttaaacgataattcagaagataatggctaa

SEQ ID NO: 485539 - DNA, 438 bp, Shigella sonnei
atgaagccacgaaatattaataatagcctaccactgcaaccattagttcctgatcaggagaacaaaaataagaaaaatgaagagaaatccgttaatccagttaaaatcacaatggggtctggtttaaattatattgaacaagaatctcttggaggaaaatatctaacacatgatttgtcaataaagatagcggatatttctgaagagataattcagcaagcaatattatctgctatgagcatatataaattttcgataacagatgatttaatgagtatggctgtaaatgaactcataaaactgaccaaaatagagaataatgtagacctgaataaattcactactatatgcacagacgttctatcccccctcgtcaccagacataataaagaaaaaaaacaaacgacattctacccttctcaaaaatcccctttttaa

SEQ ID NO: 485540 - DNA, 306 bp, Shigella sonnei
atggacattgagttttcgcagattcatgaaatggtctatatgcatgatattgtaaattcggactcgaaaaagaaaccaaggattccgttaaaaaaattccttaatgctgagaatgttctcacgcaaacaacatcatggacattaaattcaagatatgtgaatgttaattctgtcaataaagtcaacgtaaagagtaaagttaaaaacagttatatctcacgatctgtcaatgatgagtttagtttaacagatgatgaaatcaattcttttaaagaaacgttagtcctttcctctattgattcctga

SEQ ID NO: 485541 - DNA, 141 bp, Shigella sonnei
atggatttgcaccagatgttgttgatacatgatattttacattgcaaggagatgtctaaaatgaaagatgttgatcaaaactttgatgctttagactgccatatactgcgagaatatttaattttattgttttatgattaa

SEQ ID NO: 485542 - DNA, 483 bp, Shigella sonnei; identical to SEQ ID NO: 11476

SEQ ID NO: 485543 - DNA, 336 bp, Shigella sonnei
atgttgagcgcatttgtcataggcgcatattctgcatattggctatggaataataatcaaccgaagccatttttcaaggattacaagactgttgcggaaattaatggctgccattttaatgtaacagaagatacaattgatgggttgaaagagttcgataaatataaaacacggatactggattcggggattaactgtaaaaaatatccgtggttatacttccctcttgcaaaatcctcaccggggatgattgttatggcatgcaataaaaactataaccaacatgaagtggcagactgtttaaccctgtcttaccgtgaggttaatcgtgattga

SEQ ID NO: 485544 - DNA, 981 bp, Shigella sonnei
atgaacgcaataatatcgcccgattattactatgttcttaccgttgctggtcagtctaatgccatggcgtatggcgaaggactgccattaccggacagggaagatgcgcctcattccagaattaaacaattagcgagatttgcgcatacgcatcccggaggcccgccatgtcactttaacgacattattccactgactcactgcccacacgatgttcaggatatgcagggttatcaccatcctctggcaacgaatcatcaaacacagtacggcaccgttggccaggcactgcatattgcacggaaattactgcccttcattcctaataatgcagggattcttatcgttccgtgttgccgtggcggatcggcttttaccgcgggcagcgaagggacatattcagaacggcacggagccagccatgatgcttgtcgttggggaacggatactccgctgtaccaggatttagtcagcagaacgcgagccgcactggcaaaaaatccgcagaacaaattcctcggcgtatgctggatgcaaggcgaatttgacttaatgaccagtgactacgcgtcacaccctcaacactttaatcatatggttgaagcctttcgtagggatctaaaacaataccattctcagcttaataatattactgacgcgccatggttttgcggcgataccacctggtactggaaagaaaatttcccgcattcgtatgaagctatttatggcaattatcaaaataatgttttagccaatattattttcgtcgacttccagcaacaaggtgaaagaggactgacgaacgcgcctgatgaagacccggacgatttaagcacgggatattacggttcagcgtaccggtcaccggagaactggacgacggcactgcgaagcagtcatttcagcacggcagcccgtcgggggattatttctgacagatttgtagaagcaattttgcagttttggcgcgaaaggtga

SEQ ID NO: 485545 - DNA, 1107 bp, Shigella sonnei
atgaataaaactataatggcgcttgctatcatgatggcttcatttgccgcaaacgcgtctgtattaccggaaactcctgtgccatttaaaagtggtaccggagcaattgataacgacactgtctacattggtttaggtagcgcaggtacagcatggtacaagctagatacacaggccaaagataaaaaatggactgcgttagctgcattccctggtggaccgagagatcaagcaacctctgcatttattgatggcaatctatatgtgtttggcggcattggcaaaaacagcgagggattgactcaggtatttaatgacgtacacaaatacaaccccaaaaccaatagctgggttaaattgatgtcgctcgcgccgatgggcatggcgggtcatgtgacttttgtacacaacggcaaggcttatgttactggcggtgttaaccagaatatcttcaatggctattttgaagatctcaacgaggctggaaaagattcaaccgctatagataaaatcaacgcccactattttgacaaaaaagcagaagattatttcttcaataagtttctgttgtcttttgatccctcaacacagcaatggagttacgctggcgaatcgccctggtacggaacggctggtgcggcggttgtgaataaaggtgataaaacctggcttattaatggcgaagccaaaccaggattgcgaacggatgccgtatttgaacttgatttcaccggtaataatttaaaatggaataagcttgatcccgtctcatcaccagatggcgtcgctggcggttttgcggggataagcaatgattctcttatatttgccggaggggccggattcaaaggttcacgagaaaattaccagaacggtaagaactatgcgcatgaaggcctgaaaaaatcatatagcactgatattcatctttggcataacgggaaatgggataaatcgggtgaattatcgcaaggtcgggcctacggagtatcattgccctggaataatagtttattaattattggcggtgaaactgcaggcggcaaagcggtgacggattcagttttaatttctgtgaaggataataaagtcacagtacaaaactaa

SEQ ID NO: 485546 - DNA, 717 bp, Shigella sonnei
atgaaaaaggctaaaatactttctggcgtattattactgtgcttttcgtcaccattaatttctcaggctgcgacactggacgtacgtggtggatatcgtagcggaagccatgcctatgagactcgactcaaagtcagtgagggatggcaaaatggatggtgggcaagcatggaaagtaatacctggaataccattcatgataataaaaaggaaaatgccgcactcaatgatgttcaggttgaagttaattacgcgattaaacttgatgatcaatggacggtgcgcccgggaatgttaacgcattttagcagcaacggcacacgctacggaccctacgtaaaactgtcctgggacgcgacaaaagatcttaattttggcattcgctatcgttacgactggaaagcttaccgacaacaagacttatccggtgatatgtctcgtgataacgttcatcgttgggatggatatgtcacttaccatattaatagtgatttcaccttcgcatggcaaacgacgctatacagcaaacagaatgattatcgctatgcaaaccacaagaaatgggcgacggaaaatgcctttgttctacaataccatatgacgcccgatattacgccatacatagaatatgactaccttgaccgccagggtgtttacaacggcagagataatttatcggaaaacagttatcgcattggtgtgtcatttaaactgtag

SEQ ID NO: 485547 - DNA, 1041 bp, Shigella sonnei
atgaaaaaagttttattacaaaaccatcctgggagcgagaagtattcttttaatggctgggaaatatttaatagtaattttgaacggatgattaaagaaaataaggccatgctgctttgtaagtgggggttttatttaacatgtgttgtcgctgtaatgtttgtgttcgcagcgataacatccaacggtttgaatgaaagaggcctgattaccgcgggatgctcttttctttatctattaattatgatggggcttattgttcgggccggttttaaagcaaaaaaagaacaactgcattattatcaggctaaaggtattgagccgctcagtatcgagaagttacaggcgctacaattgatcgcaccttatcgattctatcataagcaatggtctgaaacgctagagttctggccgcgaaagcctgaacctggtaaagataccttccaatatcatgtgcttccttttgactcgatcgatatcatcagtaaaagacgcgagtctttagagaatcaatggggtatcgaagatagcgaaagttattgtgccttaatggagcattttctttctggcgaccatggagccaatacctttaaagcaaacatggaggaagccccagagcaggttatcgccttgttgaataaatttgctgtttttccctcagactatatctctgattgcgctaataatcgctccggtaaatcctcggcgaagctaatatgggcggcggaattatcatggatgacctcgatatcaagcacagcttttcaaaacgggacaattgaagaagaactggcctggcattatataatgcttgcttctcgaaaggcgcacgagttgttcgaaagcgaagaagattatcaaaaaaatagtctaatggggtttctttactggcatatctgctgctatcgcagaaagttaacggatgctgaacttgaagcgtgttatcgttacgacaagcaattttgggagcactacagtaagaaatgccgttggcccataagaaatgttccctggggagcatcatccgttaaatactcataa

SEQ ID NO: 485548 - DNA, 1344 bp, Shigella sonnei
atggatcagacatattctctggagtcattcctcaaccatgtccaaaagcgcgacccgaatcaaaccgagttcgcgcaagccgttcgtgaagtaatgaccacactctggccttttcttgaacaaaatccaaaatatcgccagatgtcattactggagcgtctggttgaaccggagcgcgtgatccagtttcgcgtggtatgggttgatgatcgcaaccagatacaggtcaaccgtgcatggcgtgtgcagttcagctctgccatcggcccgtacaaaggcggtatgcgcttccatccgtcagttaacctttccattctcaaattcctcggctttgaacaaaccttcaaaaatgccctgactaccctgccgatgggcggtggtaaaggcggcagcgatttcgatccgaaaggaaaaagcgaaggtgaagtgatgcgtttttgccaggcgctgatgaccgagctttatcgtcatctgggcgcggataccgacgttccggcaggtgatatcggcgttggtggtcgtgaagtcggctttatggcggggatgatgaaaaagctctccaacaataccgcctgcgtcttcaccggtaagggcctttcatttggcggtagtcttattcgcccggaagctaccggctacggtctggtttatttcacagaagcaatgttaaaacgccacggtatgggttttgaagggatgcgcgtttccgtttctggctccggcaacgtcgcccagtacgctatcgaaaaagcgatggaatttggtgctcgtgtgatcactgcgtcagactccagcggcactgtagttgatgaaagcggattcacgaaagagaaactggcacgtcttatcgaaatcaaagccagccgcgatggtcgagtggcagattacgccaaagaatttggtctggtctatctcgaaggccaacagccgtggtctgtaccggttgatatcgccctgccttgcgccacccagaacgaactggatgttgacgccgcgcatcagcttatcgccaatggcgttaaagccgtcgctgaaggggcaaatatgccgaccaccatcgaagcgactgaactgttccagcaggcaggcgtactgtttgcaccgggtaaagcggctaatgctggcggtgtagcaacgtcgggcctggaaatggcacaaaacgctgcgcgcctgggctggaaagccgagaaagttgacgcacgtttgcatcacatcatgctggatatccaccatgcctgtgttgagcatggtggtgaaggtgagcaaaccaactacgtgcagggcgcgaacattgccggttttgtgaaggttgccgatgcgatgctggcgcagggtgtgatttaa

SEQ ID NO: 485549 - DNA, 273 bp, Shigella sonnei; identical to SEQ ID NO: 461396

SEQ ID NO: 485550 - DNA, 408 bp, Shigella sonnei
atgaaaatgattgaagttgttgccgccatcattgaacgtgatggcaaaattttactcgcgcaacgccccgcccagagcgatcaggcgggattatgggagtttgccgatggtaaagtcgagctggatgaaagccagcagcaggcactggtgcgtgagttaaacgaagaattgggcatcgaagcaactgtgggtgagtatgttgccagccatcagcgagaagtttcgggccggattatccatcttcatgcctggcacgtacccgacttccacgggacgttacaggcacatgaacatcaggcgctggtctggtgctcacctgaagaggcgctgcaatatccgctggcccctgctgacattccactattagaggcgtttatggctttacgcgccgccagagcagcggattag

SEQ ID NO: 485551 - DNA, 276 bp, Shigella sonnei
gtgctagaccgccatcttcatccccggattaaaccgttgttgcatcagtgcgtgcgggttcttgataaaccgggcattacgccagatggtttaacattagtgggatttgccatcggcgtgctggctctgccgtttctggcgctgggctggtatctggcggcgctagtcgtcattttgttgaacaggctgcttgatggtctggacggtgcgctggcgcggcgcagagagcttaccgacgcgggcggctttcttgatatttctcttgattttcggtga

SEQ ID NO: 485552 - DNA, 417 bp, Shigella sonnei
gtggggctgaccgatatactggaaagttcagggcttagcggcatcccggcgtttgtcggtctggcgttgctttcctctttcttatgcatgtttattgccagcggttccgcaatctggtcgattctggcccccattttcgtaccaatgtttatgctacttggctttcacccggcatttgcgcaaatcctctttcgtattgccgactcatccgtattgcctttagcgccggtatctccttttgttccactgtttcttggattcctgcaacgctacaaaccagacgcgaaactgggtacttactattcgttagtcttgccctatccgcttatctttttggtggtatggctgctgatgttgctggcgtggtatcttgttggtctgccgataggtccggggatttacccacgtttgtcttaa

SEQ ID NO: 485553 - DNA, 516 bp, Shigella sonnei
atgctgagattacttgaagaaaaaattgccacgccactgggtccactgtgggtgatttgcgatgagcaatttcgcctgcgggcggttgaatgggaagagtacagcgaacgcatggtgcagctgctggacatccattatcgcaaagaaggctatgagcgcatttctgccaccaacccaggcggtttaagcgacaagcttcgtgattattttgccggtaatcttagcattattgatacgcttcccactgccacaggggggacgccatttcagcgcgaagtctggaaaactctacgcactatcccctgcggacaggtaatgcattacggccaactggctgaacaattgggccgccctggcgcggcgcgtgccgttggtgcggcaaacggatcgaatcccatcagcatcgtcgtaccttgccatcgggttattggccgaaacggcaccatgaccggatatgcaggcggagttcagcgaaaagagtggttattgcgccacgaaggttatcttttgctgtaa

SEQ ID NO: 485554 - DNA, 753 bp, Shigella sonnei
atgatcccggaaaagcgaattatacggcgcattcagtctggcggttgtgctatccattgccaggattgcagcatcagccagctttgcatcccgttcacactcaacgaacatgagcttgatcagcttgataatatcattgagcggaagaagcctattcagaaaggccagacgctgtttaaggctggtgatgaacttaaatcgctttatgccatccgctccggtacgattaaaagttataccatcactgagcaaggcgacgagcaaatcactggtttccatttagctggcgacctggtgggatttgacgccatcggcagcggccatcacccgagcttcgctcaggcgctggaaacctcgatggtatgtgaaatcccgttcgaaacgctggacgatttgtccggtaaaatgccgaatctgcgtcagcagatgatgcgtctgatgagcggtgaaatcaaaggcgatcaggacatgatcttgctgttgtcgaagaaaaatgccgaggaacgtctggctgcattcatctacaacctgtcccgtcgttttgcccaacgcggcttctcccctcgtgaattccgcctgacgatgactcgtggcgatatcggtaactatctgggcctgacggtagaaaccatcagccgtctgctaggtcgcttccagaaaagcggtatgctggcagtcaaaggtaaatacatcaccatcgaaaataacgatgcgctggcccagcttgctggtcatacgcgtaatgttgcctga

SEQ ID NO: 485555 - DNA, 951 bp, Shigella sonnei
atggctatgtatcagaacatgctcgttgttatcgatcctaaccaggacgaccaaccagcattgcggcgagctgtttatttacatcaacggattggtggcaaaattaaagcctttttgccgatctatgacttctcatacgaaatgaccaccctgctctccccggacgaacgtaccgctatgcgtcagggcgtcatcagccagcgtacagcctggatccacgagcaggcaaaatattatctcaatgctggcgttcccattgaaattaaagtggtctggcataaccgtcccttcgaagccatcattcaggaagtgatcagcggcgggcacgatttggtgctaaaaatggcgcaccaacatgaccgtctggaagcggtgatttttacgccaacggactggcatctgttacgcaaatgcccaagcccggtgtggatggtgaaagaccagccgtggccggaaggaggtaaggcgctggtggcggtgaatcccgccagtgaagagccgtatcataatgcgctcaatgaaaaactggtcaaagagacgatcgaactggcagaacaagtcaaccataccgaagttcatctggttggcgcttacccagtaacgccaattaatatcgcgattgaactgccggaatttgatccgagcgtttataacgatgccattcgtgggcaacatttgctggcaatgaaagctctgcggcagaaattcggcattaatgaaaacatgacgcacgtagaaaaaggtctgccggaagaggttattcctgatttggcggagcacttacaggcggggattgtggttctgggcacggtaggacgcaccggtatttcagcagcattcctcggcaacacggcggaacaggtgattgatcatcttcgctgcgatctgttggtcattaaacctgaccagtatcagacacccgttgaactggatgacgaagaagacgattaa

SEQ ID NO: 485556 - DNA, 258 bp, Shigella sonnei
atgattatggcgaaactgaagtcagcgaaagggaaaaaatttctctttggtttgttggcggttttcattattgcggcgtcggttgtgactcgcgcgactatcggcggcgttatagaacagtacaatattccgctgtctgagtggacgacatcaatgtatgtgattcagtcatcgatgatttttgtttatagcctggtctttactgtgttgctggcaatcccgttgggaatttatttccttggcggcgaagagcagtaa

SEQ ID NO: 485557 - DNA, 207 bp, Shigella sonnei
atgatcgctgaactgtttacaaataatgcgcttaatctggtcattattttcggtagctgcgcagcattgattctgatgagcttttggtttcgccgcggaaatcgtaaaagaaaaggttttttattccatgcggtgcaatttttaatctacaccataattatcagtgctgttggtagcattattaaggtaatgactccaacttattga

SEQ ID NO: 485558 - DNA, 390 bp, Shigella sonnei
atgtctaaatataacccaaatcagttttataaatttgatgtgcgaatctctcaactttcagaagaaattaacgcagcagcaagattgatttatatggtcatggtccatagctgtgacttctatgaagagaaatacaaatcatattcaccaagtattgaccatctcgcttatatggctggtgtatcaaagagaacagcaatcagagccattgagacacttgagaaacacggtttaattcaggtgcaaaagaatcaggggcgtcaaagcacttatcgtgtattcacactggatgataagccggaattacttgtaagacctacatcacaggaagttgcagcctcagtaagacaaaatgacaccactaccagtgacaaaatgtcatgggggtag

SEQ ID NO: 485559 - DNA, 348 bp, Shigella sonnei
atgaatgaatctgaccttgaagtaagctctaaaaagacttctaaacaagacagagaaatcactgatgtgagtgttgatagtgaccataaaaacacacagtgccccgccactgatgatgagttggaccccttcgatgatgaagaggatgaacgtgaaaaagccattaagagggcagagaagaaaaagagattcgagcttgcaagacaaaagaacaaagtatcgggtttagacccattcgatgacagtgaagatgattattatctttcaccgaaaaagaaacaaactcaggatgacaagaagcaaaaaattaaaccgaagatgtattttgccggtggaggaattaagtaa

SEQ ID NO: 485560 - DNA, 291 bp, Shigella sonnei
atgaaagaatatcacggtgaaaagagatacaaagattacctgttaaagcgttacagcatttctcgtgaaggtcatcttatgaaggatactcacggggaagtttaccggattagaccaaagaaagaagggaggggttatttcttttacgatggtgtgacagatttaaagattgacgctttgaggtttgcagtgctgtatcattttgatatctggaattcaatccaccagctacgattaaaagacggtgaccccagcaacttaaaggccaccaatattatcacaaaacgttag

SEQ ID NO: 485561 - DNA, 186 bp, Shigella sonnei
atgggctttcttgaaacaattgctgaatctcacagattcgcaagcttaggttgctttgtgtttctggtgcttcttgtgtatcagcttttaaaaatgattatcgccagaagtacacgattcaatttcagcattaagcttttcaaatatgaaatcacaattacgattgatgatggtaaaacaaactaa

SEQ ID NO: 485562 - DNA, 291 bp, Shigella sonnei
atgagacacacagttacacgccttttgccagaggcatattccagactggcagcaatcaaagacaaatacccagccatgagccacacagcacttgttggtgagattttgaaggaacacatagcccttacaccgtttgacgctatcaagggcgttgcagagggttctaaggccatcagaatcacaacgggccaactggaactactcaaagcacagtccgcagtggcaggttgctcaatgattcaggtgttgagtgccaaggttcatcaactggcggataagctgggggtttaa

SEQ ID NO: 485563 - DNA, 420 bp, Shigella sonnei
atgctatgcacatttgattatcatgcgttttatcgccatagaggtcaccttgtccgtgagaataacggaacatggaaagatttaactcgtaatgctgaacccttcacacaccagcaattaaaatcccgcttctccagatggaagaatgcaccagcagatactggtgattttgagattatccataccttcgattatgcctcagaagatgaccttcacgatgcaattaagctgattgaagacttcaatacctcagaagatgtggatggtgacaaatataaatcccgtggtaaccgctataaccgtgatgatatcactcaggccataaatgctggtcaatctcagcgatacattacagaaaaatatggtatttcacggagacagtatttctacattaagccattgattaataaagacaattaa

SEQ ID NO: 485564 - DNA, 324 bp, Shigella sonnei
atgaataattacccaatgcaaattatggttgataacgacactgctatgatggtgcaaagcttcattgatgcaggtatcgcaattaattttgataaattactaaagctgatggctgataatgcagaaaacatctctgactttattcagtcggtggagtttaacgagcctcgaatgatgctaccaattacagacagcaacatgaaaagattggttatcgagcaaacgaacatatacagtatttccccagagcaatttttgaaaggtgctgtgacaatcctgtacagtgataatattctggtgacggattctgtgagggttcactaa

SEQ ID NO: 485565 - DNA, 612 bp, Shigella sonnei
atgattagaaatgaacatgaaatgcttatcgaacacagaccaagtgcacttgatattcacgaattaactttgcgtgaatcttttgatagagcttggcgggaatcacacgaagtaaataaaggtccatatattccaccagaaccactcgagattccaagagttgaaattgatttttctatgaacgaacggtgtgaacttgatttgaagttgaagctacaacgccgatatttccaagctattaaagactctcaagaagcaatgagaagtgtttacgagaaaattcagtccaagcttgaagacgaaattgacgaaatggttatttcgatggagcttcaaaccaattcttatgcttatttctctcgactagaccgtgacggttgggggtatgaccctgtagagattggtaaagtgattgcagatttaccagaaggtcaaagagttgttcgtacagaaagagctgtcagagcaccacatcgactgtctctaattgttgctgataaatcacaagctgagcttgaagaaattgccaaagagaaactgatgaaagcaagagaaaatgagattaatttgctgaaatcaagactggctaagctgattagtgaggtagcctga

SEQ ID NO: 485566 - DNA, 396 bp, Shigella sonnei
atgtgtgaaggatatgttgaaaaaccactctacttgttaatcgccgaatggatgatggctgaaaatcggtgggtgatagcaagagagatctctattcatttcgatattgaacacagcaaggcggttaataccctgacttatattctgtcggaagtcgcagaaataagctgcgcagttaagatgatccctaataagctggaaggacggggatgccagtgccagcgactggtaaaagtggtcgatatcgatgagcaaatttacgcgcgcctgcgcaataacagccgggataaattagtcggcgtaagaaagacgccgcgtattcctgccgttccgctcacggaacttaaccgcgagcagaagtggcagatgatgttgtcaaagagtatgcgtcgttaa

SEQ ID NO: 485567 - DNA, 591 bp, Shigella sonnei
gtgagctattacgcctttgaggggttaattccggtggttcacccgacggcgtttgtccatcccagtgccgtcttgattggcgatgtgattgtgggagccggtgtctacatcggcccactcgcctcactgcgtggtgactacgggcggttgatcgtgcaagcgggagccaatattcaggatggctgcattatgcatggctactgcgacactgacaccatcgttggggaaaacggccatatcgggcacggagcgatcctgcatggttgtgtgattggtcgcgatgcattggtcgggatgaacagcgtgattatggatggcgcggtcattggcgaagagagcattgttgccgccatgagctttgtcaaagcaggctttcacggcgagaaacgccagttgttgatgggtacgccagcccgcgctgtacgcagtgttagtgacgacgagttacactggaaacggttgaataccaaagagtatcaggatcttgtcgggcgctgtcatgcatcgttacatgaaacacagccactgaggcaaatggaggaaaatcgcccccgtttgcaggggacgacggatgtgacgcctaaacggtga

SEQ ID NO: 485568 - DNA, 786 bp, Shigella sonnei
atgagtgaatcattacatctgacccgcaatggatcaattctggaaattacccttgatcgtccaaaagcgaatgctattgatgcaaaaaccagctttgaaatgggcgaagtatttctaaatttccgtgacgatccgcaattacgtgtcgccattattaccggtgccggagagaagttcttttccgcgggctgggatttaaaagcggcagcagaaggcgaagcaccggatgctgactttggcccgggtggatttgcgggattaaccgaaattttcaatctcgacaaaccggttatcgcagctgtgaacggctatgcctttgacggcggtttcgaactggcgctggcggcagattttattgtttgtgccgataacgccagcttcgccctgccggaagccaagctgggcatcgttcctgacagcggcggcgtgctgcgtctaccgaagatcctgccgcctgccatcgtcaatgaaatggtgatgaccggcagacgaatgggcgcagaagaggcgctgcgttgggggatagtcaaccgcgtggttagccaggcggaactgatggataacgcccgcgaactggcgcagcagctggttaacagcgccccgctggcgattgcggcgctgaaagagatcttccgcaccaccagcgaaatgccggtagaagaagcgtatcgctatattcgcagcggcgtgttgaaacactatccgtcggttctgcattcggaggatgccattgaagggccgctggcgtttgccgagaagcgcgatccggtgtggaaaggacgttaa

SEQ ID NO: 485569 - DNA, 1554 bp, Shigella sonnei
atggatatcattggcggacaacatctacgtcaaatgtgggacgatctggcggacgtttacggtcataaaacggcgctgatttgtgaatccagcggcggagtcgttaaccggtatagttatcttgagttaaatcaggagattaaccgcacgacaaacctgttttatacgctggggattcgcaaaggcgacaaggttgctctacatctcgacaactgcccggaatttatcttttgctggttcgggctggcaaaaattggcgcgattatggtgccgattaacgcccgcctgttgcgcgaggaaagcgcgtggatcctgcaaaatagccaggcgtgcctgctggtgaccagtgcgcaattctatcctatgtatcaacagattcagcaggaagatgccactcaattgcggcacatttgcctgacagatgtggcacttcccgctgatgatggcgtgagttcgtttactcaactgaaaaatcaacaacctgccaccttgtgctatgcaccgccgctatcgactgacgatacggcggaaattctcttcacctccggcaccacctcccgaccgaaaggtgtggtgattacccattacaacctgcgcttcgctggatattactccgcctggcagtgtgcactgcgtgacgatgacgtctacctgacggtaatgcctgcgtttcatatcgattgccagtgtactgcggcgatggcggcgttttctgccggggccacctttgtgctggtcgagaaatacagcgcccgcgccttctggggacaggtacagaagtaccgcgccaccgttaccgaatgtattccgatgatgatccgtaccttgatggcgcagccgccttcagcgaacgatcggcaacaccgcctgcgggaagtgatgttttatctcaacttgtcggagcaggaaaaagatgcgttttgtgaacgcttcggcgttcgcttgctgacgtcttatgggatgacggaaaccattgtgggcattatcggcgatcgccctggcgataaacgacgctggccgtcgattggtcgggcggggttttgctacgaagcggagatccgcgacgatcacaatcgcccgctcccggcaggtgagatcggtgaaatctgtattaaaggcgtaccagggaaaaccatcttcaaagagtattttctcaacccgaaagccactgcgaaagtgctggaagccgacggctggctacataccggcgataccggatactgcgacgaagagggctttttttatttcgtcgatcgccgctgcaatatgatcaaacgcggtggcgagaatgtctcctgcgtggagctggaaaatatcatcgccacccatccaaaaattcaggatatcgtggttgtgggtattaaagattcgattcgcgatgaagccatcaaagcatttgtggtgctgaatgaaggtgaaacattgagcgaagaggaatttttccgcttctgcgaacaaaatatggcgaaatttaaagtgccctcttatctggagatcagaaaagatctgccacgtaattgctcggggaaaataattagaaagaatctgaaataa

SEQ ID NO: 485570 - DNA, 810 bp, Shigella sonnei
atggaaaagaaaatcggttttattggctgcggcaatatgggaaaagccattctcggcggtctgattgccagcggtcaggtgcttccagggcaaatctgggtatacaccccctccccggataaagtcgccgccctgcatgaccagttcggcatcaacgccgcagaatcggcgcaagaagtggcgcaaatcgccgacatcatttttgccgccgttaaacctggcatcatgattaaagtgcttagcgaaatcacctccagcctgaataaagactctctggtcgtttctattgctgcaggtgtcacgctcgaccagcttgcccgcgcgctgggccatgaccggaaaattatccgcgccatgccgaacactcccgcgctggttaatgccgggatgacctccgtaacgccaaacgcgctggtaacccccgaagataccgctgatgtgctgaatattttccgctgctttggcgaagcggaagtaattgctgagccgatgatccacccggtggtcggtgtgagcggttcttcgccagcctacgtatttatgtttatcgaagcgatggccgacgccgccgtgctgggcgggatgccacgcgcccaggcgtataaatttgccgctcaggcggtaatgggttccgcaaaaatggtgctggaaacgggagaacatccgggggcactgaaagatatggtctgctcaccgggaggcaccaccattgaagcggtacgcgtactggaagagaaaggcttccgtgccgcagtgatcgaagcgatgacgaagtgtatggaaaaatcagaaaaactcagcaaatcctga

SEQ ID NO: 485571 - DNA, 459 bp, Shigella sonnei
atgacaatttgggtggatgccgacgcgtgtcccaatgtaattaaagagattttgtatcgcgcggcggaacgtatgcagatgccgctggtactggtagcaaaccagagtttacgcgtgccgccatcgcgatttattcgtacgctgcgcgtcgcggcaggtttcgacgttgccgataacgaaattgtccggcagtgtgaagcgggcgatttggtgatcaccgcagatatacctttggctgctgaagccatcgagaaaggcgcagcggcgcttaatccgcgcggcgaacgttacacgccagcgaccattcgtgagcgcctgacgatgcgcgattttatggataccttacgtgccagtgggatccagaccggcggaccagatagcctttcacaacgtgaccgccaggcctttgccgcggagctggagaagtggtggctggaagtgcaacgtagtcgtggctaa

SEQ ID NO: 485572 - DNA, 525 bp, Shigella sonnei
atgacacaacctctttttctgatcgggcctcggggctgtggtaaaacaacggtcggaatggcccttgccgattcgcttaaccgtcggtttgtcgataccgatcagtggttgcaatcacagctcaatatgacggtcgcggagatcgtcgaaagggaagagtgggcgggatttcgcgccagagaaacggcggcgctggaagcggtaactgcgccatccaccgttatcgctacaggcggcggcattattctgacggaatttaatcgtcacttcatgcaaaataacgggatcgtggtttatttgtgtgcgccagtatcagtcctggttaaccgactgcaagctgcaccggaagaagatttacggccaaccttaacgggaaaaccgctgagcgaagaagttcaggaagtgctggaagaacgcgatgcgctatatcgcgaagttgcgcatattatcatcgacgcaacaaacgaacccagccaggtgatttctgaaattcgtagcgccctggcacagacgatcaattgttga

SEQ ID NO: 485573 - DNA, 192 bp, Shigella sonnei
atgccaacgaaaccgccttatcctcgtgaagcatatatagtgacgattgaaaaaggaaagccaggacagacggtaacctggtaccaactcagagccgatcatcctaaaccagactcgttgatcagtgaacatccgacggctcaggaagcgatggatgcgaaaaaacgctatgaggaccctgacaaagagtga

SEQ ID NO: 485574 - DNA, 678 bp, Shigella sonnei
atgagtgcgtcgttggcgatcctgaccatcggcattgtacctatgcaggaggttttgccgctcctgacggaatacattgacgaagataatatttcccatcatagcctgctggggaagttaagtcgtgaagaagtgatggcggagtacgcgccagaagcaggcgaagacaccattctcacattattaaatgacaaccagctggcccatgtttcgcgtcgtaaagtggagcgagacctgcaaggtgtggttgaagtgctcgataatcagggttatgacgtcattttattaatgagtacagcaaacattagtagtatgactgcgcgtaatacgatctttcttgagccgtcgcgaatattgcctccactggtttcctctattgttgaagatcatcaggtgggggttatcgttccggttgaggagatgctgaccgttcaggcgcaaaaatggcaaattttgcagaaatcgccggtattttcattgggtaaccccattcatgattcagaacaaaaaatcattgatgccgggaaagaattactggcaaaaggggctgatgtcatcatgctggattgtttaggatttcaccaacgtcatcgcgatttactgcaaaaacagctcgatgttcctgtcttgctgtctaacgtattgattgcacggctggctgcggaattactggtgtaa

SEQ ID NO: 485575 - DNA, 285 bp, Shigella sonnei
atgcttcaaagtaatgagtacttttccggcaaagtgaaatcaatcggcttttccagcagcagcactggtcgcgccagcgtgggtgttatggttgaaggcgaatacaccttcagcaccgctgagccggaagagatgacggtaatcagtggcgcgctgaatgtgttactgcctgacgcgaccgactggcaggtgtatgaagccggttcggtgtttaatgttcccggtcacagtgagtttcatctgcaagttgccgaacccacctcttatctgtgccgctatctgtaa

SEQ ID NO: 485576 - DNA, 1680 bp, Shigella sonnei
atgactcaatttacgcaaaataccgccatgccttcttccctctggcaatactggcgcggcctttccggctggaacttctattttctggttaagttcggcctgttgtgggcgggatatcttaacttccatccgctcctcaatttggtgtttgccacgtttctgctgatgcccattccgcgctacagcctgcatcgcttgcgccactggattgccctgccgatcggctttgctttgttctggcatgacacctggttgcctggcccggaaagcataatgagccagggttcgcaggtggcggggttcagtaccgattatttaatcgaccttgtcacacgctttattaactggcagatgattggggccatttttgttttattagtggcctggttattcctgtcacaatggattcgcattaccgtttttgtggttgccatactgctatggctgaacgtacttaccctggcgggaccaagtttctccttgtggccagccggacaaccgacgaccactgtaacaacgacgggtggtaacgcagcggcaaccgttgcggcgacgggtggcgcatcggtagtgggtgatatgcccgcacaaactgcaccgccaacaacggcgaaccttaacgcctggctgaataatttctataacgcggaggcgaaacgtaaatcgaccttcccgtcttcgctgcccgctgatgctcagccatttgaactactggtgattaacatctgttcgctttcctggtcggatatagaagccgccgggttgatgtcgcatccactgtggtcgcatttcgatattgagttcaagaactttaactccgccacctcctacagtggcccggcggcgatccgtttactgcgcgccagctgcgggcagacttcgcacactaatctgtatcaaccggcaaataacgactgctatctgtttgataacctttcgaaactgggctttacccagcacctgatgatgggacataacggccagttcggcggttttttgaaagaagttcgcgaaaatggcggcatgcagactgaattgatggatcaaacaaatctgccggttattttgctgggctttgatggttcgccggtttatgacgataccgccgtgcttaaccgctggctggacgttaccgaaaaagataaaaacagccgtagtgccacgttctacaacacgcttccactgcatgacggcaaccattatccgggggtcagcaaaacagcggattacaaagcgcgggcgcagaaattctttgatgaactggacgccttctttactgaactggagaaatcgggtcgtaaagtgatggtggtcgtggtgccggaacacggcggcgcgctgaagggcgacagaatgcaggtatctggcctacgtgatatccctagcccgtctatcacagacgtccccgttggggtgaaattcttcggcatgaaggcaccacatcagggggcaccgattgtcattgaccaaccgagcagcttcctagctatctccgatctggtggttcgcgttcttgatggcaagattttcaccgaagacaatgttgactggaaaaaactcaccagtgggttgccacaaacagcaccggtctccgagaactcaaatgcagtagttattcaataccaggataaaccgtacgttcgcctgaacggcggcgactgggtgccttacccgcagtaa

SEQ ID NO: 485577 - DNA, 192 bp, Shigella sonnei
atgatgaccatcagcgatatcattgaaattattgtcgtttgcgcactgatatttttcccgctgggctatctggcgcggcactttttgcgacgcattcgcgacaccttacgtttattctttgctaaacctcgttatgttaaaccggccgggacgttacgccgcacggaaaaagccagggcaaccaaaaaatga

SEQ ID NO: 485578 - DNA, 1560 bp, Shigella sonnei
gtggaccctgtattctctatcggtatctcatcattatgggatgagctgcgacatatgccagcaggcggcgtctggtggtttaacgtcgatcgccatgaagatgctatcagtctggcgaatcaaacaattgcatcccaggctgaaaccgcacacgtcgcggtcattagcatggacagcgatccggcgaaaatctttcaattagatgattctcaagggccggaaaaaataaaattattttcaatgctaaatcatgaaaaaggtctatactatttggcccgtgatttgcagtgttctattgatccccataattacctttttattcttgtttgcgcaaataacgcatggcaaaacattcctgccgagcggcttcgctcatggttggataaaatgaataaatggagcaggttaaaccattgttcgcttttggtaattaatcccggaaataataacgataaacaattttcattgttgcttgaggaataccgttcactttttggtcttgccagtttgcgttttcagggtgaccaacatttgctggatattgccttctggtgcaacgaaaaaggggtcagcgcccgtcagcagcttagcgttcagcaacaaaatggtatctggacattagttcaaagcgaagaggcggagatccaaccacgcagcgacgaaaaacgcattctgagtaatgttgctgtactggaaggtgcgccgccgctatcggaacactggcaactgttcaacaataacgaagtcctgttcaatgaagcccgtaccgctcaggcggcgacggtggtcttttctttacagcaaaatgcgcaaatcgagccactggcccgcagcattcataccctgcgtcgccagcgcggtagtgcgatgaaaatcctcgtgcgggaaaataccgctagcctgcgcgccaccgatgaacgtttgttattggcctgcggtgcaaatatggttattccgtggaatgcgccactctcccgttgtctgacgatgatcgaaagcgtgcaagggcagaagtttagtcgctatgtgccggaagatatcactaccttgctgtcaatgacccagccgctcaaactgcgtggtttccagaagtgggatgtgttctgtaatgccgtcaacaacatgatgaataaccctctattacctgcccacggtaaaggcgttctggttgccctacgtccggtaccgggtatccgcgttgaacaagccctgacgctgtgtcgccctaaccgtaccggcgatatcatgaccattggcggtaatcggctggtgctgtttctctcattctgtcggattaacgatctggataccgcgttgaatcatattttcccattgcctactggcgacattttctcaaaccgtatggtctggtttgaagatgatcaaatcagtgccgagctggtgcagatgcgcttgcttgccccagaacaatggggcatgccgctgcctttaacgcaaagttctaaaccggtcatcaatgccgagcacgatggtcgccactggcgacgaataccagaacccatgcgactgttagatgatgctgtggagcgctcatcatga

SEQ ID NO: 485579 - DNA, 1323 bp, Shigella sonnei; identical to SEQ ID NO: 461264

SEQ ID NO: 485580 - DNA, 1332 bp, Shigella sonnei
atgtatatcgggatagatcttggcacctcgggcgtaaaagttattttgctcaacgagcagggtgaggtggttgattcgcaaacggaaaagctgaccgtttcgcgcccgcatccactctggtcggaacaagacccggaacagtggtggcaggcaactgatcgcgcaatgaaagctctgggcgatcagcattctctgcaggacgttaaagcattgggtattgccggccagatgcatggagcaaccttactggatgctcaacaacgggtattgcgccctgccattttgtggaacgacgggcgctgtgcgcaagagtgcactttgctggaagcgagagttccgcaatcacgagtgattaccggcaacctgatgatgcccggatttactgcgcctaaattgctatgggttcagcggcatgagccggagatattccgtcaaatcgacaaagtattattaccgaaagattacttgcgtctgcgtatgacgggggagtttgccagcgatatgtctgacgcagctggcaccatgtggctggatgtcgcaaagcgtgactggagtgacgtcatgctgcaggcttgcgacttatctcgtgaccagatgcccgcattatacgaaggcagcgaaattactggtgctttgttacctgaagttgcgaaagcgtggggtatggcgacggtgccagttgtcgcaggcggtggcgacaatgcagctggtgcagttggtgtgggaatggttgatgctaatcaggcaatgttatcgctggggacgtcgggggtctattttgctgtcagcgaagggttcttaagcaagccagaaagcgctgtacacagcttttgccatgcgctaccgcagcgttggcatttaatgtctgtaatgctgagtgcagcatcgtgtctggattgggccgcgaaattaaccggcctgtgcaatgtcccagctttaatcgctgcagctcaacaggctgatgaaagtgtcgagccagtttggtttctgccttatctttccggcgagcgtacaccacacaataatccccaggcgaagggggttttctttggtttgactcatcaacatggccccaatgaactggcgcgagcagtgctggaaggcgtgggttatgcgctggcagatggcatggatgtcgtgcatgcctgcggcattaaaccgcaaagtgttacgttgattggtggcggggcgcgtagtgagtactggcgtcagatgctggcggatatcagcggtcagaagctcgattaccgtacgggggggggatgtggggccagcactgggcgcagcaaggctggcgcagattgcggcgaatccagagaaatcgctcattga

SEQ ID NO: 485581 - DNA, 342 bp, Shigella sonnei; identical to SEQ ID NO: 472838

SEQ ID NO: 485582 - DNA, 186 bp, Shigella sonnei
atggacaacaaaatatcaacctattcaccggcctttagtattgtgtcatggatagctctcgttggtggtatcgttacctatctgttagggctatggaatgcagagatgcagttaaatgaaaaagggtattattttgccgtactggtggatttgcccctatatttccagacatctgttatcacttaa

SEQ ID NO: 485583 - DNA, 1650 bp, Shigella sonnei
atgctcaatcagaaaattcaaaaccctaatccagacgaactgatgatcgaagtcgatctctgctatgagctggacccgtatgaattaaaactggatgagatgatcgaggcagaaccggaacccgagatgattgaagggctgcccgcctctgatgcgctgacgcctgccgatcgctatctcgaactgttcgagcatgttcagtcggcgaaaattttcccggacagtaaaacctttcccgactgcgcacctaaaatggacccgctggatattttaatccgctaccgtaaagtgcgccgtcatcgtgattttgacttgcgcaagtttgttgaaaatcacttctggctgccggaggtctactccagcgagtatgtatcggacccgcaaaattccctgaaagagcatatcgaccagctgtggccggtgctaacccgcgaaccacaggatcacattccgtggtcttctctactggcgctgccgcagtcatatattgtcccaggcggccgttttagcgaaacctactattgggactcctatttcaccatgctggggctggcggaaagtggtcgggaagatttgctgaaatgcatggccgataacttcgcctggatgatcgaaaactatggtcacatccccaacggcaaccgcacctattatttgagccgatcgcaaccaccggtttttgcgctgatggtggagttgtttgaagaagatggtgtacgcggtgcgcgccgctatctcgaccaccttaaaatggaatatgccttctggatggacggtgcagaatcgttgatccctaatcaggcctatcgccatgttgtgcggatgccggacggatcgctgctcaaccgttactgggacgatcgcgacacgccgcgtgacgaatcctggcttgaggacgttgaaaccgcgaaacattctggtcgcccgcccaacgaggtgtaccgcgatttacgcgcgggggcggcctccggttgggattactcttcccgttggctgcgtgatactggtcgtctggcgagcattcgtaccacccagttcatccccatcgatctgaatgccttcctgtttaaactggagagcgccatcgccaacatctcggcgctgaaaggcgagaaagagacagaagcgctgttccgccagaaggccagtgcccgtcgcgatgcggtaaaccgttacctctgggatgatgaaaacggcatctaccgcgattacgactggcgacgcgaacaactggcgctgttttccgctgccgccattgtgccgctctatgtcggcatggcgaaccatgaacaggccgatcgtctggcaaacgccgtacgcagccggttactgacacctggcgggattctggcaagcgagtacgaaaccggtgaacagtgggataaacccaacggctgggcaccgttacaatggatggcaattcagggatttaaaatgtatggcgatgaccttctgggtgatgaaatcgcgcgcagctggctgaaaacggtgaatcagttctatctggaacagcacaaaatgatcgagaaataccatattgccgatggtgttccccgcgaaggcggcggtggcgagtatccgttgcaggatgggtttggctggactaacggtgtggtacgccgtttaattggtttgtacggcgaaccataa

SEQ ID NO: 485584 - DNA, 1398 bp, Shigella sonnei
atgaaaatggtctcacgtattaccgcgatcggcctggctggcgtcgcgatttgctatttagggttatctggttatgtgtggtaccacgataataaacgcagtaaacaggccgatgttcaggcatccgctgtcagtgaaaataataaggttttaggttttctccgcgaaaaaggatgcgactattgccacacgccttcggcagaattacccgcctattattatattcctggcgcgaaacagttgatggattacgacattaagcttggatataaatcttttaacctcgaggccgtgcgtgcggcactgctggctgataaacccgtttcgcaaagcgatctgaataagattgaatgggtgatgcagtatgaaactatgccgccaacgcgttataccgcgcttcactgggcgggtaaggtgagtgatgaagagcgggcggaaatactggcctggattgcaaaacagcgcgcggaatattacgccagcaatgatactgctccggagcatcgcaatgaaccggtgcagcccatcccgcaaaaactgcctaccgatgcgcaaaaagtggcgttgggctttgcgctgtatcacgatccccgtttatcggctgatagcaccatttcatgcgctcattgccatgcgttgaatgcggggggcgtcgatggcagaaaaacatcgattggtgttggtggcgcagttgggccgattaacgcgccgacggtatttaactcagtatttaacgttgagcagttctgggatggtcgtgcggcaacattgcaggatcaggctggtggaccgccgttgaacccgattgaaatggcgtcgaaatcttgggacgaaattattgctaagctggaaaaagatccgcagcttaaagcgcagttcctcggcgtctatccgcaaggtttcagtggcgaaaatattactgatgccattgctgaatttgagaaaacattaattacgccggattccccatttgataaatggttgcgtggagatgaaaatgcgctgacggcgcaacagaaaaaaggctatcaattatttaaagataataaatgtgcaacttgtcatggtggtattattctcggtggacgttcctttgaaccgttggggctgaaaaaagactttaactttggggaaattacggcggcggatattggtcgtatgaatgttactaaagaagagcgtgataaattgcgtcagaaagtacccggtttacgtaacgttgctttaacggcaccgtacttccatcgcggtgacgtgccgacgctggacggggcggtgaaactgatgctgcgctatcaggtaggcaaagagctgccgcaggaggatgtggatgatatcgtagctttcctgcacagtctgaacggggtgtacacgccgtatatgcaggataaacaataa

SEQ ID NO: 485585 - DNA, 258 bp, Shigella sonnei
ttgaacaaccagacaatgacttttacccctgaacaattgcgtaaacacgcgcaggaaatgctgcgtcatgctgaacaactcgaaaaaacgggcataacaaaagacgctatccgtaaagatatggtacccgcgcttcgggaactgatgcaggcgaagcatcgcgcacagaaagcagtagatgagctggtggactgtgtggcagagctggaaaccagagtcggaaagtttgaaaaactggtgcaggaggtgctgcgctga

SEQ ID NO: 485586 - DNA, 375 bp, Shigella sonnei
atgcgccatgagtttattttaccttatccgccgacggtgaatacttactggcgacgtcgtgacaacacatattttgtatcaaaagccggtgagcgttatcgccgggatgtggcgcttattgtccgtcagcagcgactgaaattaagcctgtccggaagactggcgataaagattattgcagagccaccggataagcgccgtcgtgacctggacaatatcctgaaagcaccactggatgcactgacacatgcgggagtgttaatggacgatgagcagtttgatgaaatcaatatcgttcgtggtcagccagtatctggtggacgtctgggggtgaagatttaccccataatgcatgaagagcaggtcaaaaaatga

SEQ ID NO: 485587 - DNA, 855 bp, Shigella sonnei
atgaaactggaagatttaccgaaatactactccccaaaatccccttgcctgaccgatgcatcggcctcaacgtcaaaagatgcgctgagtatcactgatgtgatggccgcgcagggcatgacacagaatcgggctgagatggggttttctgcgttcctggggaaaatgggcatcagtatgaatgacagggcgcgggcaacagaattactggcagattatgcactcagtcggtgcgatcgtgtggcggcgttgagaaaacttccggcagaaataaaaccggtagtgatgcgcattatggcttcgtacgcttttgaggattatgcccgcagcgcagcgagtaaaaagcagtgcccttgttgctatggggaaaaatttattgaaagcgtagtttttacaaacaaggtccagtatccggatggtaagccgccggtatgggcaaagtgtacgaaaggtgtgtatccgtcttactgggaagaatggaaaaaagtcagggaggtggtaaaagttgcctgtccggagtgtggcggaaagggtgaggtttccaccgcctgtaaggattgccgtgggcgtggtgtcgccattcatcgtgaagagtcggtaaaacgtggtatgcctgttatcagagactgccagcgttgtggtggtcgtggctatgaaagactaccatcaacggaggcatttaatgctatatgcgaggtgacaaaccagataacacgcgcgtcatgggaaaaaacagttaagaaattctatgatgcgctggtgacccggtttgatattgaagaagcatgggctgagcggcagttaaaaaaggtaactaggttgatttttccggaatctgtggtaaattcgtcataa

SEQ ID NO: 485588 - DNA, 336 bp, Shigella sonnei
atgaagtggattgtgattgatacagttatccagccatcatgcggaatatctttttcagtcatatggagtaaaataaaattaataatctggtatcaatcggatgctttcttacctcctgaaagtatatttacactgactcacacaggcatcatgctcaataacaaagtgctacctgtaaccatttacaacgtagtaccattcaataaaacattctggaattcaatcaaaaatagccaggaatgccctacaaatacagataacgtattgaatgaatgctttaataaccgttgcactctgcaaatatgtccttatggactaaaacaacaaagtccataa

SEQ ID NO: 485589 - DNA, 174 bp, Shigella sonnei
atggcatttaaacactatgatgttgtcagggcggcgccgccgtcagatcttgcggaaaagctgacacataaactgaaagagggctggcagccgtttggtagtccggtggccataaccccttataccctgaggtgtactggcaatagcggacactaccatttgttctttttttaa

SEQ ID NO: 485590 - DNA, 507 bp, Shigella sonnei
atgaataatgtatttctgtaccggatgcctgttggcattgccggggctgtctctcgcccgcaggacttaaccgtcgaaccggtggtccttaaatccgataacgccttcgctgcctatggcctggctggtaaatacgatgatgacggttttttcgtgccgctggcagatggtgataccgcagacaaggtgaaggggatctacgtgcgcccttatccgaccacgtcgcagccggacatggttcgccaggtgggaacaggcaagaacttcccgggcgacgccatgaagcgtggctacgtgaccgttaatctcggttctgattttgatgccagcactatcaaaaaaggcgatccggtatacgttgtcgtctccactgatgaatccatcaaagtgccgctgggtggattcatgtccacgtcagtcagtggcaaaaacgtggtgctgaccaacgctgaattcacaggtgccggtgatgctgacggcaatgcagaaatttcctggaagatttaa

SEQ ID NO: 485591 - DNA, 1221 bp, Shigella sonnei
atgaaatacttttttgagaccaggctcggggaaacccgataccgcctggctgacggctcgttgctgtgcaaagacgtgccgataggacgaacaggtaagcagctctatggtgctgatgacctgccaaaactgaaacccgataagttcggtgaaatagtcgtcacgcgttctcctgagcaggtattccatccggccacgcttgcctcattcgaagggatgagcatcacgatcctgcatcctgaagatgaaaacgggaatgtgcggctggtaaatcccgagaactggaaagagcttgctgtcgggcacctccagaatgtccggcgcgggacgggtgagcagtctgatttgatgctggctgaccttatcgtcaaagacgaaagcgccattcagcttatcgaagatggcctgcgcgaagtgtcgtgcggctatgacgcggagtacgagcagaccgagccaggtaaagccgagcaggtcgatattaccggaaaccatgtggctcttgtccctaaaggcagagccggaaatcgttgtgcaattggagacagagacacaatggcaaatcaaaagaaaaactggtggaaccgcatgcgtgcggccatcaagacaggagatgccgacaccatgaacgaactggtggagtcggctcccgcatcggttacaggagatgagggggatttgccgcagggcgttaatctcaacatcaacctgtccccgcagcaaccactaccggacaaagcaccagagatgggcggagatccaaccggcgacagtgatgatgacctcaaaacattactgaaagccctgctggctaagctggaaagaaatgccacgggcgataacgataataagcctgacgataatccgaccggtgacggcgaggacgatgaagaggaaaccacgattactggtgactcagcctggcgtgccgaagttatcgttccgggtatcgatctgagccgtaagatgaaaccgaccgcgttcaaacgcgaggttctggcttctgctgacaaaacgctggttcgccagatagtcggtgatgcggatatccgcaaattaccgaaacaatcggtcgacatggcgtttaatgccgtgtctgaggttgccaaagggcgaaacacccgcgccaccaccggcgatgcacagcgcctaaacatgggcatgaccagtatcgcttccctgaacaaacaaaacgctgaattctgggcaaaccgtaaagggtaa

SEQ ID NO: 485592 - DNA, 459 bp, Shigella sonnei
gtgggccaggtgatgcaatccatcatcgccgaacaggtcaagtacatcaaatctctgcctctcgaggccgcagacagggtgtacgacatccagaacaaagcgatagaggctgttgtcaccggtggtcgggcggagcagtttgctaaagagattgcatctaccggcgatgttgctaagtctagggccgatctgattgcccgaacggaactgggaagagcaacgggcgcgctggatatggcccgagcgatagctattggctcggatggttatatttggcgtacagccgatgatggcgatgtccgagattcccacgatcacatgaaaggtaaattcgtccgctgggattcacctccaactttggacggcatgaccggccacgcgggcgagctgccaaactgccgctgctataaagagatcgtgtttgttcgcgttccattcgcaatgaaaagggcagcataa

SEQ ID NO: 485593 - DNA, 1083 bp, Shigella sonnei
atgaccccgctgcgacccgaaaccatcggtaagggcaagtttaaggggattctcccgctcgaccgctggatggtcgacccggcactgacccgccgcattaaagatatggggccggacctgggtaaacctgagttttacgatgtggtgaccacagcaacgggaattcctgcctggcgcattcatcacagtcgcctgattcgctttgatggcgtcacgttgccatttcagcagaagatgaccgagaacgaatggggaatgtcggttgtagagcgtatctgggatcgtcttaccgcgttcgacagcgctactgtcggcgcggcgcagctggtctacaaggcgcatttgcgtacctacagcgtggagaagctacgcgagcttatcgcacttggtggtcctgcgtatgaagcgttgctgaagaatatcgacctgattcgacagttccagagtaatgaaggcatgacgctcatggactcgcgggataagtttgaaacccatcagtacagcttcagtggtctggatgacatcctttcgcagtttgtagaacagattagtggcgctgttggtatcccactggtgcggttgttcggacagtccccgaaaggattttctaccggtgatgcagaccttgccaactattacgatcgcatcagttcgttgcaggagaggcgtttacgtcttccggtgcggcggatactggacatcatgcatcgttcggaacttggcaagccgctgccggacgatttcacgtttgagtttaacccgctctggcaaatgtctgatgtcgatcgctcaacggtggcgttaaacaccaccaacgcaatcagtacggcgctgggtgatggtctgatgacactgaaagccgctatgactgatttgcgagaaaattctgacgtaaccggcatcggggcatccattaccgacgaggacatcgagaatgccgaagatgaagcgccgcccggcatcggcgaacctgatgacgaaccgcaggagccgtcaggcggaaatccggtatcgaaccagcctacgcaggatagcgagggcggtcggagacatcgtaaatggtcgctacgatggttcaaatga

SEQ ID NO: 485594 - DNA, 165 bp, Shigella sonnei
atgacccgcaaaggcattcgcatcacttcggaaattgatgcaaaagatcgtggcattctcgaatcacaactggatgagttgcaaatctgggatgcgctgaatgacgtgctgaaatggtcgcgcctctacggcggcgcggtgggtttcatcatgattgaggggtag

SEQ ID NO: 485595 - DNA, 948 bp, Shigella sonnei
atgccttatgtatgtaatgaatcgatttcatacttgcttggtgaaaaagggatactgaaagaaatagatgaccttaacgcagtaaataattatcttcttaataataagaaagctactgacaatgaaattaatgacatcaaagttaacctgtctcatattcttattgattccttagatgatgcaaaagttaaccttacaccggtcatcgattcgattctggagacttttttaaaatccccatatattaatgatgtaagaatactggattggtgttttaataaaagaatgcaatattttggtgattctgaaaagataaagtatgcatgctccgtgataaatcatattgattttagctgcgatcaatctaaagattttagctgcgatcaatctaaaattaaaatagctgagaccttatttttcaatctcgataaagaaccctataaaaatagccgtaaattacaggaattgatttgggataagttggttgcatatgtcaatgattttagcttaagcaatcaagaaaaatcacgcttaatactaaggttatttgatgatgttaagttactatttaatgaagtgcctgtcagcattttagtaaatgatatttttttgaaggattttttcatgaagcaacctgattttgctaagtggtacttctatcaattacttaagtgttatgagggcgaacagctgtatcttaatgagttaggatatgtttatggtgatgaagaaaaaacaaaagaaattgtaaataaacttccgggttatgtcgttaagatttttgaagaaaagatgggtaatgaattaaaaattagaacaagaatgatgaaaatcctccggaatggcaaaatcaatatatatggatatattaatgaagaacagttaggaaaattaaatcctccggaagatttacgtatagcaataaaaaaattggggtggaataattga

SEQ ID NO: 485596 - DNA, 1005 bp, Shigella sonnei
atgtccgggttttatcataagcatttcctgaaattactcgatttcacgccagctgaactcaacagcctgctgcagttagccgcgaagctgaaagccgataagaaaagcggtaaagaagaagccaaactcactggtaaaaacatcgcgctcatcttcgaaaaagactcgacccgtacccgatgctctttcgaagttgccgcatatgaccagggggctcgtgttacttatctcggcccaagcggcagccaaattggtcataaagagtcgattaaagacactgcccgcgtgcttggtcgcatgtatgacggtattcagtatcgcggctatggtcaggagattgtcgaaacactggcggaatacgctggcgtgccggtatggaacggcctgaccaatgagtttcaccccacgcagctgctggcggatctcctcaccatgcaggagcatttgcccggcaaaacgttcaacgaaatgacgctagtctatgcaggtgacgcacgtaacaacatgggcaattcgatgctcgaagctgcagcgcttaccggtctggatttgcgtctggtcgcgccacaggcatgctggccggaagctgcgctggttacggaatgccgcgccctggcacaacaaaatggcgggaatattacgctgacggaagatgtagctaaaggagttgaaggtgctgactttatctataccgatgtatgggtgtcgatgggtgaagcaaaagagaaatgggctgaacgcattgcattgctgcgtgattatcaagtgaacagcaagatgatgcagttgaccggtaacccggaggtcaaattcctccactgcctgcccgcgtttcatgacgaccaaacgacgcttggcaaaaaaatggcggaagagtttggcctacatggcggaatggaagtgactgatgaggtcttcgaatctgccgccagcattgtatttgatcaggcggaaaaccgcatgcataccatcaaagcggtgatggtcgcgacgctcagtaaataa

SEQ ID NO: 485597 - DNA, 417 bp, Shigella sonnei
atggcaaacccggaacaactggaagaacagcgtgaagaaacacgtttgattattgaagaattactggaagatggcagcgatccggacgcgttgtacaccatcgaacaccatctttccgcagacgatctggaaactctggaaaaagcggcagttgaagcgtttaaactcggttacgaagtgaccgatccagaagagctggaagttgaagatggtgatatcgtgatttgctgcgacatcctcagcgagtgcgcgttgaatgccgatctgatcgatgcccaggttgaacaactgatgacgctggcggagaaatttgacgttgagtacgacggttggggcacttactttgaagatcctaacggcgaagatggcgacgatgaagattttgtcgatgaagacgatgacggggttcgccactaa

SEQ ID NO: 485598 - DNA, 504 bp, Shigella sonnei
atgaataacattgcgccgcaatcacctgtaatgcgtcgcctgacgctgctggataatcctgctatcgcccgcgtcattcgtcaggtatccgccgaatacggtcttaccgctgataaaggctacaccgtcgccgatccgaatcttgacgagctgtatcaagtgtatagtcagcctggccatgcatattgggtggttgagtacgagggtgaagtggtcggcggcggtgggattgcgccattaaccgggagtgagtcggacatttgcgaactgcaaaagatgtattttcttccggctattcgcggtaaagggctagcgaaaaaactggccttaatggcgatggagcaggcacgagagatgggcttcaaacgctgctatctggaaacgaccgcttttttaaaggaagccattgcgctttatgagcatttgggctttgagcatatcgactatgcgcttggctgcacgggccatgtcgattgtgaagtgcggatgctacgcgaactctaa

SEQ ID NO: 485599 - DNA, 378 bp, Shigella sonnei
atggacgaacagtggggctatgtcggggctaaatcgcgccagcgctcgctgttttacgcgtatgacagtctccggaagacggttgttgcgcacgtattcggtgaacgcactatggcgacgctggggcgtcttatgagcctgctgtcaccctttgacgtggtgatatggatgacggatggctggccgctgtatgaatcccgcctgaagggaaagctgcacgtaatcagcaagcgatatacgcagcgaattgagcggcataacctgaatctgaggcagcacctggcacggctgggacggaagtcgctgtcgttctcaaaatcggtggagctgcatgacaaagtcatcgggcattatctgaacataaaacactatcaataa

SEQ ID NO: 485600 - DNA, 315 bp, Shigella sonnei; identical to SEQ ID NO: 462911

SEQ ID NO: 485601 - DNA, 216 bp, Shigella sonnei; identical to SEQ ID NO: 21150

SEQ ID NO: 485602 - DNA, 1854 bp, Shigella sonnei
atggcatttaaacactatgacgtggtcagggcggcatcgccgtcagaccttgcgaaacgactgacacaaaaactgaaggagggctggcagccgtttggtagtccggtggccataaccccttataccctgatgcaggcgattgcagcagaaggtgatgtggtcgtcagtggtgcaactgagccggagtggtactacgtcatcgtactggccgggcaatccaatgccatggcttacggtgaaggtcttccgcttccggattcatacgatgcgccccatccgcgcattaagcaactggcccgtcgtaacacagtgactcccggtggtgaagtatgcgtatttaacgacatcattcctgctgaccattgtctgcatgatgttcaggatatgagtacgattaaccatccccgggctgacctgagcaaagggcagtacggctgtgtcggacagggcttacatattgccaaaaaactgcttccgtatatccctaataatgcggggatcctgctggtaccatgctgtcgtggtggttcggcattcacccagggcacggaggggacattcagcgagtccacgggggccagtcaggattcggctcgctggggagtgggtaagccgttatatcaggatctgcttttccgcacgaaggcagcattgcagaaaaacccgaaaaacgttttgctggcgatatgctggatgcagggggaattcgatatgacgaatgccagttacgcccagcagccagcagcatttcttgcaatggtacagcagttccgtgctgaccttgccgggctggcggcgcagtgtcacggtggaagtccggcatcagtcccctggatttgtggcgacacgacatacgcgtggaaacaagaacacggtacgcaatatgaagtggtatatggtgcatataaaggtaaagaatcccagcagatttattttgttccctttatgaccgatggtagcggagttaatacaccgacaaacaacccgtcagaagatcctgatattgccgggtctggttattacggttcggcatcccgaacgaacaaaaactgggtatcatcaaatcgcccgacgcatttcagctcatgggcgcgtcgtggcattattcccgatcgtatggcaactgctattctgaacgtagccggtcgcaccttagccttcattagtggtaaggcaccggaaatcaaaccctcgcccggcggcgacacgccatcggggccgtctgaagatgcatccatacgcacaatctccctgttgccgacagccggagacgctgctgcgcagggctggagcattaagaatggcggagttcagttgtcagatggtgtatttaagatcaccaagcagagcaataaagcctggtccctgacgcgcccggtggatgacgcagtctccctgctgacacggggtggcagactgagctgtaagtttcgactgtcaggcgcactgaccaacaaccagttcggtctgggaatttatctgtataccgatgtagcgttacctgacgtcgtggcgatgaccgggactggtaacccgttcctgatgtcgttcttcacccagaccacagacggcaaactgaatctgatgcatcacaagaaagcaggaaacacaaagttgggcgagttcgggaattacagtaacgactggctgacgctggagctggtgttcaccgccggcagtgccacggttactccgaaactgaatggagtggctggcccggcattccaggtcataaaagacagtctgacactggggctgaatgcgctgacgctgacggatattaccaaaaatgcagcgtatggcgttgagatagaaagtctggtgctggagataaatgcaccggcatcatcataa

SEQ ID NO: 485603 - DNA, 1029 bp, Shigella sonnei
atgaaccactccttaaaaccctggaacacatttggcattgatcataatgctcagcacattgtatgtgccgaagacgaacaacaattactcaatgcctggcagcatgcaaccgcagaaggacaacccgttcttattctgggtgaaggaagtaatgtactttttctggaagactatcgtggcacggtgatcatcaaccggatcaaaggtatcgaaattcatgatgaacctgatgcgtggtatttacatgtaggagccggagaaaactggcatcgcctggtaaaatacactttgcaggaaggtatgcctggtctggaaaatctggcattaattcctggttgtgtcggctcatcacctatccagaatattggtgcttatggcgtagaattacagcgagtttgcgcttatgttgattgtgttgaactggcgacaggcaagcaagtgcgcttaactgccaaagagtgccgttttggctatcgcgacagtatttttaaacatgaataccaggatcgcttcgccattgtagccgtaggtctgcgtctgccaaaagagtggcaacctgtactaacgtatggtgacttaactcgtctggatcctacaacagtaacgccacagcaagtatttaatgcggtgtgtcatatgcgcaccaccaaactccctgatccaaaagtgaatggcaatgccggtagtttcttcaaaaaccctgttgtatctgccgaaacggctaaagcattactggcgcaatttccaacagcaccaaattacccccaggcgggtggttcagtaaaactggcagcaggttggcttattgatcagtgccagctaaaagggatgcaaatgggtggggctgcggtgcaccgtcaacaggcgttagttctcattaatgaagacaatgcaaaaagcgaagatgtggtgcaactggcacaccatgtaagacaaaaagtgggtgaaaaatttaatgtctggcttgagcctgaagtccgctttattggtgcatcaggtgaagtgagcgcagtggagacaatttcatga

SEQ ID NO: 485604 - DNA, 966 bp, Shigella sonnei; identical to SEQ ID NO: 461317

SEQ ID NO: 485605 - DNA, 927 bp, Shigella sonnei
atgacgccttacctacagtttgaccgcaaccagtgggcagctctgcgtgattccgtacctatgacgttatcggaagatgagatcgcccgtctcaaaggtattaatgaagatctctcgttagaagaagttgccgagatctatttacctttgtcacgtttgctgaacttctatataagctcgaatctgcgccgtcaggcagttctggaacagtttcttggtaccaacgggcaacgcattccttacattatcagtattgctggcagtgtcgcggtggggaaaagtacaaccgcccgtgtattgcaggcgctattaagccgttggccggaacatcgtcgtgttgaactgatcactacagatggcttccttcaccctaatcaggttctgaaagaacgtggtctgatgaagaagaaaggcttcccggaatcgtatgatatgcatcgcctggtgaagtttgtttccgatctcaagtccggcgtgccaaacgttacagcccctgtttactcgcatcttatttatgatgtgatcccggatggagataaaactgttgttcagcctgatattttaattcttgaagggttaaatgtcttacagagcgggatggattatccacacgatccacatcatgtatttgtttctgattttgtcgatttttcgatatatgttgatgcaccggaagacttacttcagacgtggtatatcaaccgttttctgaaattccgcgaaggggcttttaccgacccggattcctattttcataactacgcgaaattaactaaagaagaagcgattaagactgccatgacattgtggaaagagatcaactggctgaacttaaagcaaaatattctacctactcgtgagcgcgccagtttaatcctgacgaaaagtgctaatcatgcggtagaagaggtcagactacgcaaataa

SEQ ID NO: 485606 - DNA, 408 bp, Shigella sonnei
ttgagattttctacaatcgtcagcgtcgtcactctcgtctggggaatatctccccggcagccttcagggaaaaatatcatcagatggctgcttaaaaaaagaacaaatggtagtgtccgctattgccagtacacctcagtagaaaccaaagcggaagctcctgcagcacaaagtaaagcagcagtaccggcgaaagccagtgacgaagaaggcacccgggtcagcattaataatgccagcgcggaagagctagcccgcgcgatgaatggcgttggcctgaagaaagcgcaggcgattgtcagttatcgcgaagagtacggtccgtttaaaacggtggaggatctaaagcaggtgccggggatgggcaattcgctggtggaacgtaatctggcggtattaaccctgtaa

SEQ ID NO: 485607 - DNA, 399 bp, Shigella sonnei
atgcaaacacaaatcaaagttcgtggatatcatctcgacgtttaccagcacgtcaacaacgcccgctaccttgaatttctcgaagaagcccgctgggatgggttggaaaatagcgacagttttcagtggatgacggcccataacatcgccttcgtcgtggtcaatatcaatattaactatcgtcgcccagcggtattaagcgacctgttaactattaccagtcagttgcagcaattaaacggtaaaagcggcatcttaagccaggtcattacactggagccggaagggcaggtggtagcggatgcgcttattacgtttgtttgtattgatcttaaaacgcagaaagcattagctctggaaggggaattgcgcgaaaagctggagcagatggttaagtaa

SEQ ID NO: 485608 - DNA, 696 bp, Shigella sonnei
atgaaacgtgctgtcgttgtgttcagtggaggccaggattccaccacctgtctggtgcaggcattacaacaatatgatgaagtccattgcgtgacgttcgattacggtcagcgacatcgcgcagaaatcgacgtggcacgcgaactggcgctgaaactgggagcacgcgcgcataaggttcttgatgtaacgctgctcaacgagctggcggtcagcagcctgacacgtgacagcattccggtgcctgattatgaacctgaagccgatggcatcccgaatacgtttgtccctgggcgtaatattttgttcctgacgctggcggcaatatatgcgtatcaggtaaaagcagaagccgtaattaccggcgtctgtgaaacggatttctccggctacccggattgccgcgatgagtttgtgaaagcactaaaccatgccgtcagtttgggcatggcgaaagatattcgttttgaaacgccgctgatgtggattgataaagcggaaacctgggcgctggcagattattacggcaaactggatttagtccgtaacgaaacgttgacctgctataacggcattaaaggcgacggttgcggtcattgtgcggcatgtaatttacgcgccaacggtttgaatcattatctggccgataaaccgacggtgatggcagcgatgaagcagaaaaccgggttgaggtaa

SEQ ID NO: 485609 - DNA, 1701 bp, Shigella sonnei
atgcgattgctcaaccgtcttaaccagtatcaacgtctgtggcaaccttcagccggaaagccgcaaaccgtcaccgtcagcgaactggccgaacgctgtttttgcagcgaacgccatgttcgtacgctgttgcgtcaggcacaggaggcgggatggctggagtggcaggcgcagtcaggacgcggaaagcgcggacaattacgctttctggtcacgccggaatcgctacgcaatgcgatgatggaacaggcactggaaaccggaaagcagcaagatgtgctggagctggcgcaactggccccaggtgagctgcgcactctgttacagccgtttatgggcggacaatggcaaaacgatacacccacgttgcgtattccctactatcgcccgctcgaaccgctacaaccaggctttttgcccggccgtgccgagcagcatctcgccgggcagatattttccggcctgacccgcttcgataataatactcagcgcccgattggcgatttagcgcatcacagggaaacctctactgacgggttacgctgggacttttatcttcgttcaaccctacactggcataacggcgatgcagtaaaagcctcacacttacaccagcgattattgatgctgttacaactgccagcactggatcaattatttattagcgtgaagcgtattgaagtcacccatccgcagtgtctgaccttctttttacatcgccccgattactggcttgcgcaccggctggcgagctattgcagccatctggcgcatccgcaattcccactgatcggcactggtccttttcgattaacacaattcacagcggagctggtgcgcctggagagccatgattattaccatttgcgtcatccgctgcttaaagcggttgagtactggataactccgccgcttttcgaaaaagatttgggaaccagttgtcggcatcccgtgcaaatcaccatcggcaaaccggaggagctgcaacgggtcagccaggtcagtagtggcatcagtttaggtttttgctatttaacgttgcgcaaaagtccccgactctccctctggcaggcgcgaaaagtgatctccattattcatcaatccggtttattacaaacgttagaagtcggagaaaacctgatcaccgccagtcatgcattactgccaggctggactattccgcactggcaagtaccggatgaagtcaaactaccgaaaaccttgacgctggtttatcacctaccgatagaacttcataccatggcagaacgcctacaggcgacactggcagcggaaggctgtgaactcacaattatttttcataacgcaaaaaactgggacgacacgaccctactggcacacgcagacctcatgatgggcgacagattaattggcgaagcaccggaatatactctggagcaatggctacgttgcgatccactatggccacatgttttcgacgctccagcatatgcacatctgcaatcgacgctggacgcggtgcaagtaatgcctgatgaggaaaaccgatttaatgccctgaaagcggtttttagccagttaatggcagacgcgacgctgacgccgctgttcaactatcactatcgcattagtgcccctcccggcgtgaacggtgtgcgactgacaccgcgcggctggtttgaatttaccgaagcctggcttcccgcgccgtcgcaatga

SEQ ID NO: 485610 - DNA, 2517 bp, Shigella sonnei
atgccacaacgacaccaccagggacataaacgcacaccgaaacagttggcgctcatcatcaaacgttgtttgccgatggtgctcactggcagcggcatgctttgcactaccgctaacgccgaagagtattatttcgaccccattatgctggaaactacaaaaagtggtatgcaaacaaccgatctgtcacgtttttcaaaaaaatacgcacaactaccaggaacttatcaggttgatatctggctgaataaaaagaaggtttcacagaaaaaaattacatttaccgccaatgcagagcaacttctgcagccacagtttacggtagaacaactacgtgagctgggtattaaggtggatgaaatcccggcgctggctgaaaaagatgacgatagcgtgatcaactcgcttgaacaaatcattcccggtacagcagctgaatttgatttcaatcatcagcgacttaatttgagcattccccaaattgcactgtaccgtgatgcaagaggttacgtctccccttctcgttgggacgatggtataccaacgctgtttaccaactactcgtttacaggttctgataaccgttaccgccagggcaatcgtagccaacgacagtacctgaatatgcaaaatggtgctaattttggcccctggcgattacgcaactattccacatggacacgcaacgatcagacatcaagctggaataccatcagtagttatttacaacgtgatatcaaggcattgaagtctcagttgcttctgggagaaagcgccaccagcggcagtattttttccagctacacctttactggcgttcaactcgcttccgacgataatatgttgccaaacagccagcgcggatttgccccaacggtacgcggtatcgcaaacagtagtgcaatcgtgactatcaggcaaaatggttatgtgatctatcaaagcaacgtgccagcgggtgcctttgaaattaacgatctctacccctcttccaacagcggcgatttagaagtcacgattgaagaaagtgacggtacgcaacgtcgctttatccagccttattcttcattacccatgatgcagcgacctgggcatctaaaatatagcgcgaccgctggacgctatcgcgctgatgcaaacagtgatagcaaagaacccgaatttgctgaagccacggcaatatatggtttgaataatacttttacgctgtatggtggcctgctcggttctgaagattattatgcgctggggatcggtatcggcggcacacttggcgcactgggcgcgttgtcgatggatatcaacagagctgacacccaattcgataaccagcactcttttcatggctatcaatggcgtacgcagtacatcaaagatatcccggaaaccaacaccaatatcgctgtcagctactatcgctataccaacgatggctattttagttttgatgaagccaatacccgtaattggaactataacagtcgccaaaaaagtgaaattcaattcaacatcagccagacaatatttgatggggtaagtctgtatgcctccggttcgcagcaagactattggggcaataacgataaaaacaggaatatctcagttggggtttccggtcagcaatggggaattggttacagcctgaattatcaatacagtcgctacacggatcaaaataatgaccgcgcactctctttgaatctcagtattccgttagaacgctggttaccgcgtagccgggtttcctatcagatgaccagccagaaagatcgcccaacccaacatgaaatgcgtcttaatggctcactgctggatgatggtcgcctgagctatagcctggaacaaagtctggatgacgataacaaccataacagtagcctgaacgccagttaccgttcaccttatggcaccttcagtgccggatacagctacggtaatgacagcagccaatacaattacggcgttaccggcggcgtggttatccatactcatggcgtgacgctctcgcaatatctgggcaacgcttttgcgcttatcgatgctaatggggcttctggcgtgaggatacaaaactatccggggattgctactgatccctttggctatgcagtggttccttatctcacgacttaccaggaaaaccgtctctcggtagatactacgcagctgcccgataacgtcgatcttgagcaaacaacacagtttgtggtgcccaacagaggtgcaatggtagcggcgcgtttcaacgccaatatcggttatcgcgtacttgttatagtcagcgatcgcaacggtaaaccgttgccctttggcgctcttgccagcaacgatgagacggggcaacaaagtatcgtcgatgagggcggcatactatatctctctgggatatcgagtaaatcacaaagctggactgtacgctggggaaatcaggcagatcaacaatgtcagtttgcttttagtacaccggattcagaaccaacaacctctgtattacaaggcacggcgcagtgccattaa

SEQ ID NO: 485611 - DNA, 480 bp, Shigella sonnei
ttggcagcatcaccgctatttcgtattgaagctggcgatgactcatcactgcgaattattaaaacagctgataacctgcctgaaaataaagagtcgctgttctacattaatgttcgtgccattccagcaaagaaaaaatcagatgatgttaatgctaacgagttgacgctggtatttaaaacacggatcaaaatgttttatcgccccgcacacctgaagggacgggtaaacgatgcgtggacatcactggaatttaaacgtagtgaccattcactcaatatatataacccaactgaatattacgtcgtatttgccggactggcagtcgataaaaccgatctcacaagcaaaattgaatatatcgcgcccggagaacataaacagttaccacttcctgcatctggcggaaagaacgtgaaatgggctgcaatcaatgattatggcggcagttccgggacagaaactcgtccactgcaataa

SEQ ID NO: 485612 - DNA, 582 bp, Shigella sonnei
atggcattcagaatgagtgaacaagcacggaccataaaaatttataacctgctggccggaactaatgaatttattggtgaaggtgacgcatatattccgcctcatacaggtctgcctgcaaacagtaccgatattgcaccgccagatattccggctggtttcgtggctgttttcaacagtgatgagtcatcgtggcatctcgttgaagatcatcggggtaaaacggtttatgacgtggcttccggcgacgcgttatttatttctgaactcggctcattaccggaaaatgtcacctggttatccccggaaggggagtttcagaagtggaacggcacagcctgggtgaaggatacggaagcagaaaaactgttccggatccgggaggcggaagaaacaaaaaacagcctgatgcaggtagccagtgagcatatagcgccgcttcaggatgctgtggatctggagatcgcaacggagaaagaaaccttgttgctggaagcttggaaaaagtatcgggtgttgctgaaccgtgttgatacatcaactgcaccggatattgaatggccagtagcacctatagggtaa

SEQ ID NO: 485613 - DNA, 1719 bp, Shigella sonnei
gtggcgcttgaggatgcgagcacgacgaaaaaggggatagtacagctcagtagtgcgactaacagcacttccgagtcactggcggcaacaccaaaagccgttaaggccgcgtatgacctggctaacgggaaatacaccgcacaggatgcaacgacagcacagaaagggataatccagctaagcagcgcgaccaacagcacgtctgaaacgctggcggcaacgccaaaggcagtaaaagcagccaatgacaatgctgagaaacgtctgcagaaagatcagaacggtgcggatatccctggcaaagacacctttacgaaaaatattggtgcctgccgtgccttcggtgggtcagtaagcacaacaacaggaaactggacgactgcacagtttatcgagtggctggattctcagggagcatttaaccatccatactggatgtgcaagggttcctggtcttatggcaataataaaatcattactgatactggctgcggtaatattcatctcgccggagctgtcattgaagtaatggggataaagtcagcgatgacgatccgcattaccactccgaccacatccagcggtggcggaacaaccaacgcccagtttacctatattaatcacggaacagattattcacctggctggcgaagggactataactccagaaataagccaacggcatcagagatcggggcgctaccgtcaggtggaacagcagtatcatcagttaatctggcttcaaaaggtcgggtagccgcgctgacagacaatacgcagggggcagcaggtcttgagttatacgaggtgtataacaacggatatccaacagcgtatggaaatatcattcacctgaaagggatgacagccgttggcgaaggtgagttactcatcggctggagtggtacaagcggtgctcatgctccggcatttattcgttcacgacgggatacgaccgacgcaaactggtcgccgtgggcgcagctttacacctcggctcatcctcctgcagagttttatccagtcggtgcaccaatcccgtggccatcagataccgttccgtctggttatgccctgatgcaggggcagacttttgacaaatctgcttacccgaaacttgcagccgcttatccgtcaggcgtgatccctgatatgcgtggctggacgattaagggcaagcccgccagtggtcgtgccgtattgtctcaggaacaggatggcattaaatcgcacacccacagcgccagcgcatccagtacggatttggggacgaaaaccacatcgtcgtttgattacggcactaaatccacgaataacaccggggcgcatacgcacagtctgagcggctctacaagttcagctggggcccaccaacatagtcagactgggcccagaacgaatagcgggagtcaacctactggaatgtttccggcagggagtactcaagttagcgggactaatcaggttggtatcagtggctcattaaccagtggcacctcccaatgggtaggtaaatcatcttcagaaggaaaccatacacactcactgtccggcacagcagcatctgcgggtgcacacgcgcatactgtcggtattggtgctcatacgcactctgttgcgattggttcacatggacacaccatcaccgttaacgctgctggtaacgcggaaaacaccgtcaaaaacatcgcatttaactatattgtgaggctcgcataa

SEQ ID NO: 485614 - DNA, 315 bp, Shigella sonnei
atggcgcttgaagcacaatctattttctggatagttttcttctccataatgctggcaaacattgcgcatgacatggtggtgtgtgtgcaacaaccgatgtttaccgaaatgtttggtgccagttatcgctatagtggcgctggagtcggttatcaggttgccagtgtggttggcggtggatttacaccttttattgccgctgcactcatcacttactttgccgggaactggcatagcgtcgccatttatttgctggctggatgcctgatttccgcaatgaccgctttgttgatgaaagacagtcaacgcgcttga

SEQ ID NO: 485615 - DNA, 1455 bp, Shigella sonnei
atgaataataagggctccggtctgaccccagctcaggcactggataaactcgacgcgctgtatgagcaatctgtagtcgcattacgcaacgccattggcaactatattacaagtggcgaattacctgatgaaaacgcccgcaaacaaggtctttttgtctatccatcactgaccgtaacctgggacggtagcacaaccaatccccccaaaacgcgcgcatttggtcgttttactcacgcaggcagctacaccaccacgattactcgccctactctctttcgttcgtatcttaatgaacaacttacgttgctgtatcaggattatggtgcgcatatctctgtgcaaccctcgcagcatgaaatcccttatccttatgtcatcgatggctctgaattgacacttgatcgctcaatgagcgctgggttaactcgctacttcccgacaacagaactggcgcaaattggcgatgaaactgcagacggcatttatcatccaacggaattctccccgctatcgcattttgatgcgcgccgcgtcgatttttccctcgcacggttgcgccattataccggtacgccagttgaacattttcagccgttcgtcttgtttaccaactacacacgttatgtggatgaattcgttcgttggggatgcagccagatcctcgatcctgatagtccttacattgccctttcttgtgctggcgggaactggatcaccgccgaaaccgaagcgccagaagaagccatttccgaccttgcatggaaaaaacaccagatgccagcatggaatttaattaccgccgatgctcagggtattactctggtgaatattggcgtgggaccatcaaatgctaaaaccatctgcgatcatctggcagtgctacgcccggatgtctggttgatgattggtcactgtggcggattacgtgaaagtcaggccattggcgattatgtacttgcacacgcttatttacgcgatgaccacgttcttgatgcggttctgccgcccgatattcctattccgagcattgctgaagtgcaacgtgcgctttatgacgccaccaagctggtgagcggcaggcccggtgaggaagtcaaacagcggctacgtactggtactgtggtaaccacagatgacaggaactgggaattacgttactcagcttctgcacttcgttttaacttaagccgggccgtagcaattgatatggaaagtgcaaccattgccgagcaaggatatcgtttccgcgtgccatacgggacactactgtgtgtttcagataaaccattacatggtgagattaaacttcccggtcaggctaaccgtttttatgaaggcgctatttccgaacatctgcaaattggcattcgggcgatcgatttgctgcgcgcagaaggcgaccgactgcattcgcgtaaattacgaacctttaatgagccgccgttccgataa

SEQ ID NO: 485616 - DNA, 717 bp, Shigella sonnei
gtgggacgtaaatgggccaatattgttgctaaaaaaacggctaaagacggtgcaacgtctaaaatttatgcaaaattcggtgtagaaatctatgctgctgctaaacaaggtgaacccgatccagaattaaacacatctttaaaattcgttattgaacgtgcaaagcaggcacaagttccaaagcacgttattgataaagcaattgataaagccaaaggcggcggagatgaaacgttcgtgcagggacgttatgaaggctttggtcctaatggctcaatgattatcgccgagacattgacttcaaatgttaaccgtacgattgctaacgttcgcacaattttcaataaaaaaggcggcaatatcggagcggcaggttctgtcagctatatgtttgacaatgctggtgtgattgtatttaaaggatcagaccctgaccatatttttgaaattttacttgaagctgaagttgatgttcgtgatgtgactgaagaagaaggtaacattgttatttataccgaacctactgaccttcataaaggaatcgcggctctaaaagcagctggaatcactgagttctcaacaacagaattagaaatgattgctcaatctgaagttgagctttccccagaagatttagaaatctttgaagggcttgttgatgcccttgaagatgacgacgatgtacaaaaagtttatcataacgtcgcaaatctctaa

SEQ ID NO: 485617 - DNA, 327 bp, Shigella sonnei
atgagcagaattatcaccaccaccgtgtatacactgaatgagctatcctccaccgcacaggaaaaagcccgcgactggtaccgtcagcatcatgctgacagcaactggtatgaaaacgtgtatggggacttcagggaggtctgtggcattttcgggattgacctccgccagcgtgttatccggctcagcaacggcaggtttatggaagagccgtgcatctggttcagcggattctgcagccagggggacggagcctgttttgaaggacgctggcactggcagtcagcaacagccaggagagtcggggtgtatgcccataagcgctaa

SEQ ID NO: 485618 - DNA, 222 bp, Shigella sonnei
atgaaaatcatcacccgtggtgaagccatgcgtattcaccaacaacatccggcatcccgtctttttcctttctgtaccggcaaataccgctggcacggcagtgctgaggcgtataccggtcgtgaagtgcaggatattcccggtgtgctggccgtgtttgctgaacgccgtaaggacagttttggcccgtatgtccggctgatgaacgtcactctgaactga

SEQ ID NO: 485619 - DNA, 477 bp, Shigella sonnei
atgcaacaactttcctttctgcccggagagatgacgcccggcgagcgcagtctcattctgcgggccctgaaaactctggaccgccatcttcatgaacccggcgtggccttcacctccacccgtgcggcacgggaatggctgattctgaacatggcgggactggagcgtgaagaattccgggtgctgtatctgaataaccagaatcaactgattgccggtgaaaccctcttcaccggcaccatcaaccgcacggaagtccatccccgggaagtgattaaacgcgccctgtaccacaatgccgctgccgtggtgctggcgcacaatcacccgtccggtgaagtcacacccagcaaggcagaccgccttatcacggaacgtctggtacaggcactgggcctggtggatatccgggtgccggaccatctgatagtcggtggcaaccaggttttctcctttgccgaacatggtctgctttaa

SEQ ID NO: 485620 - DNA, 486 bp, Shigella sonnei
atgacaaccgtcttgcataattccaccactccttctgtttccgtaaccgctgcatcagggaatgaccagcctcagctggttgccaccatagtccctgatgaacagcgcatcagcttctggccgcagcactttggcctcattccacagtgggtggccctggagccccgtgtcttcggctggatggaccgtctgtgtgaagactactgcggtggtatctggaatctgtacaccctgaacaacggcggggcatttatggcacccgaaccggatgacgatgatgacgaaacatgggtactgttcaatgccatgaacggtaaccgcgctgaaatgagtccggaagctgccggcattgctgcctgtctgatgacgtacagtcatcatgcctgtcgtacggagtgttatgccatgacggtccattattaccggttgcgggattacgccctgcagcatccggaatgcagcgccattatgcgcatcatcgactga

SEQ ID NO: 485621 - DNA, 822 bp, Shigella sonnei
atgcgactagccagtcgttttggttatgctgcaaaccagatacgccgtgaccgtccgctgacacacgaagaactgatgcactatgttcccagtattttcggtgaagaccggcatacttcccgcagtaaacgatatgcgtacattcccaccatcaccgtactggaaagcctgcagcgggaaggctttcagccattcttcgcctgccagacccgtgtgcgcgacccgggccgccggggctacacaaaacatatgctgcgtctgcggcgggccggagagataaacggagaacatgtccctgaaatcattctgctcaactcccatgacggtacctccagctaccagatgctgccgggttacttcaggttcgtctgtcagaacggatgcgtctgtggtcagtctctgggggaagtgcgtgttccgcaccggggaaatgtggtggagaaagttattgaaggggcttacgaggtggtgggggtttttgaccggattgaggaaaagcgtgatgccatgcagtcgctgattctgccgccaccggcacgccaggcgctggcacaggcggcactgacttaccgttatggtgacgaacatcggcccgtcaccaccgccgacattctgacgccacgacgccgggaggattacggtaaggacctgtggagtgcttatcagaccattcaggagaatatgctgaaaggcgggatttccggtcgcagtgccagaggaaaacgtatccatacccgtgccattcacagcatcgacaccgacattaagctcaaccgcgcattgtgggtgatggctgaaacgctgctggagagtatgcgctga

SEQ ID NO: 485622 - DNA, 174 bp, Shigella sonnei; identical to SEQ ID NO: 30365

SEQ ID NO: 485623 - DNA, 243 bp, Shigella sonnei; identical to SEQ ID NO: 464857

SEQ ID NO: 485624 - DNA, 330 bp, Shigella sonnei
atgatggtgcagcacctgaaaagacggccattaagccgctatcttaaagactttaaacacagccagactcattgcgcgcattgccgtaaattactcgaccgcattaccctcgttcgcgacggcaaaatagtgaataaaatcgagatttcccgcctggacatgctgcttgatgaaaatggctggcaagtggaacaaaaatcatgggcggcattgtgccgattttgtggtgatttacactgcaaaacgcagagtgattttttcgatattatcggctttaagcaatttctttttgagcaaactgaaatgagcccaggtacggtgcgtgggtga

SEQ ID NO: 485625 - DNA, 720 bp, Shigella sonnei
gtgaattcactctataccgctgaaggtgtaatggataaacactcgctgtggcagcgttatgtcccgctggtgcgtcacgaagcattgcgcctgcaggttcgactgcccgcgagcgtggaacttgacgatctgctacaggcgggcggcattgggttacttaatgccgtcgaacgctatgacgccctacaaggaacggcatttacaacttacgcagtgcagcgtatccgtggcgctatgctggatgaacttcgcagccgtgactgggtgccgcgcagcgtgcgacgcaacgcgcgtgaagtggcacaggcaatagggcaactggagcaggaacttggccgcaacgccacggaaactgaggtagcggaacgtttagggatcgatattgccgattatcgccaaatgttgctcgacaccaataacagccagctcttctcctacgatgagtggcgcgaagagcacggcgatagcatcgaactggttactgatgatcatcagcgagaaaacccgctacaacaactgctggacagtaatctgcgccagcgggtgatggaagccatcgaaacgttgccggagcgcgaaaaactggtattaaccctctattaccaggaagagctgaatctcaaagagattggcgcggtgctggaggtcggggaatcgcgggtcagtcagttacacagccaggccattaaacggttacgcactaaactgggtaagttataa

SEQ ID NO: 485626 - DNA, 1575 bp, Shigella sonnei
atggcacaagtcattaatacaaacagcctgtcgctgttgacccagaataacctgaacaaatctcagtcttctctgagctccgccattgaacgtctctcttctggcctgcgtattaacagtgctaaagatgacgcagcaggtcaggcgattgctaaccgttttacagcaaatattaaaggtctgactcaggcttcccgtaacgcgaatgatggtatttctgttgcgcagaccactgaaggtgcgctttctgaaatcaacaataacttacagcgtattcgtgaattgtcagtacaggccactaatggtacaaactctgactccgacctgaattcaattcaggatgaaattacacaacgccttagtgaaattgatcgtgtttctaaccagacacaatttaatggtgtaaaagttctggcttctgatcagactatgaaaattcaagtaggtgcgaacgatggtgaaaccattgagattgcccttgataaaattgatgctaaaaccttggggcttgataactttagcgtagcactaggaaaagttccaatgtcctctgcggttgcacttaagagcgaagccgctcctgacttaactaaggtaaatgcaactgatggtagtgtgggaggtgctaaagcattcggtagcaattataaaaatgctgatgttgaaacttattttggtaccggtaatgtacaagatacaaaggatacaactgatgcgaccggtactgcaggaacaaaagtttatcaagtacaggtggaagggcagacttattttgttggtcaagataataataccaacacgaacggttttacattattgaaacaaaactctacaggttatgaaaaagttcaggtgggtggtaaggatgttcagttagcaaactttggtggtcgtgtaactgcatttgttgaagataatggttctgccacatcagttgatttagctgcgggtaaaatgggtaaagcattagcttataatgatgcaccaatgtctgtttattttgggggaaaaaacctagatgtccaccaagtacaagatacccaagggaatcctgtacctaattcatttgctgctaaaacatcagacggcacctacattgcagtaaatgtagatgccgctacaggtaacacgtctgttattactgatcctaatggtaaggcagttgaatgggcagtaaaaaatgatggttctgcacaggcaattatgcgtgaagatgataaggtttatacagccaatatcacgaataagacggcaaccaaaggtgctgaactgagtgcctcagatttgaaagccttagcaaccacaaatccattatccaaattagacgaagctttggcaaaagttgataagttgcgcagttctttgggtgcagtacaaaaccgtttcgactctgccatcaccaaccttggcaacaccgtaaacgacctgtcttctgcccgtagccgtatagaagatgctgactacgcaaccgaagtgtctaacatgtctcgtgcgcagatcctgcaacaagcgggtacctctgttctggcacaggctaaccagaccacgcagaacgtactgtctctgctgcgttaa

SEQ ID NO: 485627 - DNA, 198 bp, Shigella sonnei
atggcttcatttacatctcttggcgttggttcgaatctgccgctggatacattgctaaacaacctgaccatcgctgaaaaaaaacgcttaaacccaattactcagcaacagagtgacaataccgcacgtctgacagcctatggcacattaaaaatgtgcattagaaaaattccagactgcaaatactgcgttaaataa

SEQ ID NO: 485628 - DNA, 153 bp, Shigella sonnei
atgatttacactaatcagcttcgttacagtggcaaagatggcatctatttccacttaagagacaatgtagatgccttcttaaccttatcagcaactgaaaacatggaatttgatagccctatgcaggtgactacacagaacatgcaattatga

SEQ ID NO: 485629 - DNA, 2181 bp, Shigella sonnei
atgagcaaattcacagttgatagttttatcgttgaacttagtttcagtgaaaacgttattaagggcttgcaaagagttgaaaaggcagctttgcagtcagcacaaagaattgaacgcaatttgaatagagcgtttaaggtcgataccaagcaacttgacagcaatctgacaagttctttagggcagcttgaaaggaagtttaataagacctttgacaagattgagcagagagcaagaagcacaaaagcatttcagtttgccaccagatttaatgacactgttaatcctccaaaacaatcaaggcaaccacgaattagcggaaacagagcaatcacagcagcgcatagcgtgaatatgtctaagcttggtgatattaatccgctgatggctaaaatgtttaaagcacagtattacagcttaagcggtaaggctggtaatattggaagtgaaaagtttaacgctgaacttgcaaaattaaatcaatctcttcgtgaaacgttgaataaactcaggtcacagacaaagaccgccagcattaacaatacaagcgacgcatttaataatcttgcaagcaatgcgattaaattatctggtgcattttactctgtgatgggtgctcttaacgcttacaaggccattatgaatgcaggtcttaaacgagattccgcacagagagccgctaagtttgtacttggtgataaagcatctgaagctgaggtatttattcgaaatttagcagacaagacaggtcttaatatctctgaagggctatcaagctacgctaagtttgcagcaggtgctcagggttctatgtcacaggaacagacacaggagctatttggtaatgcaacggctatgagtcgcttaatggggctttctaacgatgagctaaacggcattttgagagcatttgagcagatggcgagcaagggcaagattcaggctgaggaattacgtgggcagttaggtgaccgtatggctggtgcatttaagctattcgctgaagcattgggtatgactgctacagagcttgatgcagccatgaaaaacgggaaggtactttccgctgatactctccctaaagtcgctaaacagatgggcttgatgattgataaagcgggtggctgggctgaagtcgctaagagcactcagacagctttaggtaagttagcaaacaattgggatgatacgatggtgaaaatcttctcaggttcacaggatgagctaaacggcttcttatccagcctgagtaacctgcttagtgaaatggggatgagttcttctatcgctggtgatgctatcggtggacttatcgacatgcttaaagctggtgtagatgatattcgcgtattcaataacaccattgaaggctggattttacagactaagaagttctattacagccttgatgacactaaacgaaaactacttgatgaagtcggtgatggttttatcaacttcgtcaaaggtcttgctatagcgttatctgcaaagacgctattcagtgctactacaggggttatgaacctgacaagagcaatcacaacgttaggtacaagagctaatcaggtggctggtcaggtagctactggtaaaggtggtggaaaactgaaaggtgtagctggtggtgtaggtagtgctcttgcaattggttatgctgatgacggttatgaaacagcgttagcattagcttcaatgattccacaaatcagaggcgtcactcttggtttatatgcattgaagaaagcactggattttatgaatcaggaagtagtcaaaaacgctaatatgcatccgtctggggtaggtgtgggtagtgactttaatcccgtgtattctggtgaccctaataaaccgaatatgattaacgaaggatggagtagaatttttagttcaatgggtgaattgtttaacaatgccacaatgaatattgcaagattcaatcatccagagttaaacaacattaagcaagattcagcattaacgagtgcagatattcagggtctgagggatgaaattagtgctttgagtaagcgtattcaggagccagtgaaagtttcacttggtggtcaagttgtcgttcgaccagatgaaccatctttctttactttcaatcaatcagctaatgaccagttcacgcaggatatgctcttaagttcaagctatccagaggaagaatga

SEQ ID NO: 485630 - DNA, 207 bp, Shigella sonnei
atgattgatttaacagaacgctatgagcttattaaagcaattagtgaacgattgaaagaacaacccaacaaaccaaaacgaatcaaatcattcacctcctctaagcaaaagaatagaatcaggaaaatagctaagtggtgtcttgataaattaccaagtgattgtcagattgttggtgaagatggtaattattatctggttaggtaa

SEQ ID NO: 485631 - DNA, 240 bp, Shigella sonnei
atgcagtcaataacacctccattaattgccgttattggtagcgatggttcaggcaagtcaacggtgtgtgaacatcttattaccgttgtcgaaaaatatggtgctgccgaaagagttcatttaggaaaacaggccggaaatgtcggtcgtgcagtgacaaaattaccgttgatgggaaaatccttacataaaacaattgaacgaaatcaggtgaaaacagcaaaaaaattgcctaaatag

SEQ ID NO: 485632 - DNA, 699 bp, Shigella sonnei
atgtcaataattaattccacgccagtgcgtgttattgccattgtaggatgtgatggttcaggtaaatcgcccctcacggcaagcctggtaaatgaactggcagcaagaatgccaacagaacacatttatctcgggcaatcgtccgggctaattggcgaatggatttcacagctccctgttattggcgcaccttttgggcgttatctgcgaagtaaagcggcacatgtgcacgaaaaaccctcaacaccgcctggcaatattactgctctggttatctatctgctttcctgctggcgggcgtacaagtttcgcaaaatgttgtgtaaaagccagcaaggctttctgctcatcaccgaccgctacccgcaggttgaagtgccgggttttcgctttgatggcccgcaattggcaaaaaccacgggcggtaacggttggataaaaatgttaaggcagcgcgagctgaagctgtaccaatggatggcatcttatttgcccgtattgttgattcgtcttggcattgatgaacaaaccgcgtttgcgcgtaaacctgaccaccaactggcagcgttacaggaaaaaatcgccgttacgccgcaactgactttcaacggcgccaggatccttgaactggatggtcggcaaccagccgatgaaatcctgcaagcgtcactacgtgcaattcacgccgcgctttcctga

SEQ ID NO: 485633 - DNA, 759 bp, Shigella sonnei
atggatgcactacaaacacaaactgttaatagtacaaccgcgccgcagcccagctacattccggggctaattgcggtggtcgggtgcgatggcaccggtaaatccacgctgaccaccgatctggtgaaatcattgcaacagcactggcaaaccgagcggcgctatctggggctgctctcgggcgaagacggcgacaaaatcaaacgattaccgttggttggcgtctggctggaacggcgactggcggccaaatcctcgaaaacccaaagcatgaaaaccaaatctccggcgctatgggcggcggtgattatgtactgcttctcgctgcgaagaatggcgaatctacgcaaggttcagcgactggcgcaaagtggcgttctggtggtcagcgatcgcttcccgcaggctgaaatttcgggcttttattacgacggaccggggattggcgtcgaacgtgcgaccgggaaaatcagcatgtttctggcgcagcgcgaacggcgtttataccaacaaatggcgcaatatcgcccggaattaattattcgcctgggcattgatattgagactgccatctcccgcaagcctgaccatgactatgccgagctgcaggacaaaatcggtgtcatgtcgaagattggctataacggcacaaaaattcttgagattgattccagagcgccctacagcgaagtgctggaacaggcacagaaggcggtttctctggttgccatcgtttctgaccgccgaagtttaacttaa

SEQ ID NO: 485634 - DNA, 1359 bp, Shigella sonnei
ttggcgggttttaacatcaaacattggtttgcagatggcgcgtttcgcaccattattcgcaatagcgcctggttaggctccagtaatgtcgtgagcgccttgctggggctgttggcgctctcgtgtgccggtaaagggatgacgcccgccatgtttggcgtactggtgattgtgcaatcgtacgccaagtcgatcagcgattttattaagtttcagacatggcagctggtggttcagtacggaacgccagccttgaccaacaataatccgcagcaatttcgcaatgtcgtctcattttccttctcgctggatatcgtcagcggcgcggtggcgattgtcggcggcattgccttactgccattcctttcccattcattaggtctggatgaccaaagcttttggctggcggcgctgtattgcacgctcattccttcaatggcttcctccacgccgaccggcattctgcgtgcggtagatcgcttcgatttaattgctgtacagcaggcgacgaaaccttttctgcgcgcagcggggagcgtcgtagcctggtattttgactttggttttgcgggttttgttattgcctggtacgtgtcgaatctggttggcggcaccatgtactggtggtttgcagcgcgcgaattacgccgcagaaatatccataatgccttcaaattgaatctgtttgagtctgcccgacacatcaaaggcgcgtggagttttgtctggtcaaccaacattgcccactccatctggtcggcgcgtaactcgtgcagcacagtgctggtggggatcgtgttaggacccgctgccgccgggttatttaaaatcgccatgacattctttgacgccgccggaacgccagcgggtttgctgggtaaaagtttttacccagaggtgatgcgtttagatccgcgcaccaccagaccgtggttgttaggtgtgaagtccggtttactggcgggcggaatcggtattctggtggcgctcgcggtgttgatcgccggcaagccgctcatttcgctggtgtttggcgttaagtatctcgaagcgtatgacctgattcaggtgatgctgggcgcaattgtgatttcgatgctgggtttcccgcaggagtcattgctattgatggcgggaaaacagcgcgcttttctcgtggcgcaaaccatcgcctcaatcggctacatcgtattgctgttcatgttctgtcatctgtttggtgtgctgggagcagcgtttgcttacttcggtgggcaatgtctggatgtggtgctctcgttaattccaactttaaaggcattttttcagcgtcattccttgctttataacgcagccggggtaatgactccaacttattga

SEQ ID NO: 485635 - DNA, 528 bp, Shigella sonnei
atggcaggaaaaacgatgataccgttactcgcctttgccgcgtggagtggtaccggaaaaactacgcttttgaaaaaactgatcccggcattatgcgccagagggatccgtccagggctgattaagcatacgcaccatgatatggatgttgataagccaggcaaagatagctatgagctgcgcaaggctggcgcggcacaaaccatcgttgccagccagcaacgatgggccttgatgacggaaaaaccagacgaagaagagctggatctacagtttctcgcaagtcgaatggatacctcaaagctggatttgattctggtcgaagggtttaagcatgaagagatcgcaaagattgtgctgtttcgcgatggagccggacatcgacctgaagaattagtgatagacaggcatgttattgctgtagccagtgatgtgccgcttaatcttgatgtcgcattactggatattaatgatgttgaggggctggctgattttgtggtggagtggatgcaaaagcagaacggataa

SEQ ID NO: 485636 - DNA, 585 bp, Shigella sonnei
gtgaatctgatgacgacgataacaggcgttgtgctggcaggcggtaaagccagacgaatgggcggcgtagataaaggattgcttgaattaaacggcaaaccattatggcaacatgtcgctgacgcgcttatgacgcagctctctcacgtcgtggttaatgccaatcgtcatcaggaaatctatcaggcaagcggtctgaaagtgattgaagattcactggcggattacccaggccctctggcaggaatgctttcagtaatgcagcaggaagctggtgagtggtttttgttttgtccgtgcgatacgccttacattccccatgttttagcttcccggcttaatcatcagcgcaaagatgcgcctgtcgtgtgggtccatgacggtgaacgcgatcacccgactattgctctggtaaaccgtgctattgagcctttattactagaatatctgcaagcaggagaacgccgggtaatggcatttatgcgtctggctggcggccatgcggttgatttcagcgatcataaagatgcatttgttaacgtgaatacgccagaggagcttgcccgatggcaggaaaaacgatga

SEQ ID NO: 485637 - DNA, 270 bp, Shigella sonnei
atgaaatgtaaacgtctgaatgaagttattgaactcctccagccagcctggcaaaaagagccagaccttaacctgttgcaatttttgcagaaactggcgaaagagtcaggttttgacggcgaactggcggatttgacggatgacattctgatctatcacctgaaaatgcgtgattccgcgaaagatgcggtgatcccgggtttgcagaaagattatgaagaagacttcaaaacggcgctgttacgcgctcgcggcgtaattaaagagtaa

SEQ ID NO: 485638 - DNA, 987 bp, Shigella sonnei
atgaacaacagcgcttttactttccagacactacacccggataccatcatggacgctctgtttgagcaagggatccgggtggattccggtcttaccccgcttaacagctatgaaaaccgtgtctatcaatttcaggacgaagagcgtcgacgttttgtcgtcaaattttatcgccctgaacgttggacagccgatcaaatcctcgaagaacatcaatttgcgttgcagctggtaaatgatgaagttccggtcgcagcacctgtggcctttaacggtcagactttattgaatcatcagggattttatttcgctgtttttccaagcgtcggtggtcgccagttcgaagctgataatatcgatcagacggaagcggttgggcgttatttagggcgtatgcaccagacggggcacaaacagctttttatccatcgcccgaccatcggtctgaatgaatatctcattgagccacgcaagctgtttgaggacgctacactgataccttccgggttgaaagcggcattcctgaaagcgacagatgagctgatcgccgccgttacagcacactggcgggaagatttcaccgttctgcggctacatggagactgccacgccgggaatattctctggcgcgatggtccaatgtttgttgatctggatgatgcacgtaatggtccagctattcaggatttgtggatgttgctcaatggcgataaagccgagcagcggatgcaactggaaactattattgaagcttatgaagaatttggcgagttcgacaccgctgaaatcggactgattgaacctttacgcgccatgcgtttggtttattatcttgcctggctaatgcggcgttgggctgatcccgcgttcccgaaaaatttcccgtggttaaccggggaagattactggctgcgacaaacggcgacttttatagaacaggcaaaagttctacaagaaccccctttacaattaacacctatgtattaa

SEQ ID NO: 485639 - DNA, 627 bp, Shigella sonnei
atgaaaaagatttggctggcgctggctggtttagttttagcgtttagcgcatcggcggcgcagtatgaagatggtaaacagtacactaccctggaaaaaccggtagctggcgcgccgcaagtgctggagtttttctctttcttctgtccgcactgctatcagtttgaagaagttctgcatatttctgataatgtgaagaaaaaactgccggaaggcgtgaagatgactaaataccacgtcaacttcatgggtggtgacctgggcaaagatctgactcaggcatgggctgtggcgatggcgctgggcgtggaagacaaagtcactgttccgctgtttgaaggcgtacagaaaacccagaccattcgttcagcatctgatatccgcgatgtatttatcaacgcaggtattaaaggtgaagagtacgacgcggcgtggaacagcttcgtggtcaaatctctggtcgctcagcaggaaaaagctgcagctgacgtgcaattgcgtggcgttccggcgatgtttgttaacggtaaatatcagctgaatccgcagggtatggataccagcaatatggatgtttttgttcagcagtatgctgatacagtgaaatatctgtccgagaaaaaataa

SEQ ID NO: 485640 - DNA, 372 bp, Shigella sonnei
gtggtgtgggtcggtaaggatgtgacaggcattgaaccccgtaacgccagtgttattgaagttcctgatattaccgccaaccgccgcattaccgcgccgggttactggttttaccgcaatgatgaatttgtctttgactacagactcaaagcggaagatgagcgtgatgcccttctggctcaggtcagtgcccggacaggggaatgggaagaagacctgctgctggggctaatcagcgacgaagaccgggaaaaactgaaagcgtaccgtatttacgcgaaatcgctgcaggcgatggatttcagcaccatcactgataaatcctcatataacgccattgaatggtccgtctctccggaaggttcttcctga

SEQ ID NO: 485641 - DNA, 1041 bp, Shigella sonnei
atgcacaggattgatacgctgactgcggtaaaagataagtttggtccgggtaagaacggatttactgacggaaatcttcgcacaggacgtcttgctacctggctgaacagtgccatgtggaatgccattcaggaggaaatctgtggtgtcattgagaaggccgggatagaactgaataaagaagaacacgaccagctatataaggctatattattgctggtgggcggtgcaattaacgaagaggcattgctgataaaaaataacctttcggatgtggaagacagggatgaggctgttgaaaacctcggattaaaacccacggtggataaggcaaaaaatgccgttcagcgtgatggcgacaccatgaccggagagctgaaaatccgtggtgttaatgcgctgaggattttcaacgaagcttttggcctgatttttcgtcgttcggaagagtgcctgcaccttattcccaccagtgaaggtcagggggaaaatggcgatattggtcccctgcgcccgttcaccattaatctgcggacgggtgaaatatccatgtcgcataaagtgtctgttggcggtggttcgcaggtcaatggtgcgctgggtatcggcgttcagaacgccctgggggggaattcaattgttcttggtgataatgacaccggattcaaacagaatggtgatggcctgctggatgtttatgccaatagcgtgcatgtgttgcgttttcagagtggcagtatccagagtaataaagctgtaaacgttacaggacgggtaacaccgtcagactacggaaactttgatgcccgttaccagcagcgaaatggtggcgtgcaggatgtgcggtatggttatgaaatgtattacacccccggcagtaacaccgtttcgtggacatttcgctcaccttcgggacacgggctgtcagggatatcgatatcggataccggccgtaactcagcggataacgtcaacggcgtgtattaccgaccgctgcaaaaactgattaatggcacctggtataacgtagcgagtatttaa

SEQ ID NO: 485642 - DNA, 591 bp, Shigella sonnei
atggattcgttacaggatgattatacaaagctgctgtacggactgatgccgccggggcctgcatggtcagataccgacggtgtacttgacggtctggcaccatcgcttgtgcgtgttcaccagcgggctgatgaactggtgattgaaatcgatcccggtcagtccacagagctgattgaacgttatgaagaattgtatggtttacctgattcctgttcccctgtcggaacccagacattacgccagcgtcagcaacgtcttgaagcaaaagccaatgtggctggtggcataaatgagcagttcttcctggatcagcttgaggcgctgggatataccggcgtaacgatcgaacagttccagcacttggatgcaagccccgatccggaatggggagatcgctggcgttatttctggcgtgtgacgttgccgatggatgccggtgctcagtggcagacatgcacggacgcctgcaacacaccgatccggacgtggggggatacggttgcggagtgcgtgattaataaattatgtccgtcacacaccgtcgttttattttcctatccagatgaggatgaagatgcacaggattga

SEQ ID NO: 485643 - DNA, 396 bp, Shigella sonnei
atggtggcgacaaacgatccggaacgcccggccccggatgaaagcgtgattaacgcagtcagggaccacatccttcctctggcacctgttgccggaagcggattgtatgtattcggtgccacagaaaaagtcatcccgatgacgattgcattatcgaaagacacaccgcagatcaggactgcaataaaagcagagctgaatgcactgatgttacgggatggtgtgccagaggggcgtatgtatctgtccagaatcagtgaggccatcagtttgtctgctggtgaagtggcccaccggttaatcgtcccttcatcggatattgacctgggggagaccgagcttccggtgctcggcgagatcacctggcaggcttatgacccggcaaggagtaaataa

SEQ ID NO: 485644 - DNA, 177 bp, Shigella sonnei
atggcacgaaacaaacaagccctgcggcgaactgtgcaggccacagctgatggttatgagaattttattgcccgcgtagggatgcagacacctaaccagcactcagcatccacctaccgggctaatttcaccagtcgtaaccgcatgctggtggaatggtcctatcgttcatcctaa

SEQ ID NO: 485645 - DNA, 1404 bp, Shigella sonnei
atgacttctactctgacatccaaaccgacgctgaatccggctttacgtagtttctggactatgcgggcacgtaacaaagtgctttatggtggtcggtcatcgtcaaaatcatgggatgccgctggcattgccatatttctgtcgaataaatacaccctgcgtttttgttgtgcccgtcagatccagaataaaatcgaagagtcggtgtataccctgctcaaaattcagatagacaggtttggtctgcggcaccgtttccgtattctgaacaacaaaatcattaaccgggttactggctcggaatttgttttttatggattatggcgcaacatcgaagaaattaagtcactggaggggatcgatgtgttgtggctggaagaagcccacgcactgacggaataccagtggaaaattctggagccaacgatccgtaaagagggttcggaatgctggttcatattcaaccccggacttgttactgatttcgtctggcgcaacttcgttgttgatccgcccgaaggcactctcatccgcaaaattaactatgacgaaaatccgtttctgtctgacaccatgcttaaggttatcgacgcggcgcgacgccgtgatccggatggttttaaacatgtgtatgagggcgttccggagtctgatgatgatgcggcaatcatcaaactgtcttggatagaagccgcagtggatgcgcacaaaacgttaaatttcgaacccagtggaagaaagcgtattggctttgacgtggctgacagtggtacagataagtgcgctaacgtttaccgtcacggatccgttgttttctgggccgacgaatggaaggccaaagaagatgaattactgaagagctgccagcgtacttatcaggcggcgctggagcgtgaagcagatattgtttacgactctatcggtgttggtgcgtctgccggtgctaaattctctgaaattaacgctgaccggaagagcgagaacgcatacgcgcgacgtgtgaattaccagaggtttaacgccggtgctggtgtgcatgagccagatgacgagtacaacggcatccccaacaaagactttttcgcaaatcttaaggctcaggcatggtggctggtggctgaccgtttcagaaatacgtttaacgccattaacaacggagaacagtatcctgtggatgagctgatcagcatagattctcgttgtccgttgcttgaaaagctgaaactggaactgacaacacctcatcgtgatttcgaccgtaacggacgtgtgatggtcgaaagtaaaaaagacctcgcaaaacgcgagataccgtcaccaaacgttgctgatgcattcattatggccttcgcgccaatcgatacatcgctggatatctgggaacagctggggagacaggcctga

SEQ ID NO: 485646 - DNA, 765 bp, Shigella sonnei
atggcaaaaccggactgggaggccatcgaatcggcataccgggccggagtccttagcctccgtgatataggcgagaaatacggcgttacagaaggggctatcaggaagagggccaaaaagcttggttgggcacgcagtggcggtacgcaggtttgcaaaaatggtacgcaaaaaaggaaagtgcgtaccagcagaaagcctgccattactggccttacacaaaaaagtacgcaactaaaaacagaatctacaccggatacgaaaccgatacgcggaatgcgtaccgatcccccgactaacccattccaacccggtaaccagcaggcattaaaacacggtggttatgcccgtcgccttctgctcaaagatgaggtgatagaggacgctaaagcgttgacgctcgaggacgaattatttcgccttcgtgctaacaaccttgtcgctgcagagaatattggtcggtggttggtgtcgctggaagatgctaatggggaccaggaaaggaagatgctgattgaaaatatcagcgccgccgagaaagcaatgatgcgcaatacagttcgtattgagtccatcgttggcacgcttgcgacggtaggaaaaatatttgctgatacagcctaccgcaaggccgccactgataaggtgtctctggaggctgatcgtcttcgccgtgatgcaggtattgatgatggcaatggagagcgtgacctcaatgacttctactctgacatccaaaccgacgctgaatccggctttacgtag

SEQ ID NO: 485647 - DNA, 510 bp, Shigella sonnei
atggagtggataaatgctttgatgaactattttgtacttcatccatatcgcctatgggggcttctttttataatagcgttcacaaaatccactttactcatttcggcgatattgccaccagcatcaattatgatggccactgtaattacagtcagcaagacgactctttcaccatgggaagctggaatcacggtcatgagtggcgcatggtgcggtactatcgttaattaccatcttggtataataattgggcatatccctcaacttgcatgtataatatcaagccgttccaatacaatagaacgggttcgccttcagttgcaaaataactctgtgtcaatacttttcacttcgcgctttatcgccgtgctgcgttatattgctcctttggtggcaggaatgttgcaacttcatccagtgaaagtgtatacagtgagtctgatttcagctgctagctggtcagcactttatgttggtagttttagcttcgtgttgcctttttttagctaa

SEQ ID NO: 485648 - DNA, 207 bp, Shigella sonnei
atgcgaaagctgaaaatgatgctcttcggcgcaagcttgataatggtggtcgggtgctcgtcaaaggaaaatgccctgtgccatcctcagccgaaacctccagcgcctccggcatgggcaatgatgccaccgtcgaactctctccagttgctggacgaaacgttctcggtatccgggacggaatcatcagcgaccagacagcattga

SEQ ID NO: 485649 - DNA, 645 bp, Shigella sonnei
atgattaatggtgttgcgacattatccagtgcttcatcatcgacacgcgggagtgccgcagtacaatttctactgtgtttattaggtggcaagtcatgggatgcatgtgtaaatagctacagaaatgcattggcacaaaatgcaggtgtctattcctttaatctgacattgtcatacaacccgataaccacaacctgcaaaccggacgatttattaattactttagacagtattcccgtttcacaattaccagccacaggtaacaaagcaacaataaatagtaaacaaggggatattattctgcgttgtaaaaatttattaggtcaacaaaatcaaacatcacggaaaatgcaggtgtatttatcaagttctgatttgttagccggcagtaacacgatcctgaaaggtgcagaaaataatggagtcggatttatgcttgaaagcaatggttctccagtcacatttttaaatatcactgataacagcaaaggatacacaaatttaaaagaaattgcggcaaagtcaaaacttacagatacaacggtttcaattccgataactgccagttactacgtctacgatacaaacaaagttaaatctggcgcactggaggcaaccgcattaatcaacgtgaaatacgactaa

SEQ ID NO: 485650 - DNA, 390 bp, Shigella sonnei
atggaaattcgcataatgctatttatattaatgatgatggttatgcctgtgagctatgcggcatgttatagtgagttatctgttcagcacaatttggttgttcagggggattttgcacttactcaaacacaaatagcgacatatgagcataattttaatgattcgtcatgcgtgagtacaaatactatcacccctatgagttcgtcggatattattgttgggctttataacgataccataaaattaaatttacattttgaatggaccaataaaaacaacatcacgttgtcaaataatcagaccagtttcaccagtggttattcagttacggtgacacctgcggccagtaatgcaaaagtgaatgtttctgcgggggcggcggttcagtga

SEQ ID NO: 485651 - DNA, 2004 bp, Shigella sonnei
gtgagtcagtattacagtgactataaagcgtcgggtaatagtaagagtacatatgtacgttttaacagcgggttaaatttactggggtggcaactgcattctgatgccagtttcagtaaaacaaataacaatccaggggtgtggaaaagcaataccctgtatctggaacgtggatttgcccaacttctcggcacgcttcgcgtgggtgatatgtacacatcaagcgatatttttgattctgttcgcttcagaggtgtgcggttgtttcgtgatatgcagatgttgcctaactcgaaacaaaattttacgccacgggtgcaggggattgctcagagtaacgcgctggtaactattgaacagaatggttttgtggtttatcagaaagaggttcctcctggcccgtttgcgattacagatttgcagttggccggtggtggagcagatcttgatgtcagcgtgaaagaggcggacggttcggtaaccacctatctggtgccttatgcagcggtgccaaatatgctgcaacccggcgtgtcgaaatatgattttgcggcgggtcgtagccatattgaaggggcgagcaaacatagtgattttgtccaggcgggttatcagtatggttttaataacttattgacgttgtatggtggctcgatggttgcgaataattattacgcgttcactttggggactggctggaatacacgcattggtgccatttccgtcgatgccacgaagtcgcatagtaaacaagacaacggcgatgtgtttgacgggcaaagttatcaaattgcctacaacaaatttgtgagccaaacgtcgacgcgttttggtctggcggcctggcgttattcgtcgcgtgattaccggacatttaacgatcacgtttgggcaaacaataaagataattatcgccgtgatgaaaacgatgtctatgacattgccgattattaccagaatgattttggtcgcaaaaatagcttttccgccaatatgagccagtcattgccagaaggttgggggtctgtgtcattaagtacgttatggcgagattactgggggcgtagcggcagtagtaaggattatcagttgagttattccaacaacctgcgacggataagctataccctcgcggcaagccaggcttatgacgagaatcatcatgaagagaaacgttttaatatttttatatcgattccctttgattggggtgatgacgtttcgacgcctcgtcggcaaatatatatgtctaactcaacgacgtttgatgatcaggggtttgcctcaaataatacgggattatcaggaacagtagggagtcgggatcagttcaattatggtgtcaacctgagtcatcaacatcagggaaatgaaacgacagctggagcgaatttaacctggaacgcgccggtggcaacagtgaatggcagttatagtcagtcgagtacttatcgacaggctggagccagtgtttcagggggcattgtcgcctggtcgggtggcgttaatctggcgaaccgtctttccgaaacgtttgctgtgatgaatgcgccaggaattaaagatgcttatgtcaatgggcaaaaatatcgcacaacaaaccgtaatggagtggtggtatacgacggaatgacaccttatcgggaaaatcacctgatgctggatgtgtcgcaaagcgatagcgaagcagaattacgtggcaaccggaaaattgccgcaccttatcgcggcgcggttgtactggttaattttgataccgatcagcgcaagccctggtttataaaagcgttaagagcggatgggcaaccattaacgtttggttatgaagtcaatgatatccacggtcataatattggcgttgtcggccagggaagccagttatttattcgcaccaatgaaataccgccatcggttaatgtagcaattgataagcaacaaggactttcatgcacaatcaccttcggtaaagagattgatgaaagtagaaattatatttgccagtaa

SEQ ID NO: 485652 - DNA, 159 bp, Shigella sonnei
atggcgcaatatcgggtaccggtagtcgtggaagttattcttgagcgtgtgaccaatatttcgatgggcagcgaactggataacgtcatggaatttgaagatatcgccgataacgcagtggacgcaccgactgaaacctgcttcatgcactatgaataa

SEQ ID NO: 485653 - DNA, 852 bp, Shigella sonnei
atgttacgtttctctgctaatttatcgatgttatttggtgaatatgattttctcgcccgttttgagaaagctgcgcagtgtggttttcgcggcgttgaatttatgtttccttatgactacgacattgaagaattaaaacaggtgctggcgagtaataaactcgaacatacgctgcacaatctaccggcgggtgactgggcggcgggggagcgcggtattgcctgtattcctggccgtgaagaagagtttcgggatggcgtagcagcagcgattcgttatgcccgtgcgctggggaataaaaaaattaactgtctggtcggtaaaacgccggctggtttcagcagtgaacagattcacgcaacgcttgtagaaaacctgcgttatgccgcgaatatgctgatgaaagaagatattttattactgattgaacctattaaccattttgatattcctggtttccatctcaccggaactcggcaggcgctgaaattgattgatgatgttggttgctgcaatttgaaaattcagtatgacatttatcacatgcagcggatggaaggtgaattaaccaacaccatgactcagtgggccgataaaattggtcacctgcaaattgctgataatccgcatcgcggcgaaccggggaccggagaaattaattatgattatctctttaaggtaatcgaaaattctgactacaacggttgggttgggtgtgaatataaaccccaaaccaccacggaagccggtttacgctggatggatccgtactttctgaaccgggtcgtagccactgggaaggttatgaaaccggtactcgcgcagcggcaaaaggtggtatcaccaccatga

SEQ ID NO: 485654 - DNA, 1101 bp, Shigella sonnei
atgatcgaaatgccgctcaaccagctgcctgcaacggttgaccgcgcttcaattgaactgaagttcgatgccgctaaaggcaagctgactatcgatgcggcacaactcggtggcctggtgtcttacaacatcgaccgtctgcatgagctggatgaagtgggcgttgtcggcttcaaatgcttcgttgcgacctgtggcgatcgcggtatcgacaacgacttccgtgatgtaaacgactggcagttcttcaaaggtgcgcagaagctgggcgaactggggcagccggtgttggtgcactgcgaaaacgcgctgatctgtgacgcactgggcgaagaagcgaaacgtgaaggtcgcgtaactgcccatgactatgtggcttcgcgtccggtatttaccgaagtggaagcgattcgccgcgtgctgtatctggcgaaagttgccggttgccgtctgcacgtttgccatatcagcagcccggaaagtgttgaagaagtgactcgtgcacgtcaggaaggtcaggatgttacctgtgaatcctgcccgcattactttgtactggataccgatcagttcgaagaaatcggtactctggcgaagtgttcaccgccgatccgcgatctggaaaaccagaaaggcatgtgggaaaaactgtttaacggtgaaatcgactgcctggtttccgaccactcaccatgccctccggaaatgaaagccggcaacatcatggaagcatggggcggtattgccggtctgcaaaactgtatggacgtgatgttcgatgaagcggtacagaaacgcggaatgtctctgccaatgttcggcaaattaatggcgactaacgcagcagatattttcggtctgcagcaaaaaggccgtatcgccccaggaaaagatgccgacttcgtcttcattcagccgaatagcagctatgttcttaccaatgacgatctggaatatcgccacaaagtcagcccgtatgttggccgtaccattggcgcgcgtatcacgaaaaccatcttacgtggtgatgtgatttacgacattgaacagggcttccctgttgcgccgaaaggtcaatttatccttaaacatcagcagtaa

SEQ ID NO: 485655 - DNA, 888 bp, Shigella sonnei
atgttcaattttgcagtcagccgcgaaagcctgttatcaggatttcagtggtttttctttattttttgcaacacggttgtggttcctcctacgctactttctgcttttcagttgccgcaaagtagcctgcttacgctcacgcaatatgcttttcttgctaccgcactggcctgcttcgctcaggcgttctgcggtcatcgtcgcgctattatggaagggccgggtggcctgtggtggggaaccatccttactatcacccttggcgaagcatcgcgcgggacaccgatcaacgatatcgctaccagtctggcggtggggattgcactctccggcgtgctgacgatgttgattggttttagcggattaggccatcgcctggcacggttatttacgccgtcggtgatggtcttgtttatgttgatgctgggcgcacagctgaccactatctttttcaaaggtatgctcgggctgccgtttggcatagccgacccatattttaaaattcagttaccaccgttcgcgctctcggtggcggtgatgtgcctggtactggcgatgattatctttctgccgcaacgttttgcccgttatggcctgctggtcggcaccataaccggctggttgttgtggtacttttgctttccttcttcgcattcgctctccggtgagttgcactggcagtggttcccgctcggcagtggcggtgctttgtcgccgggaattattctgacggcggtgattacaggtctggtaaatatcagcaatacctacggtgcgattcggggcacggatgttttttatccgcagcagggcgcggggaatacgcgttatcgtcgcagctttgtggcgaccggatttatgggtgatgctgccaacttactgatttag

SEQ ID NO: 485656 - DNA, 1278 bp, Shigella sonnei
atggcacaatttaaagttgatgattttctgattgagttaagttttaactctcagaaagttttaaaaggcttggaaaaagccgagaaacaaacgatgcaggtagcatcacgaattgagaagcgattgaataagtcgtttagagttaatcctacgcctttaaatgattctctcaaactaatggaaagaaatgtcgataaaactgtttccaagattgagcagcgtcttaaaaacactagagcgtttaagattaaaactgaaattgaggatactttaaagccacttagacaaccaagacagccacgaattagcggaagcagagcaatcacagcagcttactcagcgaatatgagcaagcttcgtgactttaatcctatgcttgagaagtattttaaaagccagtattacagcttaagcagtaaatccaagacacttggaaacgaaacttttaatcgtgagttagcaaagttaaatcagtctcttcgtgaaacactttctaagtttaacaagaccaccagcaaaaataatcacagtgaaaatgcttcaaatagtctggatgtattagctacgagtgcaatcaaagcaggtacagccatttatagttttcagacagccttagaagcttacaggcggattatggaggttggtctgaaaaaagaagcatcacaacgagcggcacaattcgttttaggtgatgaaggtgctaaacgagctacagaatttgttaagaatcttgctgatagtagtggtgtagaccagattgaaacattaagcagttttgctaagttttccgctggtgctggtgatatgaatgcagaccagaaagaatccttattttctaatgtgattggtacatccagattaatggggctaagcaccgatgaaattaacgggattttaaaagctttcgagcagatggcatctaaaggaaagattcaggctgaagagctacgcggtcaattaggtgacagaatggcaggtgcttttcagttatttgccagaagtcttgggatgactacggaagaattagacaaggccatgaaagacggtaaggttctttctaaagatgtttttcctaaagtatccgctgaaatgggaaggatgattgataaagctggtggatgggaaaagattattaactctactcagacgcagttaggccgcttaagtaattcatggaataataatctggccttaatgttcgatggttcacaggaaggtttaacagactttacaaggtcactgactaatttacttaattcactaaatagctgcgcttaa

SEQ ID NO: 485657 - DNA, 210 bp, Shigella sonnei
atgtttgaagaacgtttagagactattcggtctgtttgtgaaaacttaaagttacaaactaagccagccttaagaattaaaaacaaacgtcaagttatcacctcacacaaaccaaaaacacgcaagattccaaagtggtgtattgaccgtattccttctgatgctcaaatcataggtgaaacggaattacattatcttgtccgacattaa

SEQ ID NO: 485658 - DNA, 711 bp, Shigella sonnei
atgacaaacgatttatatattaacggtaaaaaggttgatagcttcggagactggtcaccacagggtgaacatccgctacatactattcagcgtcaagagcatgacaagcgcattgagcttgagcaagagctaaagatgtcaccaaaggtaatttcctttgtgtctcctgagcctcaagaaatgcctgatatctgcaaaactgaagcactatttgagcttgagcgtgaatattacccagctttaaaatcacagcgtcttagacttgatgtcgcttacgatgctgttaagaacttcgaagaaacctcgaaaccttcagaatatgatattgcttacgagattaagtcaaacccgtttatctattatgaaggaaactttaatgatggttttggtacagcgattgaagacgttcctaaagttcttcaaagtatccctgaagggttccggttaattgatgtcagacaagcattaaggggttctggtcaatttattctgatgactgataaaacagatgaagagattcttcagttagctgaagctaatttgactaagcattattccggtaaactggataagttaaagcaaaagcttaaaaaagaacttgatactatgaaagaacttgttagtgaatatgagtcgcagaagaagattgctttgatggctgatattgagcagttaacgaagatttctcagaagtatagcaaggctgtttga

SEQ ID NO: 485659 - DNA, 216 bp, Shigella sonnei
atggctgaaaactcagaagaaattgaagactttattcaggaaattgaaactggtgaaccgcgttttatgtttcctgttaccgactcaaacatgaagcgtcttattatcgaagaaacgaacaaatacagcgttagccctgaaaaatatctcaaggcggctatagcaattttgtatagcgataatattctggtgacggattcgaaggtggtgcattaa

SEQ ID NO: 485660 - DNA, 750 bp, Shigella sonnei
atgcgctacttattaattgtaattatatttattataggttttagtgcattacctgtatgggcaatggactgctatgctgaacatgaagggggaaataccgtagtcattggttacgtaccaagaatttctatccccagtaatggtaaaaaaggtgataagatctggcaaagcagtgagtattttatgaatgtcttctgtaataatgcattacctgccccatcacctggagaagaatacccatcagcctggactaatataatgatgtttttaccaggcggtcaggacttttataatcagaactcctatatttttggcgtaacatacaatggagttgattatgattcgactgcccctaatgctatcgcagcaccagaatgcattgatataaaaggagcgggtacctttaataatcactataaaaaccccgctgtctgtagtggaggtcctgagcctcaattatcagtaacctttccagctcgcgtacaactctatattaaattagcaaaaaatgccaatagagttaataaaaacctggtgttacctgatgaatatatcgctctagagtttaaaggtatgagtggcgcaggagctatagaagtagacaaaaatttgaccttcaggattcgtggattaaataatattcatgtccttgactgctttgttaatgtcgcactggaaccagctgatggcgttgttgactttggtaaaataaattcccgaacaattaaaaataccagcgttagtgagtaa

SEQ ID NO: 485661 - DNA, 750 bp, Shigella sonnei
atgcgctacttaaacacaaagaatctcattgcagcaggagtattactcgcctgcatgagcagcattgcctggggtgccatcatcccggaccgtacccgtatcataatgaatgagtcagataaaggggaagcattaaaacttactaatcaaagtaaaaatctaccctatctggcgcaaacatggatagaagatacgaaaggcaataaatcacgtgactttattgtcacggttccccctatggtacgtttaaatcccagtgagcaaattcaaataagaatgataagtcaggaaaaaattgctcaactgcctaatgacagagaaacgctcttctattttaacgtgcgagaaataccgccaaaaacagataaaaaaaatgtgatgcaagtcactatgcagcacgcattgaaactattctggcgaccaaaagctattgaattagaagatgatggggtaatgtcttacgaaaaagttgaaatcatccgtagaaatgatggttcgatccgctttaacaataagatgccttatcacgttacgctgggttatatcggaacaaacggaatcacaatgttgccacaaacgcaaagtttaatggtaaccccttatagccatgcagatacgcagtttaaaaatgttccgtcagcttttcaggttggttatatcaatgattttggtggattaagtttttatgaaataaactgcccgacggttaataactcttgtaatgtttccgtagccaaacgagataaataa

SEQ ID NO: 485662 - DNA, 240 bp, Shigella sonnei
atgggggttattcgcctggcagatggtagtcacccaccactggggattagcgtaaaagataaaaccagccataaagaattaggactggttgctgatggcggctttgtatacctcaacggcattcaggatgacagcaaacttactttacgctggggtgataaatcctgttttattcaaccacccaatagcagcaacttaaccaccggaacggttattttaccgtgtattagccaaaattaa

SEQ ID NO: 485663 - DNA, 261 bp, Shigella sonnei; identical to SEQ ID NO: 17248

SEQ ID NO: 485664 - DNA, 591 bp, Shigella sonnei
atgactcagagccgccgaccgtcgccactgcagcggagagtgctgattgtgctggctgcccttgatgaaaaacggccaggacccgtgctgacgcgggacatagaacgggtgctggagcaaagcggggaagccccggtctacgggccaaacctgcgcgcctcctgccgtcgtctggaggatgccggctggctgcgtaccctgcgcgctccgaacctgcagctggcagtggagctgacggacgccggccgggccgtggcacagcctctgctgctggcagaacaggaccgcatccgggcagaacagcgtgcggcagaagtcgtcgtactgccgctggtcccggcagcaggtctgcccgcaggcggcacttctgccactgatctggcggtggagctgaacggcataacgtatcaggcctgccgtggggattttgtggtgcgtctcgacggcagcacctgtctgcagttatggaataaagaaggctgggtggtacgccgggagggcgatccgctggaagtggcgcagtggctgccggcctgtcacgatgcaggaatggaggttcgcgtacagataaatgaaagtgccgctccgtaa

SEQ ID NO: 485665 - DNA, 348 bp, Shigella sonnei
gtgacttttgagcagaaaaaagcccgggccattgccctgatggacagcaaaaagatgtggcggagcaattatgcccctcctcttctgcgtattctctggcggctgggtatccggcttccgccattaccctttatgccgttctggcaggtcacggtgctgacggggggcttatggggcatttcctggggatgtgcaatgtggtttatctactgggggccgtcaggaatggtggcaggtgaggccattattataagtatcacggggggttttttgtccggactgctcatggcctctttccactggtggcgcaggaaagttaaccgactgccaccatgggatgatgtgtaa

SEQ ID NO: 485666 - DNA, 336 bp, Shigella sonnei
atgaacagaaaatattattttaataatatgtggtggggatgggtgacgggaggatatatgctgtatatgtcatgggattatgattttaaatacagattactgttctggtgtatttctctctgcggaatggttttgtatccggttgcaaaatggtatattgaagatacagctctgaaatttacccggcctgatttctggaacagcgttttttttgctgatacacctggaaaaatgggattgcttgctgtttatacgggtactgttttcatattatctcttccgttaagtatgatatatattctttctgttattataaaaaggctgtctgtaagatag

SEQ ID NO: 485667 - DNA, 519 bp, Shigella sonnei
atgtccatccgttttgcccgcaaagccgattgtgctgccattgcggaaatttataaccacgccgtgttgtatacggcggctatctggaatgaccaaacggttgatgcagataaccgcattgcctggtttgaagcgcggaccatagcaggttatccggtgctggtaagtgaagaagatggcgtagtgacgggatatgcctcgtttggcgactggcgtagtttcgatggttttcgccataccgtggaacattcggtttatgtccatcccgatcatcagggcaaaggtctggggcgtaaattgttaagccgattgattgatgaagcgcgggattgcgggaagcatgtcatggtcgccgggatcgaatcgcaaaatcaggcctcgctgcatctgcaccattcgctgggatttgtcgtcaccgcacaaatgccgcaggtgggcactaaatttgggcgctggctggatctgacatttatgcagttgcaactcgacgaacgcactgaaccggacgcgattggatga

SEQ ID NO: 485668 - DNA, 450 bp, Shigella sonnei
atgaatcagtcgctcacccttgcttttttgattgccgccggaattggtctggtagtccagaacacgctgatggtgcgcatcacccagacctcctctaccattctcatcgccatgttgctgaactcactggtggggattgtgctctttgtttctattttatggtttaaacaaggcatggcggggtttggcgaactggtgtccagcgtgcgctggtggacacttatacccggcttgctgggatcgttttttgtcttcgccagtatcagcggatatcagaatgtgggagcggcgacaactattgcagtactggtcgccagccagctaattggcggtctgatgctggatatcttccgcagtcatggcgtaccactacgggcgttgttcggcccaatttgtggcgcaattttacttgtggttggcgcctggttggtagccagacgctcattttaa

SEQ ID NO: 485669 - DNA, 234 bp, Shigella sonnei; identical to SEQ ID NO: 461251

SEQ ID NO: 485670 - DNA, 174 bp, Shigella sonnei; identical to SEQ ID NO: 462590

SEQ ID NO: 485671 - DNA, 201 bp, Shigella sonnei
atgttatgtattaaattcgaatatttgacagataaaatgattaagcatgtatcagacctgctcatcaaagaaggtggtttcggtgatgcttgcaatccaaaagatatcttcattcatgccaccagcccaaacgcaacactaaagacagcagttacagcggaatggtttgaacgaaataaagcggaattaggttattggtag

SEQ ID NO: 485672 - DNA, 273 bp, Shigella sonnei
atgaagcaatggcgagatgatattaaacggttctttgcaacttacttcatgattaattatgagacaggaatgcttgaatggattgatggtggagaggttaagacaagagatgatgcttacggtaatccaatgattcgttatggcactcgtgattattatctgaagtatgtcatctggtttttgcatcatgaagttcaggcaactaaaaagattatcttcagggatggtaataaaagaaattgccacccaaacaatttactcctggagatttaa

SEQ ID NO: 485673 - DNA, 279 bp, Shigella sonnei
atgaataaacacacattaaccagagttacaaagacagcctttgatgaactgaaccgaatcaaaaacattacaggtctgccacactcagcagtgatgaagcttgcaattaaccgtgatattaacgaacaggatttgcttaatagtcgcttagaggctgcaagacaccatatcaggattaagcaagatgaccttgatagtctgaaatccttaaatgcttttggactggatttagcaaggttactaagtatcaaaattcacaaactgtctcaggaggtctga

SEQ ID NO: 485674 - DNA, 558 bp, Shigella sonnei
atgcagtattcagaatttagagcgatgcttcaggcatcaagagaacgcaacaagcacaactcctacgcttacacaaacaaccccaccagctacgaagtcccaacctttagcaaatccgaacgtaagaacattgaagcggtcattcgtagcattacgccacgagacagatttatgccagtacgcaaaacaacaaagaatactattaaaaattatctggctaactttgacagttacgagcagttaccaagcaagcttgatgatgtttttattgggttctgtagaagtgaaggccacccgaaatacaacaaaaaactattttatctgctaaagaatcttgacgaaattaacgcatccaccgtgacaaatcatcttcagcgacaggcaaccagacttagttacgaattaccaagcgataaatattgcgctttgcttgctgtgatgtgcgcgaaattaattggcattgttgaacatcatattgccgttgggaatattgagccaatggaaaacgagcaaccagatttcgagtttgacccctatttagttacagaggatttttaa

SEQ ID NO: 485675 - DNA, 333 bp, Shigella sonnei
atgaggcgtggctatgtatttggtcgcatattttgcattgcacacagacctcttcaatcgccctgtaacgagttaaacgacctcttcaggtcaactcataaggtcaggtactttttgtgtcagaatgcgattgagagcgtcttacaaggaaaactaatggtaaatctccctcctgagctggggtcacctgatgtatggactggtggaggtattgggctgattgcaggcctgctacttcgctacgtcctcgtcagagtgcttgttgtctttaaactgttcggtcgtacatggacgcttgaccttaaggataacgaccacacagacccccgttaa

SEQ ID NO: 485676 - DNA, 198 bp, Shigella sonnei
atgaatataaaaattgctgctttaacgctggctattgccagcggtatttctgctcagtgggccatagcagcggatatgccagccagcccggcacccactattccggttaaacagtatgtgactcaggtcaatgccgataacagcgtgacctttcgctactttgcccctggggcaaaaaacgtctccttagtggtgtaa

SEQ ID NO: 485677 - DNA, 1617 bp, Shigella sonnei
atgtttagacgaaatcttattacctctgccatcttattaatggcaccgttagccttttctgcacaatcattggctgaatcattaacggtggaacaacgccttgagttattagaaaaagcgttaagagaaacgcaaagcgaactcaaaaagtataaagatgaagagaagaaaaaatatacgccagcgacggtgaatcgtagcgtaagtacgaatgatcaagggtatgccgccaatccgttcccgaccagtagtgccgcaaaacctgatgctgtactggtcaaaaatgaagagaaaaatgccagtgagacaggttcgatttattcttccatgactctgaaagatttcagtaagtttgtgaaagatgaaattggctttagttacaacggctattaccgttctggttgggggaccgcctctcatggttcacctaaatcatgggcgattggttctctgggccgctttggtaacgaatactccggctggtttgatttgcagttaaaacaacgtgtctacaacgaaaacggcaaacgggttgatgccgttgtgatgatggatggtaacgttggtcagcagtactctaccggctggtttggcgataacgccggtggcgagaactttatgcagttctccgatatgtacgttaccaccaaaggtttcctgccctttgcgccagaggctgatttctgggtgggtaaacacggtgcgccgaaaattgaaatccagatgctggactggaaaacgcagcgtactgatgccgcagcgggtgtaggtctggaaaactggaaagtcggtccgggtaaaattgatatcgcgctggttcgcgaagatgtcgatgattacgatcgcagcctgcaaaacaaacagcagattaataccaatactattgatttacgctataaagatatcccgttatgggataaagcgaccttaatggtgagtggtcgttatgtcacggcaaacgaaagcgcatcggaaaaagataatcaggataataacgggtattatgactggaaagatacctggatgttcggcacatctttaacgcagaaatttgataaaggtggcttcaacgaattctccttcctggttgcgaataactctatcgccagtaactttggccgttatgctggcgcaagtccatttaccacctttaatggtcgttattatggtgatcacaccggcggaacagcagttcgtctgacctcgcagggcgaagcctatatcggcgatcattttattgtggctaacgcgattgtttactccttcggtaacgatatttatagctacgaaacaggcgcacactctgatttcgaatctattcgtgcggttgttcgcccggcctatatttgggaccaatataaccagacaggtgttgaactgggctatttcacccagcaaaacaaagatgcgaatagtaataaatttaatgagtctggttataaaaccacgctcttccatacctttaaagtcaataccagtatgttgacctcgcgtccggaaattcgtttctacgccacgtatatcaaagctctggaaaacgaactggatggcttcacctttgaagacaataaagacgaccagtttgctgtcggtgcgcaggctgaaatctggtggtaa

SEQ ID NO: 485678 - DNA, 1059 bp, Shigella sonnei
atggcgcaggcggggatcaggccgctggtaacgttatcccattacgaaatgccatatgggctggtgaaaaactacggcggttgggctaatcgggcggtcatcgatcacttcgagcattacgcccgcacggtctttacccgctaccaacataaagtagcgttatggctgacgtttaatgaaatcaatatgtcgttacacgcgccattcacgggcgtggggctggcagaagagagtggcgaggcggaagtttatcaggcgatccatcatcaactggttgccagtgcgcgggcagttaaagcctgtcatagcctgatccccgaagcgaaaatcggcaatatgcttctcggtgggctggtttaccccctcacctgccagccacaggatatgttgcaggccatggaagagaaccggcgctggatgttctttggtgatgttcaggcgcgtggccagtatcccggctatatgcagcgtttcttccgcgaccacaatatcaccattgagatgactgaaagtgacgcagaagatttaaaacatactgtagatttcatctcttttagttattacatgactggttgtgtttcccacgacgaaagcattaataaaaatgcgcagggcaacatactgaatatgatccccaatccgcatctgaaaagttcagagtgggggtggcaaattgatccggttggattacgggttctgttaaatacgctttgggatcgttatcaaaaaccgttatttattgtcgagaacggattaggcgcaaaagacagcgttgaagcggatggttcgatacaggacgattatcgaattgcctatttaaacgatcacctggtacaggtaaatgaagcgattgccgatggtgtggatattatggagtacaccagttgggggccaattgatttagtcagtgcatctcattcacaaatgtctaagcgctacggctttatttatgtggatcgtgatgataatggcgaaggaagcctcacaagaacgcgtaagaaaagcttcggatggtatgcagaagtgatcaaaacgcgggggctgtcattaaaaaaataa

SEQ ID NO: 485679 - DNA, 216 bp, Shigella sonnei
atgaaatccatggataagttaacaacgggtgtcgcctatggcacctcagcaggtagtgccgggtactggtttttacagctgctagataaagtcacgccctcacagtgggcggcaattggagtgctgggtagcctggtatttggcctgctgacgtacctgacaaacctttatttcaagattaaagaagataagcgcaaggctgcgagaggtggataa

SEQ ID NO: 485680 - DNA, 498 bp, Shigella sonnei
atgcctccatcattacgaaaagctgttgctgctgctattggtggcggggctattgctatagcatctgtgttaatcactggcccaggtggtaacgatggtctggaaggtgtgagacataatccttacaaagacatagttggtgtatggactgtatgttacgggcatacaggaaaagacatcattcccggtaaaacgtataccgaagcagagtgcaaagccctcctgaataaagaccttgccactgtcgccagacaaattaacccgtacatcaaagtcgatataccggaaacaacgcgctgcgctctttactcgttcgtctacaacgtgggtgctggcaatttcagaacatcgacgcttcttcgcaaaataaaccagggtgatattaaaggcgcatgtgatcagctacggcgctggacatacgctggcggtaatcaatggaaaggactgatgactcgccgtgagattgagcgtgaagtctgtttgtgggggaaacaatga

SEQ ID NO: 485681 - DNA, 459 bp, Shigella sonnei
atgagcagagtaaccgcgattatctccgctctggttatctgcatcatcgtctgcctgtcattggctgttaatcattaccgtgataacgcaatcgcctacaaagagcagcgcgataacaaggccagtgaactggagaaggcgaacgccaccatcgctgacatgcggaagcgtcaacgtgatgtagcagaactcgacgcaagatacataaaggagcttgctgatgctaacgcgactatcgaaagtctccgtgctgatgtttctgctgggcgtaagcgcctgcaagtcgccgccacctgtgcaaagtcaacgaccggagccagcggcatgggcgatggagaaagcccaggacttacagcagatgctgaactcaattattaccgtctccgaagtggaatcgacaagataaccgcgcaggttaactacctgcaggaatacatcaggacgcaatgcctgaaataa

SEQ ID NO: 485682 - DNA, 498 bp, Shigella sonnei
atgaaatcattaaccctcttcaatcaaccaattcgtatcggtgaagatggcatgatctgcctcactgatatgtggaaagccagtggtaaaagtgaatctgaatcgccttaccactacctgcgaaacaagcagaccaaagagttcttagccgagctggagaaaaaccacgaatctgtggtttttactgagcgcggtgtacacggtggaacatatggcgggaagtttgttgcttacgattatgcggcttggttaaaccccgggttcaagtacgcggcctataaagtcctcgatgactacttcaccggagaacttcagcatcgcaacagcttaagtgcgcagctcaacatgaaatgtcatgaatttgaccagaagaaagatatggcgagcttctgcggacaagggctggcagcatggcgctatacgaagccagtgttggtcgctgagattaactccctggctaaccagctgcagattacgatccccgggcttccgggatga

SEQ ID NO: 485683 - DNA, 258 bp, Shigella sonnei
atgagtgatcatgttattgaatgcgcctccagagcggggcgcgacttctcagagttcatgaaaggcgagaagggcatgatggaagcattggcctcggtggatgagtttggcgagcagctgcgcctcaacggctgtgtcaatcatcactttgttagctacatgatgcggaactcgatcatgcaggcattcatggacatggcaaaagccgagaggaaagaagagcgccggcgtaagcgagcggaagcaaaagcgaagtag

SEQ ID NO: 485684 - DNA, 576 bp, Shigella sonnei
atgtcacgaacctttgcttactgccgtgtatcagtagagacttccaccacagagaaccagattcaagccattaagaaggctggctatgatattcctaagtcacgagttatagaggaggttgtctctggttcagtgtcagctatggatagggacggatttgcgaatctggtcaaccataagctagaagaaggtgacacccttgttgttcttaaacttgaccgtctgggaagggataacatcgacctacagaatacagtgacccttcttaatgataagggtgtgaagctcatctgtttagatttacccgttaaagacctttcaagctcagagggtaagttggttctacagctatttagtacctttgcagagtttgaaagaaaccgtatcagagagcgcactaaacagggtctagagcgtgctagagttcaaggtaaggtacttggaagacctatagcgagtgacacaactagagcggtcttagagtacaaggaaaggggactatctcagtctcaggtagctaaggttcttaacctctctgtaaggactgttagcagacactggaccaagaccctgtaa

SEQ ID NO: 485685 - DNA, 972 bp, Shigella sonnei
atgctattacgctctgccctcggcatgggcatcgtgatggtgttgatggggctggcacaaaatatctggcagtttttgatcctgcgggcgcttcttgggttacttggcggatttgtccccaacgctaatgctcttatcgccacacaagtaccgcgtaataaaagcggctgggcgctgggtacgctctccacaggcggcgttagtggtgcgttgctcggcccaatggctggcggcctgctcgccgatagctacggcttacgtccggtattctttattaccgccagtgtgctcatactctgctttttcgtcaccctgttttgcatcagagaaaaattccagccgatcagcaaaaaagagatgctgcacatgcgggaagtggtgacatcacttaaaaacccgaaactggtactcagcctgtttgtcactacgttaatcatccaggtggcgacgggctcaattgcccccattctgacgctgtatgtccgcgaactggcgggtaacgtcagtaacgtcgcctttatcagtggcatgatcgcctcggtgccaggcgtggcggctctgctaagtgcaccacgactcggcaaacttggcgatcgaatcggacccgaaaagatcctgattacggcgctgatcttttctgtactgctgttgatcccaatgtcttacgttcagacgccattgcaacttgggattttacgttttttgctcggtgccgccgatggtgcactactccccgccgtacagacactgttagtttataactcgagcaaccaaatcgccggacgtatcttcagctataaccaatcgtttcgtgatattggcaacgttaccggaccattgatgggagcagcgatttcagcgaactacggtttcagagcggtatttctcgtcaccgctggcgtagtgttattcaacgcagtctattcatggaacagtctacgtcgtcgtcgaataccccaggtatcgaactga

SEQ ID NO: 485686 - DNA, 375 bp, Shigella sonnei
atgaccatgtacgcaacgcttgaagaagccattgacgctgcacgcgaagaatttcttgcagacaaccccggcatcgacgccgaagatgcgaatgtgcaacagttcaatgcccaaaaatacgttttgcaggacggcgacatcatgtggcaagttgagttttttgccgacgaaggggaagaaggtgaatgtttacctatgcttagcggtgaagccgcgcaaagtgtttttgatggcgactatgatgagatagagatccgccaggagtggcaggaagagaatacattacatgaatgggacgagggggaatttcagcttgagccaccgctggataccgaggaaggacacgctgcagctgatgagtgggatgaacgttaa

SEQ ID NO: 485687 - DNA, 228 bp, Shigella sonnei
atgcgtttaattgtggtgagcatcatggtgaccttgctgagtggctgtggcagcatcattagccgcactataccggggcaggggcacggcaaccaatattatcccggtgtgcaatgggatgtgcgtgactccgcttggcgttatgtcacaatccttgatctgccattctccctggtttttgatactttactgctgccgatcgacactcatcatggcccgtatgagtga

SEQ ID NO: 485688 - DNA, 339 bp, Shigella sonnei
atggcgcatcggctactcattggtaaaggaatgatcaccttgaatctcaaacggatttttctcgccctcaccttacttcccttgtttgctgttgccgctgatgattgcgcactctcagatccgatgctgaccgtacaggcgtataccgttaatcctcaaacagagcgggtgaaaatgtactggcaaaaagccaatggcgaagcgtggggaactttacatgctctgctggtggatatgaatagtcagggtcaggtgcagatggcgatgaacggcggcatctatgatgaaagctatgcgccgctcggtttgtacatcgaaaacggtcagcagaaggtgtaa

SEQ ID NO: 485689 - DNA, 951 bp, Shigella sonnei
atgctgagcgcatttcaactggaaaataaccgactgacccggctggaagtcgaagagtcacaaccccttgtaaatgcagtatggattgatcttgtcgaaccggacgacgacgagcgactgcgcgtacaatctgaacttggccagagcctggcaacccgcccggaactggaagacatcgaagcatcggcacgtttctttgaagacgacgacggcctgcatattcactccttcttcttctttgaagatgcggaagatcacgccggtaactccactgtggcatttaccatccgtgatggtcgtctgtttactctgcgtgagcgtgaactgcccgcttttcgtctgtatcgtatgcgtgcccgtagccagtcgatggtagacggtaacgcctacgagctgctgctggatctgttcgaaaccaaaatcgaacagttggcagatgaaattgaaaatatctatagcgacctggagcagttgagccgggtgattatggaagggcatcagggcgatgagtacgacgaggcgctctccactctggcggaactggaagatatcggctggaaagttcgcctgtgtctgatggatacccagcgcgcgctcaacttcctggtgcgtaaagcgcgtttaccgggtgggcaactggagcaggcgcgtgaaatcctgcgagatatcgaatccctgctgccgcataacgaatccctgttccagaaggtgaacttcctgatgcaggcggcgatgggttttatcaacatcgagcagaaccgcatcatcaaaatcttctcggtggtatccgtggtattcctgccgccgacgctcgttgcttccagctatgggatgaactttgagtttatgccagaactgaagtggagtttcggctacccaggcgcgattatctttatgatcctcgcgggcctggcaccgtatctgtactttaagcgcaagaactggctgtaa

SEQ ID NO: 485690 - DNA, 480 bp, Shigella sonnei
atgaaaagcaaactccagaaaattatattatgtttatttcttctatgctgcatctataatttatggacattgcgtcctgtacagattttgtatacatactctgatgctggcaattcagtctttctggtcgttgatcatctgccatggactgacagcgataaaataaattggtatctgaagcatcagaatgaaattaaaaatcaacatcccctaccagaaggtagttggcatacctggtatgtcattgatatcggtaatggcttcactgactataaaaaatatatcgaagggccgtatgaagatctctactgtttcccgacaattaagagcaatgataattgcatcgtgaaaaattacttaatggttattaatgaatacccttatcgtaacactcatattggtattaacgattttactgagtatcaattaacacaagaaaataaaatagagcgagttttcaatccgcatgactttaaataa

SEQ ID NO: 485691 - DNA, 384 bp, Shigella sonnei; identical to SEQ ID NO: 466832

SEQ ID NO: 485692 - DNA, 603 bp, Shigella sonnei
atgacatttaaaaatttacgttatggattatccagcagtgtcgttttggctgcctcattgttcagcgtaccctcttatgcggcaacagacagcattgggctgaccgtgattactaccgtagaaataggtacttgtaccgctacattagtaaatgactctgatcaggacatttctgttgttgactttggcgatgtatatatttctgaaatcaatgccaagaccaaagttaaaacattcaaactcaaattcaaagactgtgcgggtatccccaataaaaaagcacaaataaaattaaccaagcgagccacatgcgaaggtactgctaatgacggtgcggggctcgcaaatggatccacagccgcagataaagcaagtgccgtcgccgttgaagtctggagcaccgaaactccggcaacagggagcgcaacacaatttagttgtgtgacaccagcatctcaagaggtcactatctccaatgcagccaacgcggttgtttattatccgatgagtgctcgactggtcgtcgaaaaaaataaaaccgtaagcaatgtcactgcgggtaaattttctgcacctgccacatttacagtaacctataactaa

SEQ ID NO: 485693 - DNA, 597 bp, Shigella sonnei
atgcatcccactcaacgtaagctgatgaagagaataattctgtttctgtcactacagtttcccattacctatccagccatcgctgggcaggatattgaccttgttgccaatgtaaaaaacagcacttgcaaaagcggaatcagtaaccagggtaatattgatcttggcgtcgttggggtgggatatttttcagataatgttactcctgaaagctatcaaccaggtggaaaagagttcactgtcacagtatcagactgtgcattacagggaactggcgatgtgcttaatcagttacatattgattttagagcccttagcggtgtcatggctgcaggttcaaggcaaatatttgccaatgaagtcgcaaccggggctaaaaatgtcggtgtcgttctcttttccattcaggacccgaccaatatattcaatgttattagttcagcaggaaattctcgttccgtgtatccagtaatgacttctgccctgcataattcttcatggaaattttatgccagaatgcaaaaaatcgatcccgcgctggatgtcatatctggccaagtaatgagtcatatattagttgatgtgtactacgaataa

SEQ ID NO: 485694 - DNA, 249 bp, Shigella sonnei
atgaagaaattcttcagacatttttttttaattctgtgcttgagttgttataccgcgagtgctggcactgatgataacgtaggatatattgttgggaatagttacggcgttggtccgtcagatcaaaaatggagagaaacggggccgaatggcgatgctactgtcatattcagatatgcaacaagtacaaataatttagttttctacaaaccgacgcagcttggacctacaggtgtaaaattacagtag

SEQ ID NO: 485695 - DNA, 483 bp, Shigella sonnei
atgcgtattgaaaatgcaatggttgactcaggtaaaatgtatggctcccataaattatttaatacatcagttcctggtttgtattacacattattaatttcaaacatgtggtcagcttatggtaccgtaactaacgttagttcacctgggatatacattggtgactctgcagaacaatatttttcgtggtataatccaagcgaagacgtgttatattggagttgcaataatgcgaatagcacccgtaaatactgggctgtaggtggtatttatcagacccttacaattgaattctatacagatacaaactttgatccaacagtaactcaacagatcaaattatccagctcatcaaattatctgtattcatttaaagcctatggcgcaggccaaggttggatttgcccctatatttccagacatctgttatcacttaacccattacaagcccgctgccgcagatattcccgtggcgagcgataa

SEQ ID NO: 485696 - DNA, 291 bp, Shigella sonnei; identical to SEQ ID NO: 467055

SEQ ID NO: 485697 - DNA, 450 bp, Shigella sonnei
atgaaggaactgggtatcagctcacttatcaggcgcaagaagtaccgtacctatcgtggagaacaggggcgaacttgtaataatttactgaagagacaattttatgctgaccgcccaaatcaaaagtgggtaacagatgtcacagagtttaaggtcgatggcaggaagctctatttatcaccaatcatggacctgtataatggagaaatagtctcatataaccttactgagcgcccattagcatcaatggtaaagagcatgctattagatgcggtagaacaactcaataaagacgataagcccttgttgcatagtgatcaggggtggcaatatcagatgcctcgttggcaacgttggttgagtgataatggcataacacaaagcatgtcccgacgtggtaactgcttagataatgcagcaatggaaagcttttttagtactttaaaataa

SEQ ID NO: 485698 - DNA, 327 bp, Shigella sonnei
atgactaaaaatactcgtttttcccccgaagtccgtcaacgggcagtccgtatggttctggaaagtcagggcgaatatgactcacaatgggcggtaatttgttccattactccaaagattggctgtacaccggagactctgcgtgtctgggttcgccagcatgagcgggataccaggggcggtgatggagggctcaccaccgctgaacgtcagcgtctgaaagagctggagcgtgagaatcgtgaactgcgctgcagtaacgatatccttcgccaggcttccgcttattttgcgaaggcggagttcgaccgcctctggaaaaaataa

SEQ ID NO: 485699 - DNA, 150 bp, Shigella sonnei
atgccactgctggataagctgcgtgggcagtacggggtcggaccggtatgcagtgaactgcatattgccccgtcaacgtattaccactgtcagcaacaggacatcatcctgataaacgcagtgcccgtgcgcagcacgatgactggctga

SEQ ID NO: 485700 - DNA, 954 bp, Shigella sonnei
atgaagcatgaattatcaagtatgaaggcatttgtcatactggcagagtccagttcgtttaacaatgccgctaaattactcaatattacgcaacctgcattaacgcgaagaataaaaaagatggaggaagatttacatattcaactatttgagcgtacaactcgcaaggttacgttaacaaaagcaggaaaaaggttgctcccggaggcgcgggaattaataaagaaattcgatgaaacgctttttaatattcgtgatatgaatgcttatcatcgtggtatggtgacgttagcgtgtattccgaccgcagtattttattttttaccgctggcaatcggtaaatttaatgagctgtatcccaatattaaagtgcggattctggaacaaggcacgaataattgcatggaatcggtgctgtgtaacgaatcagactttggcataaacatgaacaacgtcacaaattcatccattgattttaccccactggtcaacgagccgttcgtgctggcctgtcggcgtgaccatccattggccaaaaagcagcttgtagaatggcaggagttagtgggttacaaaatgattggcgtacgctcctccagcggcaaccgactgttgatagaacaacagctggccgacaagccctggaagctggactggttttacgaagtgcgtcatctttcgacgtcattaggactggtagaggcgggactggggatttcggcgcttcctggtctggcaatgccccatgcgccctattcttcgattattggtattccactggtggaacccgttatacgtcggacattggggattattcgccgcaaagatgccgtgctttctccggcagcagaacgcttttttgccttgctgattaatttgtggactgacgataaagacaatttgtggaccaatatcgtcgaacgccagagacatgcgttacaggagataggttaa

SEQ ID NO: 485701 - DNA, 996 bp, Shigella sonnei
atgaagcaaacagtttatatcgccagccctgagagccagcaaattcacgtctggaacctgaatcatgaaggcgcactgacgctgacacaggttgtcgatgtgccggggcaggtgcagccgatggtggtcagcccggacaaacgttatctctatgttggtgttcgccctgagtttcgcgtcctggcgtatcgtattgccccggacgatggcgcactgacctttgccgcagagtctgcgctgccgggtagtccgacgcatatttccaccgatcaccaggggcagtttgtctttgtaggttcttacaatgcgggtaacgtgagcgtaacgcgtctggaagatggcctgccagtgggcgtcgtcgatgtggtcgaggggctggacggttgccattccgccaatatctcaccggacaaccgtacgctgtgggttccggcattaaagcaggatcgcatttgcctgtttacggtcagcgatgatggtcatctggtggcgcaggaccctgcggaagtgactaccgttgaaggggccggcccgcgtcatatggtattccatccaaacgaacaatatgcgtattgcgtcaatgagttaaacagctcagtggatgtctgggaactgaaagatccacacggcaatattgaatgtgtccagacgctggatatgatgccggaaaacttctccgacacctgttgggcggctgatattcatatcaccccggatggtcgtcatttatacgcctgcgaccgtaccgccagtctgattaccgttttcagcgtttcggaagatggcagcgtgttgagtaaagaaggcttccagccaacggaaacccagccgcgcggcttcaatgttgatcacagcggcaagtatctgattgtcgccgggcaaaaatctcaccacatctcggtatacgaaattgttggcgagcaggggctactgcatgaaaaaggccgctatgcggtcgggcagggaccaatgtgggtggtggttaacgcacactaa

SEQ ID NO: 485702 - DNA, 132 bp, Shigella sonnei; identical to SEQ ID NO: 477668

SEQ ID NO: 485703 - DNA, 1038 bp, Shigella sonnei
atggactccacgctcatctccactcgtcccgatgaagggacgctttcgttaagtcgcgcccgacgagctgcgttaggcagcttcgctggtgccgtcgtcgactggtatgattttttactctatggcatcaccgccgcactggtgtttaatcgcgagtttttcccgcaagtaagcccggcgatgggaacgctcgccgcatttgctacctttggcgtcggattccttttccgtccgctcggcggtgtcattttcggtcactttggcgaccgactgggacgtaagcgcatgttaatgctgaccgtctggatgatgggcatcgcgacagccttgattggtattcttccttcattctcgaccattgggtggtgggcacctattttactggtgacactgcgtgtcattcagggatttgccgtcggcggcgaatggggaggcgcggcgttgctttccgttgaaagtgcaccgaaaaataaaaaagccttttacagtagcggtgtacaagttggctacggtgtaggtttactgctttcaaccggactggtttcattgatcagtatgatgacgactgacgaacagtttttaagctggggctggcgcattcctttcctgtttagcatcgtactggtactgggagcattgtgggtgcgcaatggcatggaggagtccgcggaatttgaacaacagcaacattatcaagctgccgcgaaaaaacgcatcccggttatcgaagcgctgttacgacatcccggtgctttcctgaagattattgcgctacgactgtgcgaattgctgacgatgtacatcgttactgcctttgcacttaattattcaacccagaatatggggctaccgcgcgaacttttccttaatattggtttgctggtaggtggattaagctgcctgacaattccctgttttgcctggcttgccgatcgttttggtcgccgtagggtttatatcacaggtgcgttaatcggaacgttgagcgcatttcctttctttatggcgcttggtgatgctgccaacttactgatttag

SEQ ID NO: 485704 - DNA, 1053 bp, Shigella sonnei
atgtttttagcatcattgttgagacgtattgcatttagttactacgattataaagcttataatttcaatattgaaaaaacagactttgttgtcatccatattcccgatcagattggcgatgctatggccatctttcctgttattcgggcgcttgaattgcataaaattaagcatcttttaattgtaacgtcgacaattaatttagaagtctttaatgcgcttaaacttgaacagactaaattaacattagtcacaatgactatgcaggatcacgcaacattaaaagaaataaaagatttagcaaagaacataacacagcaatacggtacgccggatctttgtattgaggggatgcgtaaaaagaacctgaaaacgatgttatttatcagtcagttgaaagcaaaaacgaattttcaggttgttggtataaccatgaattgctactcccctttgtgcaagaacgcgtcccgtatggatcagaaactccgggctcccgtacctatgacatgggcatttatgatgcgtgaggcgggttttccagcagtcaggccaatatatgaattgccactaagtgaggatgtactcgatgaggtgcgcgaggaaatgcgatcgttaggatcttacattgcgttcaatttagaaggtagctcgcaggaacgtacattttcattatcgattgcagaaaatctaatagcaaaaattcaaagtgaaacagatataccaatagtgatcgttcatggacccaaaggtgaagataaagccagggcattagtggattgttataataatgtctaccgtttatccttaccaccctcgattaaacgttcagcagcaatcataaaagatgcttatatcgcaataactcctgacacctcaatattacatatggcaagtgcctataatacccctgttgttgcaatttatgctgattacaaaacgcgatggcccgcaatggccgatgtctcggagtcagtcgtcgttgggcaaaaaattgacaatataagtctggatgaattcgcaaaggcattaaaaagtgttttggcgagaatatga

SEQ ID NO: 485705 - DNA, 126 bp, Shigella sonnei
atgggctggcaaaagtgtagcggtattaagcgcagctatttaggcggagatttggcgcagtggagtagcaacgcgcaggatcgctggcatcttggcgtgatggcaggctacgccaatcagcattag

SEQ ID NO: 485706 - DNA, 267 bp, Shigella sonnei
atgatgagctttcagaagatctatagcccaacgcaattggcgaatgcaatgaaactggttcgccagcaaaatggctggacgcagagcgagctggcgaaaaaaattggcattaagcaggcgacgatttccaatttcgaaaacaaccctgacaataccacgctgacgaccttttttaagattttacagtcgcttgaactctcaatgacgctatgcgacgcgaaaaatgcctcgccagaagcaacagaacagcaagatctggagtggtaa

SEQ ID NO: 485707 - DNA, 1143 bp, Shigella sonnei
atgcctaaacttgtcacttggatgaacaaccagcgggtaggcgagttaacgaagttagccaacggcgcgcacacctttaagtatgcaccggagtggttagccagccgttatgccagaccgttgtcactttcgctgccattgcagagggggaatatcacctctgatgccgtatttaacttcttcgataacctgttacccgatagcccgattgtacgtgaccggatcgttaaacgttatcatgccaaatccagacaaccgtttgatttgttgtcagaaatagggcgagacagcgttggtgccgtgacgttaatacccgaagacgaaaccgtaacgcgtccgataatggcatgggaaaagcttactgaagccagacttgaagaagtattaacggcttataaagcagatatcccgctaggcatgattagagaagaaaatgactttcgcatctcggttgctggcgcacaggagaagacagcactgctcagaataggcaatgactggtgcattccgaaaggaataacgccgacgacgcacatcattaaattaccgattggcgaaatcaggcagcccaatgcgacgctcgatctcagccaaagcgttgataatgagtattactgtctgctgctggcgaaagaacttgggttgaatgttccggacgcagaaatcattaaagcgggaagggtgcgcgcgttagcggtcgaacgttttgacaggcgttggaatactgagcgaacggttttacttcgcttgccacaggaggatatgtgtcagacattcggtttaccttcatcggtgaaatatgaatcagatggaggcccaggcatcgcgcggatcatggcgtttttgatggggtccagcgaggcgctgaaagatcgctatgattttatgaagtttcaagtgttccagtggttgattggcgcaacggatggccatgcaaaaaacttctccgtatttattcaggctggcggcagttatcgactcacgccattttacgacatcatttcagcatttccggtccttggcggtacgggaataacatcagcgatctcaaactggcaatggggcttaacgcatccaaaggcaaaaaaacggcaatcgataaaatttatccgcgacattttttggcgacagcaaaggtgctga

SEQ ID NO: 485708 - DNA, 144 bp, Shigella sonnei
atgcaaactacgcgtaccccctactctatttcctttatggcgacagtgttacttttattgctctttgcttgccatagcaccgttgccaacgcagctgtcgcactggaatacgctgcgggtgatgctgccaacttactgatttag

SEQ ID NO: 485709 - DNA, 567 bp, Shigella sonnei
atgctgccagagcagtgcttccgtctgcgggtgatgcaccgtctgacgctcaccggtcagccggcctttctcatcatacccgtaatgcaccgtcacccggtgcccttcgctgagatggctgatgtctgtcagccagccgcgttcgtcatactgccaccgctctgcggtttcgccattcacggtgcggtgcgtgaggcggtctgcttcgtcatagtgccagtgggtgaccagcccctcatcctcgctgcggataagtttgccggtcaggtcgtggtgataacgctgtgtgcggccgtcaaagccggtttcctgtatcagcaggtcgagtacatcgtaacggaaggtggtgtggctgccgttttcactggtcaggcggatgacccgtccggcagcatcgtattccatactgcgcgtcagaccgccctgcgtggtacagatagcttttccccacgcatcgtactgtgtcccgtttctgctgccgtccggggcaatgacggtggtcaggtcaccggcggcgttgtattcataccgcgtttcatggccctgcgtgtctttcacggcaattaa

SEQ ID NO: 485710 - DNA, 378 bp, Shigella sonnei
atggtaccgatgggtgcgctcatcatccgtgcggataaccccttccgggatgaggtcggttttctctgtcagtctgccgtgatggtcataccggtaaagatagtgcgcgtcacgggcgatacggttatccggccacatgctgagggtgctgtccgggtgcagctccgggtcgggcaggcggttccccgccgggtctgtggcatacgggatgcggatatccagattcgctgcggtggtgtgaacgccggtcagcctgccggtggtgctgtagctgtaactccgggtctggcgcgggctgctgatgcggatgagttcgccgttgtcgttccaggtgtaatcgcggtcagacagcaggctgttcaggtgctggctctgtaa

SEQ ID NO: 485711 - DNA, 1419 bp, Shigella sonnei
atgactacccatctggtctggtttcgccaagatttacgtctgcacgataatctcgcactggctgccgcctgccgcaattcgtctgcacgcgtgctggcgttgtatatcgctacaccacgccagtgggcgacgcataacatgtcgccgcgtcaggctgaacttatcaatgctcaactgaatgggctacaaatagcgcttgcggaaaaaggtattcctttattgttccgtgaagtggatgactttgtcgccagtgtcgaaatagttaaacaggtgtgcgcggaaaacagcgttacccacctgttttataactatcagtatgaagtgaatgagcgggcgcgggatgtggaagttgaaagagcgctgcgtaacgtggtgtgtgaaggatttgatgacagcgtgatcctgccgcctggcgcggtgatgaccggtaatcacgagatgtacaaagtctttacgccttttaagaatgcctggctgaaacggctgcgggaagggatgccggagtgcgtcgctgcgccaaaagttcgtagtagcggatcgatagagccctcgccatccattacgctgaattatcctcgtcagtctttcgatactgcgcattttccggtggaagaaaaagcggcgattgcgcaattacgccagttttgccagaacggtgccggagaatatgagcaacaacgagattttccggcagtggaaggcaccagccgtttgtcggccagcctggcaacgggcgggttatcgcctcgccagtgcttgcatcgcttgttggctgaacagccgcaggcgctggacggtggggtcggtagtgtctggcttaatgagctgatctggcgcgagttttaccgtcacctgataacgtatcacccctcgttgtgtaaacatcgtccaattattgcctggacggatcgtgtacagtggcagagcaatcccgcacatttacaggcctggcaggaaggcaaaacgggatacccgattgttgatgccgctatgcgtcagcttaacagcactggctggatgcataacaggctacggatgattacagccagttttctggtgaaagatttattgatcgactggcgcgaaggcgagcgatatttcatgtcgcagctgattgatggtgatttggcagccaataacggtggctggcagtgggccgcttcaaccggaaccgatgcagcgccgtattttcgtattttcaacccgacaacccagggcgagaaatttgatctcgaaggtgagtttatccgccagtggctaccggaactacgcaatgtaccggggaaatcggtgcatgagccgtggaagtgggcgcagaaagcaggtgtgaagctggattatccgcaaccgatagtcgagcacaaagaggcgagagtacaaacgttggcagcgtatgaggcggcgcggaaggggaaataa

SEQ ID NO: 485712 - DNA, 510 bp, Shigella sonnei
atgaatctacaacgatttgatgacagcaccctaatccgtatctttgcccttcatgagttacatcgactgaaagaacatggcttaacgcgcggggcgcttctcgattatcacagccgctataaactcgtctttctggcgcattctcagccggagtaccgcaaacttggcccgttcgtggctgatattcaccagtggcaaaatctggatgactattacaaccagtaccgccaacgcgtagttgttttgctttctcaccccgccaacccgcgcgatcacaccaatgttttgatgcacgttcagggttattttcgcccgcatattgattccacagaacgccagcagctggctgcgcttatcgacagttatcgccgtggcgagcaaccacttcttgcgccgctgatgcgtatcaaacactatatggcgctttatcatgacgcctggctttcagggcagcgttatttcgaactttggccgcgtgtgattaacttgcgccattcaggagttttatga

SEQ ID NO: 485713 - DNA, 2214 bp, Shigella sonnei
gtgcaggatcaagactctgtcatcacggtacgcagactctataatgggtatttcggtaatggcacagtcaatatttccaataatggtctgattaataacaaagaatattcattggtgggcgttcaggacggttcccacggtgtcgtcaacgtgaccgataaagggcattggagtttcctcggaacaggcgaagctttccgctatatctatatcggtgatgctggtgacggtgaacttaatgtctcgcgtgaaggtaaagtagattcgggaattatcactgcggggatgaaagaaacaggcacaggcaacattactgttaaggataagaactccgttatcactaatctcggaactaatcttggttatgacggccacggcgaaatgaatatcagtaatgaggggcttgttgtcagcaacggaggaagctcactcggttatggagaaaacggcgtcgggaatgtcagcatcaccacgggggggatgtgggaggtcaataagaatgtctataccaccattggtgttgcgggcgtcggaaacctcaatattagcgatggcggtaagtttgtatcgcaaaatattacttttttgggcgataaagcaagcggtatcggcacactgaacctgatggatgcgacatcatcgttcgatactgtgggtatcaatgtcggtaattttggtagcggtatcgtaaatgtcagtaatggtgccacccttaattcaacgggctatggatttatcggaggaaatgcctccggtaaggggatagttaatatttcaacggacagtctctggaatttaaagacatcatctactaacgcacaattgctacaggtcggtgtattaggcacgggtgaactgaatattaccaccggaggtatagttaaagcgcgtgatacacagatagctctcaatgacaaaagtaagggcgacgtgagggtggatgggcagaactctcttcttgaaacattcaatatgtacgtagggacatctggtacgggtacgttaaccctgacgaatagcggcacgctgaatgtcgaaggtggagaagtttacttaggtgtttttgaacctgctgtaggaacgctaaacattggtgcagctcacggtgaggcggcggcagatgccgggtatataaccaacgcgacgaaagtagagtttggttctggcgaaggtgtttttgtctttaatcatactaataacagtgatgccggctaccaggtcgatatgctgattacaggtgacgataaagacggaaaagtgatccatgatgcaggccatacggtgttcaatgcagggaatacttatagcggtaaaacgctggtcaatgacggcctcctgaccattgcgtctcatacggcagatggggtaacgggcatgggttcgagtgaagtcaccattgcaagccccggtacgctcgacattctcgcatcaacgaacagtgcaggagattacacgctgaccaatgcgctcaaaggcgatggcttgatgcgagtgcagctgtcatcctacgacaagatgtttggctttacccatgcaacagggactgaattcgccggtgttgcccaactgaaagacagaaccttcactctggaacgcgacaacaccgctgcgcttactcacgcgatgttgcagtctgacagtgaaaataccacatcggtaaacgtgggagagcaatccattggtggactggccatgaatggcggtacgctcattttcgatacggatattcctgctgcgacgcttgcagagggatatatcagcgtcgatacgctggttgtcggcgcgggtgactacacctggaaaggccgtaactatcaggtaaacgggacgggcgacgtgcttatcgacgtgcctaaaccgtggaatgatcccatagcgaataaccctctgacgacgctcaatttgctggaacacgatgatagccatgtcggcgttcaactggtgaaggcgcaaacggttattgggtcgggtggctcattaacgttacgtgatttacagggcgacgaggtggaagcggacaaaacgttacacattgcgcaaaacggaacggtggtcgccgagggtgattatggattccgcctcacgaccgcaccaggtgatggtttgtacgttaactatgggctgaaagcgctgaacatccatggtgggcaaaagctgacgttagccgaacatggcggagcctatggcgcaacggccgatatgtcggcaaaatag

SEQ ID NO: 485714 - DNA, 555 bp, Shigella sonnei
atgatttacccaacgaatacaggaaaaagcggagaacaccttcgtctcaccacgctggaaagtgtctggattcagggaaaactacgtatgtgggggcgctggtcgtatattggtggcggtaagacggggaatatgtttaacctgatgttgacctctaaaaagctgacaaaaacggcaattaacgaggcgctccggaggatgaaaaaagcaggtctgaacaagtctgaacttgaggcttttttgcgggatatgattaacggtaagcaaaagagctggctggcgcattgtactgatgcagaggcgttatgtattgatcgggtcataagtgaggtgctggcagagcatccaggattgattagcgtccttcggcaacggtatgaggggcgggggatgaccaaacgcaaaatggctgaactgctgaatgatgcacacccgaaatggagtttaagaacctgtgaaagacgcattgagcattggctaaaggtggcagaatttattttgtacaaaccaatggttatggcttttggtatagagaaaaaagttattgctttttga

SEQ ID NO: 485715 - DNA, 291 bp, Shigella sonnei
atggtggatttacgtaaagcggcgcgggggcagatgtgcaccgtcagaattcctggctactgcaatcacgatccggaaacgtctgtgctggcgcattaccgactggcgggaacgtgcggaacagcgataaagccacacgatatgcaggcagcgattgcctgtagctcgtgccacgatttaatcgacgggcgggtaaaaaccagcgattacaccaaagaagaattacgcctgatgcatgcagaaggtgtttttcgcacacaagaaatctggagaaaggagggatatttatga

SEQ ID NO: 485716 - DNA, 600 bp, Shigella sonnei
atggcgcatatacaactgatcaaacaaacctcttccggattacttctcccggcgacgccggagagttgcgattttctgcatcaaatcaaaacaggtgagtggatacacgcagactttaagcgtgtgcgtaactacgcattccacaagcgttttttcaaactcctgcaactgggattcgattactggactccggtcggtggggcgatcacgcctcgcgaacgagaactgctgtctggtttcgttgattacctgtgcgaatcagtaggtcgggaacatacgccagctctgagcgaagccgcagagcaatatctgaatacagttgcgacacgcagaacccgggatacggcattgctaaagtcgtttgaggcttttcgcgagtgggtaaccattcaggctggattttacaccgaacatttttatccggacggtagccgcgggcgtcgggcaaaatccatcgcttttgcgaatatggacgaaaccgagtttcagcaggtttataaatctgttctgaatgtgctgtggaactggattctgttccgtaaattttcctctccggaacaagtcgaaaatgtggccgcgcagctgctggagtttgcgtaa

SEQ ID NO: 485717 - DNA, 213 bp, Shigella sonnei
gtggaaaaaataaagaaactatttagtagtaaatacgcagtcatacgtcgtgatgacctgtcagttatagtcgaaatggattacttccctgaaaccaaaaaatcaatgatgtatcgtaatggtcgaaaggcaatttttttaccgatgagggtaagtgacattatgggaaatgataaactgctggatgaattgcgagtcagagcatcctgttag

SEQ ID NO: 485718 - DNA, 570 bp, Shigella sonnei
atgcagccggtactccgtccgccgccccgccgcatccgtctgcgccttcagcctccccgcctcatcatactcgctgcgggtgatgctcccgtcggcatgctccttcttcaccacccgcttcaggccaccctcgccttccgtgtacagcacctcccgccggttcaggctgtccgtgatgattacccggctctctccgtactcaaagcggtagtccagcccctccgggttgacctgctccgtcacccgaccggtatcatcataccggtagcggctctccggcctccccgcataatggtgcgccaccatccgcccggcgtgctccgcatcataagtaaacccgcgaacctgcgtcccgctgcggtcatacaccgcccgcagttcaccaccggccgtgtacgtgtagcgcgccagcggcgcagtcggctgttcatccgggtatgccgggtcgtgtgtcagccataccgcctccagccggataccgttatcggcaccgtactctgtaccggcgggcagcgtgtcggggaaaacctgagaagaggaaacagaacggggactggccggggaagataa

SEQ ID NO: 485719 - DNA, 1191 bp, Shigella sonnei
gtggtggcaagtgaactgcacggcgagcagccgcaggcggtgccgggacgcagtggttcaggaaccacgctgaataaccactttgcggtaataccggcagaccggacatggcggccacagccgttgctgaaaccgctggtggatggcccgcagagcgccgtcgtgacgggaccggcaggcgaggaaatcttctgtgatgaacatggccgcgtgcgggtgaaatttaactgggaccgctataacccgtcaaaccaggacagttcatgctggatccgtgtggcacaggcgtgggcaggcaccggattcggtaaccttgcgataccgcgcgtgggtcaggaggtcattgtggacttcctcaacggcgatccggaccagccgattattatggggcgtacctaccaccaggaaaaccgcacacccggtagcctgccggggacgaagacgcagatgaccattcgttcgaaaacctataagggcagcgggtttaatgaactgaagtttgacgatgcgacagggaaagaacaggtctacatccacgtgcagaagaacatgaacaccgaggtgctgaataaccgcaccacggatgtgataaacaaccatgccgaaaaaataggtaacaaccaggcgatcaccgttaccaataaccagatccagaacattggcgttaatcagatacagacggttggtgtcaaccaggtggaaacggtgggcagtaaccagattatcaaagtgggatcaaaccaggttgaaaaggtggggatcattcgtgcgctgacggtgggtgtggcttaccagacgacggtaggcggcattatgaatacctcggtggcgttgttgcagtcctcacaggtagggctgcataaatcactgatggtgggaatgggctacagcgtcaatgtagggaataacgtcaccttctcggtgggcaagacgatgaaggaaaacaccggacaaacagcagtttattctgccggtgagcatcttgaactctgctgtggtaaggcaaggctggtgctgacgaaggacggaagcatatttctcaacggtacgcacattcatctggaaggggagtcggatgtgaacggtgatgcgccagtgattaactggaactgtggtgccacacaacctgtaccggatgcgcctgtgccgaaagatttaccccccggaatgccggatatgcggcaattttga

SEQ ID NO: 485720 - DNA, 483 bp, Shigella sonnei
ttggagtcattaccgacaacgtttagagaaaatattgcacaaacctggcaacagcctgaacattatgatttatatattcctgccatcacctggcatgcacgtttcgcttacgacaaagaaaaaaccgatcgctataacgagcgaccgtggggtggcggttttggtcagtcgcgatgggatgaaaaaggaaactggcatggcctgtatgccatggcatttaaggactcgtggaacaaatgggaaccgattgccggatacggatgggaaagtacctggcgaccgctggcggatgaaaattttcatttaggtctgggattcaccgctggcgtaacggcacgcgataactggaattacatccctctcccggttctactgccattggcctccgtgggttatggcccagtgacttttcagatgacctacattccgggtacctacaacaatggcaatgtgtactttgcctggatgcgctttcagttttga

SEQ ID NO: 485721 - DNA, 210 bp, Shigella sonnei
atgtctaagattaaaggtaacgttaagtggtttaatgagtccaaaggattcggtttcattactccggaagacggcagcaaagacgtgttcgtacacttctctgcaatacagactaatggttttaaaactcttgctgaaggtcagcgcgtagagttcgaaatcactaacggtgccaaaggcccttctgctgcaaacgtaatcgctctgtaa

SEQ ID NO: 485722 - DNA, 384 bp, Shigella sonnei
gtgttacaacttcttttagcagtttttattggcggtggtacgggaagcgtggcgagatggctgttaagtatgcgatttaacccgctgcatcaggcgattccgttggggacgctggcagcaaacctgattggggcattcatcataggaatgggattcgcctggttcagcaggatgacgaacattgatccagtgtggaaagtattaatcaccaccggattttgtggcggtctaacaaccttctcaacattttcggcagaagtggtgtttttgttacaagagggccgctttggctgggcgttactgaacgttttcgtcaaccttctggggtcttttgccatgaccgcactggctttctggctgttttcggcctcaaccgcacactaa

SEQ ID NO: 485723 - DNA, 789 bp, Shigella sonnei
atgctggttgccgcaggacagtttgctgttacatctgtgtgggaaaagaacgctgagatttgtgcctcgttgatggcgcaggcggcggaaaacgacgtatcgctgttcgtcctgccggaagcattgctggcgcgcgatgatcatgatgcagatctatcggttaaatcagcacagctgctggaaggcgaattcctcggacgtttacggcgagaaagtaaacgtaacatgatgacgacaattctgacgattcatgttccttcaacgccggggcgcgcatggaatatgctggtggcgctacaggcaggaaacatcgtcgcccgttatgccaaattgcatctctatgatgcatttgccattcaggaatcacgccgtgttgatgctggtaatgaaatcgctccgttactcgaggtggaggggatgaaggtcggtctgatgacctgttatgacttacgctttccagagctggcgctggcacaggcattacagggagctgaaatcctggtacttcctgccgcctgggttcgcgggccgctcaaagagcatcactggtcaacgttgcttgccgctcgtgcgctggataccacctgttatatggtggcggcgggggagtgcgggaacaaaaatatcgggcaaagccggattatagatccctttggcgtcaccattgcggcagcgtcagaaatgcctgcactcattatggcggaagtgacgcccgaacgtgtgcgtcaggtgcgcgcgcaactgcccgtcttaaacaaccgtcgctttgcgccgccgcaattattatga

SEQ ID NO: 485724 - DNA, 204 bp, Shigella sonnei
atgggggagattagtattaccaaactgctggtagttgcggcgctggtcgttctgctgtttgggactaagaagttacgtacgctgggcggagaccttggagcggccattaaagggttcaagaaggcgatgaatgatgacgatgctgcggcgaaaaaaggcgcagacgttgatcttcaggctgaaaagctctctcataaagagtga

SEQ ID NO: 485725 - DNA, 954 bp, Shigella sonnei
atggaaaaattccacatgtttgatgaccgtatttatcagatgactaatggcgttaaagctgccgaccgtattatttacactgtcatgttgaatgaacaaaagttttatcacgataaggggcaatattataccccttcatatgctcatcttggtcagcatgctggaatcacaagaacatccgtgattgcatgtatgaaacaacttgaggcacatggtttaatcaagaaaactaacgttgcaagcaatcagtgtgttattaaagtttattcacttgatgaagtaccggaggttttaacagagcttacagctaaggaagccagaaaggcaaagctggagtctaaagttactcagtcagtcaagaaagatgacccactgagtcaaaattctttacccactgagtcaaaattttttactcagtcagtcaaaatctttgacacgtataataacagtaataacaagaaagaacttattaataacaataaagaagatgactttgaagaagaatattttaagaagggagcttcgctctgtgattcacatgaatgtgattctcttggtattgaagaggctattaaagagactgttaaaacatctgacttagatgaccttgatagtgaagctgctaaagaggtcgttaaaaaggaagataaaatctctgatgtgattgctagtagtgaccataaaaacacacagtgccccgccactgatgatgaattaccggatgttgaccttgatgatgaagaagaccctgaagaggaattgaaacgtgaacagcgtaaagcagaaattaaagaaagattcagaaatgcgaagctaaagaacaaggttagtgacctcgatgactttgatgatagtgacgatgattttacttttacaccaaaaaagaaaactcacaccgagccaaagaaagaaaaagttaaagtcagacgtgtttatggtggaggaatgttttaa

SEQ ID NO: 485726 - DNA, 297 bp, Shigella sonnei
atgaaaacttataatggcgagagaaaataccgtgactatttactcagacgttacagcatttctcgtgaaggttacttgatgaaagatactcacggggaagtttaccggattcgaccgaagaaagaagggagggattattatttcgtcgatggtgtgacagatttaaagattgacgctttgaagtttgcggtgctgtatcattacgatttatgggattcagtccaccagctacgattaaaagacggtgaccccggtaatctgagggccaccaatattatcaagggaaagtgccggtaa

SEQ ID NO: 485727 - DNA, 312 bp, Shigella sonnei
atgaattacccaatgcaaattatggttgaccaagaaaccatgaattggttgattgacctgaacaggtcgggctttaatatctatttcatgcattgttttgaagcgtcaacgtatattgacaagcatataatcaacgaaattaaacttggtgactatgttcacaagctggaagtaacagacccatacaataagcgctttatcattgaagagtgcaatcgacttgatttaagccctgagcaattattgaatctcatcgttttagctcgttgggctttgcggtatttattgtgctattggtgttttgcgttatga

SEQ ID NO: 485728 - DNA, 216 bp, Shigella sonnei
atgaaaactatcacagtacaacttcagactaataaagcatttcgttattttgaaaacttgcttgagttatacgaaggatggggaagtatccacggcaaagatgatatctatcttcacttgtcagcccctaactattctctgaagactccggttaagcaaagctggttaaaagactacggtcaccagatggggctattagtctcagacttgagctaa

SEQ ID NO: 485729 - DNA, 222 bp, Shigella sonnei
atgtgttataggttccaatattccacacttggccgccacctaatcagacagaatttagcagatgctgaatttgaagatgtgaccctcaaagcaaacaaacgattaaaaccctctcaaatccaccagcttaaacacgaattaaagccactggtaatactcgactataacgaccctgaacagcttgagcagggaattaagcttatttctgaatggggtgcttga

SEQ ID NO: 485730 - DNA, 147 bp, Shigella sonnei
atgccggaactggaagaactggcggcagcaatggtgcaggcgcaggtcgatcgcaacgatgagatttatcgccgtcagcgtgaaatgaaagaggagctgagtggtctggaggatttgggaacaattagagcgtttgatgttacgtaa

SEQ ID NO: 485731 - DNA, 180 bp, Shigella sonnei
atgcacgtgcattttgcgtgtatatttttgtctttttctggtccgcttactgtctggtcagtgtccgtaagtgactgtttttatagtctctgtccggttgcagtcctgtcaaaagtggtggagctggcgggagttgaacccgcgtccgaaattcctacatcctcggtactacatgcttag

SEQ ID NO: 485732 - DNA, 126 bp, Shigella sonnei; identical to SEQ ID NO: 472995

SEQ ID NO: 485733 - DNA, 483 bp, Shigella sonnei
atgacgaagaaaaaagcacataaacctggttcagcgaccatcgcgcttaacaagcgcgcccgtcacgaatactttatcgaagaagagttcgaagcgggacttgccctgcaaggctgggaagttaaatccctgcgcgcaggaaaagccaatatcagcgacagctacgtccttctgcgtgacggagaggcatttctgtttggcgctaacatcacgccaatggccgtggcctccacgcatgtggtgtgcgatcctacccgtacccgcaagttacttctcaaccagcgcgaactggactcattgtacggtcgcgtcaatcgagaaggctataccgtagtggcgctctccctgtactggaaaaatgcctggtgcaaagtgaaaatcggcgtcgccaaaggtaaaaaacagcacgataaacgttcagatatcaaagaacgcgaatggcaggtggataaagcacgtatcatgaaaaacgcccaccgttaa

SEQ ID NO: 485734 - DNA, 477 bp, Shigella sonnei
atgatattatttgttggatttttgttgatggaaatagttatgcctcagattagccggaccgcactggtaccctacagcgcggagcaaatgtatcagttagtgaatgacgttcagtcttatcctcagtttttgccgggttgtaccggaagtcggattctggagtccactcctgggcagatgactgcggcggtagatgtctctaaggctgggatcagcaaaacgtttactacccgcaaccagttgaccagtaaccaaagtattcttatgaatctggtggatgggccgttcaagaaattgattggtggatggaagtttacgccgctgagccaggaggcgtgtcgtatcgagtttcatctcgactttgagtttaccaataagttgattgaactcgcctttggtcgcgtgtttaaagagctggcgtctaatatggtccaggcttttacggttcgtgcgaaagaggtttacagtgctaggtaa

SEQ ID NO: 485735 - DNA, 291 bp, Shigella sonnei
gtgctaggtaaaattgccgttgaggtggcttatgcgctacctgagaagcagtacctgcagcgcgtgacgctgcaggagggcgcgacggttgaagaagctattcgcgccagtggcttgctggaattgcgtaccgatatcgatttaactaaaaacaaagtcggcatttacagccgtccggcaaaactaagcgatagtgtgcatgatggcgatcgggtggagatttatcgccctctcattgccgatccgaaagagcttcgcaggcaacgagcagaaaaatcagcgaataaataa

SEQ ID NO: 485736 - DNA, 966 bp, Shigella sonnei
atgtcagaagataaattcctttcggactacagcccccgtgatgcagtttgggatacccagcgcacgcttaccgattctgtcgggggtatctaccagactgctgctgaattcgagcgctatgcactccgtatggcctcctgtagcggtttgttacgttttggttggtctaccatcatggaaaccggagaaacgcgcctacggcttcgtagtgcgcaattttgccgtgtccgtcattgccctgtctgccagtggagaagaaccctcatgtggcaagcccgtttttatcaggctctaccgaaaatcgttgtggattacccgtcttcccgatggttgtttctgacgttaactgtcaggaactgcgagataggtgaacttggaacagtccttacagcaatgaatgcggcgtttaagcgaatggaaaagcgaaaggagctatcacctgttcaggggtggatcagggctacggaggtgacgcgaggtaaggatggcagcgcacatccgcattttcactgtctgctgatggtgcaaccttcttggtttaaagggaagaactacgttaagcacgaacgttgggtagaactctggcgcgattgcttgcgggtgaactatgagccgaatatcgatattcgggcagtaaaaactaagacaggtgaggttgtggccaacgttgccgagcaactgcaaagcgcggttgctgaaacgctgaaatactccgttaaaccggaagatatggcaaacgatcctgagtggtttcttgagttgacgcggcagcttcacaagcgccgttttatctcgaccggtggggcgctaaaaaacgtcctccagttggatcgagaaaccaatgaggatcttgtcattgccgacgatgtaggggatggcactgatgacgggaagcggacggcgtttgtctgggattcaggtaaacggcgttacaaacgcgcccctgagaaggataaatcggattaa

SEQ ID NO: 485737 - DNA, 267 bp, Shigella sonnei; identical to SEQ ID NO: 7253

SEQ ID NO: 485738 - DNA, 366 bp, Shigella sonnei
atgatgtatgctgaaacccgcaatatgacaccatatggtaatgtgggtatcgcaaataaaacccagaactttgaagctgtagcacagtatcagttcgattttggtctgcgcccatctcttgcatatgtttattcaaaaggcaaagacctcggcggtaacgactataacaacaatggtcatcaagagtatgttgatcaggatctggtcaactatgttgaaattggagcgacctactatttcaataagaacttctcaacatatgttgactataaaataaacttgttggataaagatgacgatttctatgacaacaatggcatcgcaacagatgacgttgttggtgtgggcttagtctaccagttctaa

SEQ ID NO: 485739 - DNA, 852 bp, Shigella sonnei
atgactgttcaaacaagtaaaaatccgcaggtcgatattgctgaagataatgcattcttcccttcagaatattcgcttagccaatataccagtcccgtctctgatcttgatggcgtggactatccaaaaccgtatcgcggtaagcataaaattctggtgatcgccgcggacgaacgttatttgccaaccgataacggaaaactgttctcgaccggtaaccatccgattgaaacgttgctgccgttgtatcatctccatgctgctggtttcgaattcgaagtggcgaccatttccggtctgatgaccaagtttgaatactgggctatgccgcacaaagatgaaaaagtaatgccattctttgagcagcataaatcgttgttccgcaatccgaagaaactcgcggatgttgtcgccagcctcaacgctgatagcgaatatgcagcaatctttgttcctggtggtcatggcgcacttattggtttaccagaaagccaggacgtagctgctgctttgcagtgggcaatcaaaaatgaccgttttgttatctccctttgccacggcccggcggcttttctggcgcttcgccacggcgataacccactgaatggttattccatttgcgcattcccagacgccgcagacaaacaaacgccagagataggctatatgccgggtcatctcacctggtacttcggcgaagagctgaagaaaatgggcatgaacattattaatgacgacatcaccgggcgagtacataaggaccgtaaagttctcaccggcgacagtcctttcgcagcgaatgcgttgggtaaactggcggcgcaggaaatgctggcagcttatgcggattaa

SEQ ID NO: 485740 - DNA, 237 bp, Shigella sonnei; identical to SEQ ID NO: 461382

SEQ ID NO: 485741 - DNA, 789 bp, Shigella sonnei
atggcctatcgttccgcaccgctctatgaagatatcatctggcgaacgcatctccagccgcaggatgctgggcttgcacaagccgtacgtgcgacgatcgccaaacatcgtgaacatttgctcgagtttatccgcctggatgaacccgctccgcttaacgccatgacgctggcgcaatggtcatcaccgaatgcgctaagttctctactcgcggtctattccgatcatatctatcgcaaccaaccaacgatgatccgcgagaacaaaccgctgatctcactatgggcacaattgtatatcggcctgatggtgccaccattaatgctggcgctactgacgcaggaaaaggcattagatgtgtcgccggaacatttccatgctgagtttcacgaaaccggacgcgtcgcctgtttctgggtcgatgtgtgtgaagataaaaacgcaacaccacattcgccgcagcagcgaatggaaacgttaatcagccaggcgctggttccggttgtgcaggcactagaagcgaccggagagatcaacggcaaacttatctggagtaataccggttatttgatcaactggtatctcactgagatgaagcaactgctcggcgaggcgacggttgaatcgctgcgccatgccctcttttttgagaaaacgctcacgaacggtgaagataatccactctggcgtaccgtcgtgctgcgcgatggcctgctggtgcgccgaacctgctgccagcgttatcgcttaccggatgtgcagcaatgtggcgattgtacgctgaaatga

SEQ ID NO: 485742 - DNA, 678 bp, Shigella sonnei
atggaacacagccgaattaagaagagaaatgtcgcactcatagaaaaatgcgtcatgagcagtatcggtattgagagtttattcagaaagtttgcgggtaacccttataagctccatacctataccagtcaggagtcatttcaggatgccatgtcgcggatctcatttgcggcggtcattttttctttttctgccatgagaagtgagcgcagagagggattatcttgcctgactgaactggcgattaagtttccgcgtacccggcgtttagttattgcggatgatgatattgaagctcggctgattggttcattgtcgccatcaccgctggacggtgtattaagtaaagcgtcaacgctggagatttttcatcaggaactctttttgtcattaaatggtgtacgtcaggcgaccgaccgactgaacaatcagtggtacattaaccaaagccggacgctaagcccgacggagagagaaatattgcgctttatgtcgcgtggctactcaatgacacaaattgccgagcagcttaaacgcaatatcaaaacgatccgtgcacataaatttaatgtgatgtcgaaactgggcgtcagttctgatgcagggttgttggaggccgcagatattctgttatgtatgcggcattgcgaagcaagtaatgtgttgcatccctattaa

SEQ ID NO: 485743 - DNA, 330 bp, Shigella sonnei
gtgccgggagaaagcagcgccaccgttaaacaacgcgtaatggccgccagagagcgccaatttaagcggcagaataaactgaatgcctggctggatagtccggaaatacgccaattctgcaaacttgagagcgaagatgcgatgtggttggaaggaacactgatccatctggggttatcgattcgtgcctggcagcggttattgaaagttgcacgaaccattgctgatattgatcagtctgacattatcacacgtcagcatttgcaggaggcagttagctatcgtgcgattgaccgtttgctcatccatctgcaaaaactactgacataa

SEQ ID NO: 485744 - DNA, 339 bp, Shigella sonnei
atggcggaaagctttacgacgactaatcgatatttcgacaataaacattatccacgtggattctctcgtcatggtgatttcaccatcaaagaggcacaactgcttgagcgtcatggttatgccttcaatgagttggatcttggcaaacgcgagccggttaccgaggaagagaaactcttcgtagcagtatgccgtggcgaacgtgagccagtgacagaagcagaacgcgtgtggtccaagtatatgacgcgtattaagcgtccaaaacgttttcacaccctttccggcggtaaaccgcaggttgaaggtgctgaagactacaccgattctgatgattaa

SEQ ID NO: 485745 - DNA, 840 bp, Shigella sonnei
gtggatacggaattgttaaaaactttcctggaagttagccgaacgcgtcactttggtcgagcggctgaatcgctctatctgacccagtcagcagtgagctttcgaatcaggcaactggaaaatcaactgggtgtgaaccttttcacccgccacagaaacaatatccgtttaaccgctgccggtgaaaaactactgccttatgcagaaacgctcatgagcacctggcaggccgcccgcaaggaggtggcgcatacctcacgacataacgagttttctatcggtgccagcgcctcgttgtgggaatgtatgcttaatcagtggttgggacgcttgtatcaaaatcaggatgcccatacaggcttacagttcgaagcgcgaattgcccaacggcagtctctggtaaaacagctgcatgaacgccagcttgatcttcttattaccactgaagcgcccaaaatggacgaatttagtagtcagttgctggggtatttcactttagcgctttataccagtgccccttctaaactaaagggagatcttaactatctgcgactggagtgggggccagattttcaacagcatgaggcaggtttgatcggtgctgacgaagttcccattctgacaaccagttctgctgaactggcacagcaacagattgcgatgcttaatggttgcacctggctacccgttagctgggcgcgtaaaaaaggcggcctgcataccgttgtcgatagcacaacactttcacggccgctttatgccatatggctgcaaaatagcgataaaaatgcgttgattcgcgatcttttgaaaattaacgtgctggatgaagtgtattaa

SEQ ID NO: 485746 - DNA, 453 bp, Shigella sonnei
atgaaacttttaaaagtagcagcaattgcagcaatcgtattctccggtagcgctctggcaggtgttgttcctcagtacggcggcggtaaccacggtggtggcggtaataatagcggcccaaattctgagctgaacatttaccagtacggtggcggtaactctgcacttgttctgcaaactgatgcccgtaactctgacttgactattacccagcatggcggcggtaatggtgcagatgttggtcagggctcggatgacagctcaatcgatctgacccaacgtggcttcggtaacagcgctactcttgatcagtggaacggcaaaaattctgaaatgacggttaaacagttcggtggtggcaacggtgctgcagttgaccagactgcatctaactcctccgtcaacgtgactcaggttggctttggtaacaacgcgaccgctcatcagtactaa

SEQ ID NO: 485747 - DNA, 456 bp, Shigella sonnei
atgaaaaacaaattgttatttatgatgttaacaatactgggtgcgcctgggattgcagccgcagcaggttatgatttagctaattcagaatataacttcgcggtaaatgaattgagtaagtcttcatttaatcaggcagccataattggtcaagctgggactaataatagtactcagttacggcagggaggctcaaaacttttggcggttgttgcgcaagaaggtagtagcaaccgggcaaagattgaccagacaggagattataaccttgcatatattgatcaggcgggcagtgccaacgatgccagtatttcgcaaggtgcttatggtaatactgcgatgattatccagaaaggttctggtaataaagcaaatattacacagtatggtactcaaaaaacggcaattgtagtgcagagacagtcgcaaatggctattcgcgtgacacaacgttaa

SEQ ID NO: 485748 - DNA, 1536 bp, Shigella sonnei
atggaaacttgttttaagatccttcagctcaagttcgataagaagctgactaaccgttgtatcggactgacgttacacatcagcgcctcaaccgtttttgaggttcttgcccgcttcaaagcctcttctctgtcatggccattacctgcggatatatcccatgacacgctggagaaactcattttcccgcccaaagacacctctgcgtcagagcttgttatgcctgacatgctgtacttcgatacggaaatgagaaaacctggcgtgacgcgccaactgttgtggatggaatacaaggcacaggcgggtgacaaagcgatgggatactcacacttctgccgttgctaccggaagtggaaaaaaacgcgacgcctctccatgcgacaggagcatcgtgctggcgaaaagctctttatcgacttctgtggtcctacggtccctgttattaatccggacaccggagagatacgccgcgtggcaatcttcgtggctgtaatgggggcgtccaactatacctatgttgaagcgtgcgaaggtcaggacatgatgtcatggttaaatgcccacagccgttgcctgaccttcctgggcggcgtaccgaagctgctcatccccgataacctcagaagcgcagtgaaaaaagccgatcgctatgagcctgtcatcaacgacagttatcaggcgctggctgagcactatggcacggttattatcccggcccgcccgcgcaaacctaaagataaaccaaaagcagaaaacggcgtcctcatcgtcgagcgatggcttcttgcccgcatccgtaatgaaaccttccacacgctcagggcgctgaatgcacgccttcgggagttgctgacggacatgaataaccgaccaatgaagggatacggtaatcaaacccgcgcagaacgcttccgcatgctggatgcaccagcactctctccgctgcctctggagccttatgaatacacggaatacaaagccgtgaaggttggccctgactaccacgttgaatatgcccgtcactggtactccgttccacacgaactggtcggtcagcgtctgtcactgaaggtggggcagtcggtggtacagctctggcacaaggggcagtgtgtggcgcaacatccgcgcagcacacatgaatataaacacacaaccaatccgcttcacatgccagaacgccaccggcggcatgggacatggacaccggaacgccttatcgagcagggaaaccgtacaggtccgtccacaggccgggtggttgaatccatgctgaaagccaaaccccatccggagctggcttaccgtgcagtcctgggtctgctggcacttcagaaaaaatacggcccggaacggctggaaaaggcctgttacgttgccctgcactataacgccccggacagacgctttatcgacaatctgctgcgtcatcatcgggataacgttgagcttccgttatcccgccagggcgaacaacatccggcatatgcttcagagcatgaaaacctgcgtggtcctggctactatcactga

SEQ ID NO: 485749 - DNA, 345 bp, Shigella sonnei
atgctgaatcaggaaaccgcaaaggcagcacgaaccgattcaggttatatccttcgcgcaccgagacgaatgcgggttgctgatgccgttgctcagtatatgcgggtgcccatgggggcagggaactcagtcccgtgggatccgctggtggcaccgtatgttattgagccgatgaactgcctggcctcgcgtgaatacgacgcagtgatatttgttggcccggcacgaaccggcaagactatcggcctgattgacggctgggtgatttacaacgtgatttgcgatcctgctgatatgctgattattcagatgacggaggaaaaagtgtcagcgccagtgatataa

SEQ ID NO: 485750 - DNA, 495 bp, Shigella sonnei
atggatcgagagttaaaaaatctgacgctgaatatcagtcaactggcggcactgtcaggtgtacatcgccagactgctgcggcaaggctgcaaaatctacccgttgcaggggggcatgaaagcaacctcaagctttatcgggtggttgatattgtgtcggcatttctggcattaccaccgccggttgcagaaggcgaaatggacgcgcatgagcgcaaagcctggtatcagtctgaacgtgagcgtcttaagttcgaacaggaaacggcacaactcattccggccagtgatgtcagacgggagtttgccatctgggcaaaagcggtcgtgcaggtgctggagacattaccggatattcttgaacgtgactgcggtctgcagcctgccgctgtgagccgtgttcagtccattattgatgatctgcgcgatcagatagccctgcgggtgactgaagcaggtgcggatgatgaggaggaattacagcaggaggagtaa

SEQ ID NO: 485751 - DNA, 177 bp, Shigella sonnei
atgagggacaaacccgcgaaccataaacgcggtaaaaacccggtgtgcatcgtttttgattattcccgcacactcgcgcagaaggagttccccgtcgggctacggtcatggttaatacgggaatacgacgacgatacagcgcatgatgtgtcaggcttgaatacctttatccgttaa

SEQ ID NO: 485752 - DNA, 153 bp, Shigella sonnei; identical to SEQ ID NO: 38791

SEQ ID NO: 485753 - DNA, 207 bp, Shigella sonnei
atgcgaaagctgaaaatgatgctcttcggcgcaagcttgataatggtggtcgggtgctcgtcaaaggaaaatgccctgtgccatcctcagccgaaacctccagcgcctccggcatgggcaatgatgccaccgtcgaactctctccagttgctggacgaaacgttctcggtatccgggacggaattatccgcgaccaaacagcactga

SEQ ID NO: 485754 - DNA, 126 bp, Shigella sonnei
atggcttcaaactggataaagctcgaggttattacgccggataagccggaaatattcaggcttgctgagattctgaatattgatccagatgccgcattagggaaggttgaggtgtactggcaatag

SEQ ID NO: 485755 - DNA, 306 bp, Shigella sonnei
ttgtctctggtaccaggcaaggactggaacaatcagcagaatatctatcaccgttggttgaaaggtgaaacgaaagcgcaaagggaaaaaattcagaaactgatccctgcggttctggcaattcttccgcgtgagctgcgtcaccgactctgtatcttcgataccctggaacgccgtgcattactggcggcgcaggaagcgttgagtacggcaattgatgcgcatgatgatgctgtccaggccgtttaccggaaagcacatttcagcggtggtgggtcgcccggcgattctgtcgtagtgcattga

SEQ ID NO: 485756 - DNA, 228 bp, Shigella sonnei
atgttgaaaattgatgctatagcgttttttggcagcaaaacaaagcttgccaatgccgcaggagttaggctggcaagcattgctgcatggggggaactggttcctgaaggtcgcgcgatgcgcctgcaagaggcatctggcggggaacttcagtacgaccccaaagtttatgacgaatatcgtaaggcaaaacgaccttggaaggtgattcatgaaaatcaggcatga

SEQ ID NO: 485757 - DNA, 408 bp, Shigella sonnei; identical to SEQ ID NO: 461293

SEQ ID NO: 485758 - DNA, 156 bp, Shigella sonnei; identical to SEQ ID NO: 477766

SEQ ID NO: 485759 - DNA, 846 bp, Shigella sonnei
atgtcaattgactttaccccaggtataataaatacatatcacggcgatatttataactgcacaacaaataccgataatgctaaaacgccagacacaccgaagtggccttgcgataattgggaagaacaacaacccattaattccacattctctggagaaggatatatctctgatcaatatgatttagtgcaacaccaacttcaacaaattaatgcgtgccacacgaacactacatatacaaatgcagactactcaaaagttgtggctcaacttgtaagtcttattactaacattgaaacgataagttcgacacaacttacgcaacagacacaatcaatacttaatcagattaataacattagatatgaaaaaaacaaaagtgctgaatgtcgaatcattgttgtcgctaatcctaaacccgacaaggcaatcataactaaaattagcgtagaagagggaatacccataacattcagtgtccaaaccatgttttcagatactaattttattgctgaacaacgagctgacttaccaactaatataaaagatattcaaagcctgtatcaaaaaatgacgaagttatatattgagcacagtgaaaataaaaacaggatgaaagtctttgccggagccaactttattgatttcaatatgacaggacagaacctgtccgggttcgttctaaccttgtcaaggttttatttcgaagatctacttaatataaatttcactgacgcaaatttaggtgacactattttttacataaagaacaccctacccccaaattatataaagatggacaatatcttgacaaacaaatcgaaggtttattttcaacattattaa

SEQ ID NO: 485760 - DNA, 621 bp, Shigella sonnei
gtgccgcgccttcgcctgttcgccattctctgtttcgattctcaggagcggcgtgaagctccccggctggtataccgtctggatacgcgtctggtgggtctgtatcgtcgtcagcctgtcaccgtcccacccgtaccatgtcacctccggtttacgcgacagcgacatccaccccgtcaggtcacgctcccgccgccatacccgttttcccgtccggcggcccagcgggtcatagaggtaccggctctccacctgtggttcgccgtgctgtatccgcgtgtagaacaccaggcggtgctggctgtcgtagtgatagtggtgggtgcgctcgtcgtgcatccggataaccccttccgggatacggtccgtcttctccgccagcctgccgtattcatcgtagcgatagacatagtgcgcatcttccgcgatgcggttatccggccacgccgtgagggtgctgtccgggtgcagttccgggtccggcagccgatttcctgccgggtctgttgcatacgggatatcgatatccaggttcgctgccgtggtgtggacgcccgtcagcctccccgtgtcgctgtaacggtactcccggctctcctgcgggccactgatgcggattag

SEQ ID NO: 485761 - DNA, 729 bp, Shigella sonnei
atgagcaaaatatcagatttgaattattctcaacacattacattagccgacaattttaaacaaaaaagtgaagttttaaatacctggcgtgttggaatgaataattttgcccgtaatgccgaggggcaggataacacaagaaatatccttgatcctaagacatttttggaatttttggtaaaaatatttactctaggttatgtggattttagcaaacgctccaacgaagcgggaagaaatatgatggctcatattgagtcctcatcttatatcaaaaataatgatggcagtgagataatgaagtttgttatgaataatcctgaaggggaacgagcggatttatctaaggtggaaatagaaatcacactttccgctttcactactatggggactcgtcaaggacatacggctattatatttcaacaacctgatggttcgactaatcgttatgaaggaaagtcctttgaaagaaaagatgagagttcattacacctgattactaacaagattctggcatgttaccaacgcgaagctaacaaggaaatagctcgtctattaaatattccgcaggagttaaataattctcaggacttgaataactcgcaggtgagttgtaaagattcagttgattctacgattacggatttaggtaatgactccaacttattgatagtgttttatgttcagataatgcccgatgactttgtcatgcagctccaccgattttga

SEQ ID NO: 485762 - DNA, 300 bp, Shigella sonnei
atgaccgagccgcacgaagctcgccgtacggagtaccatgcccgctatctcgacattcagattgtgttaaaaggtcaggaaggcatgaccttcagcacgcaacctgcaggcacgccggataccgactggttagctgataaagacatcgcatttttgccggaaggcgttgatgagaaaacagttatccttaatgaaggtgattttgttgtgttttatccgggggaagtgcataaaccgctgtgcgcagtgggtgcaccagcccaggttcgcaaagcagtagtgaagatgctgatggcgtga

SEQ ID NO: 485763 - DNA, 504 bp, Shigella sonnei
atgccgggcaactgcacgcattatgggcgttggcctcaacacgattttacgtcacttaaaaaactcaggccgcagtcggtaacctcgcgcatacagccgggcagtgacgtcatcgtctgcgcggaaatggacgaacagtggggctatgtcggggctaaatcgcgccagcgctggctgttttacgcgtatgacagtctccggaagacggttgttgcgcacgtattcggtgaacgcactatggcgacgctggggcgtcttatgagcctgctgtcaccctttgacgtggtgatatggatgacggatggctggccgctgtatgaatcccgcctgaagggaaagctgcacgtaatcagcaagcgatatacgcagcgaattgagcggcataacctgaatctgaggcagcacctggcacggctgggacggaagtcgctgtcgttctcaaaatcggtggagctgcatgacaaagtcatcgggcattatctgaacataaaacactatcaataa

SEQ ID NO: 485764 - DNA, 450 bp, Shigella sonnei
atgatgaaatatttgatggttttattgtctctattttctggttcggtattggggatggggcgagtgaatgaattgtgtggaatagatagcgtgaaaacgatagagataattaatcttccatcgtatgttaccacgttagttccgcttagcaaggaaggtcttaatgaaatatacagatataaagtggtggtgaatgaaattagagatctttatgctggtaagataattgatttattgcaaatgaagtatttcagaaaagaaaaatataacaatataagatgggggggtagtatcatttcgaaaggtaataataaatgtgaaatttattttgatgcttttggtgaatgtggaagtgtgaatggcattaacgtgtgttttgaaaaaaatgaaatgataggttggattaaaaaagaaatccctttgctgtcgcaaaaaataggtgggctttaa

SEQ ID NO: 485765 - DNA, 894 bp, Shigella sonnei
gtgagtgcggagagtgaggcatggcttgcgcagtgcgggctgacggcggagcagatggccgcgcagctggaggcggaatacatcccggagaggaaacttcatctttaccactgcgaccaccggggactgccgctggcgctcatcagcccggaaggggaaacggcgtggcagggggagtatgacgaatggggaaacctgctgggcgaaaccagcgcgcagcacctccagcagtcactccgtctgccggggcagcagtatgatgaggagtcggggctgtactacaaccgcaaccggtactatgacccgttgcagggaaggtatatcacccaggatccgatagggctgagaggtgaatggaatctgtataaatatccattaaaccctgttcggtttatagattctttgggtttaaaattccatgttaacggtgatccaagtgattttaatcaggctgttgagtatttaaaacaagattcacaaatgaaagaaactatagattttttatcaagctctgaagaaactataaatatagagtatattgaaggaaccaatgttagatttaattcgaataatatgacgatatattggaatagtagagcatctttattttgttcaactgaattaaactcgaaatcacaatcgcctgcattaggtttgggacatgagtttactcatgcgcagtattgccttcttgataaggaaaatttcatggctcttttaagccgaacagataagaaatatgagaataaagaagaggcaagggttattacaataattgaatcgcgtgcggcgaaaactttaggtgagtgtaccagaggagctcatagtggactgcctttttatcgggtggatggaccgttgcagacgatgaaaataacgggtacgccagaatag

SEQ ID NO: 485766 - DNA, 1455 bp, Shigella sonnei
ttgaatatctcctctgctttacgccaggttgttcacggcactcgctggcacgctaaacgcaagagctacaaagtgttgttctggcgcgagataaccccgcttgctgttcctatcttcatggagaatgcctgtgtcctgttgatgggggttctgagcacttttctggtcagctggctgggaaaagatgcgatggccggcgtgggattggcggacagcttcaatatggtcattatggctttttttgctgctatcgatcttggtactactgtcgttgtggcatttagtctcggtaagcgggatcgacgacgagcgagggtggcgacgcggcagtcattggtgatcatgacgttgtttgccgtactgttggcaacgcttattcatcattttggcgaacaaattattgatttcgtcgcgggtgatgccacgacagaagttaaagcactggcgttgacttatctggagctgacggtactcagttatccagcagctgccatcactcttattggtagcggggcacttcgtggtgcagggaatacgaaaataccgctattgattaacggtagcctgaatattcttaatattattattagcggcatattgatttacggccttttctcctggccgggactgggatttgtcggggcagggctgggtttaaccatttctcgttatattggcgcagttgcaattttgtgggtgctggcgattggttttaatcctgcgctaaggatttcgttaaagagctattttaaaccgctgaattttagcattatctgggaagtcatggggattggtattcccgcgagtgtcgaatcagtgttatttaccagtggtcggttattaacccaaatgttcgttgccgggatggggaccagtgttattgccggaaattttatcgcgttttcaattgcggctcttatcaacttacccggaagtgcgctcggctctgcttctacgatcattacaggccgaaggttgggggtagggcagatagcgcaagcagagattcagttgcggcatgtgttctggctttccactcttggattaacggccatcgcctggctaacggctccctttgccggggttatggcatcgttttacacccaggatccacaggttaaacatgtcgttgtgattctgatttggctaaatgctttatttatgcctatttggtccgcctcatgggtgctacccgctggatttaaaggtgctcgcgatgcccgttacgccatgtgggtttctatgttgagcatgtggggttgccgggttgtcgtcggttatgtgctgggcatcatgcttggctggggtgtggttggtgtctggatgggaatgtttgccgactgggctgtgcgggccgtgctgttttactggcgaatggttactggacgttggctgtggaaataccctcgatccgaaccgcaaaagtgtgaaaaaaagccagttgtgtcggaataa

SEQ ID NO: 485767 - DNA, 516 bp, Shigella sonnei
atgtttgctctctgtgatgtaaacgcgttttatgccagctgtgagacggtgtttcgccctgatttatggggtaaaccggtggttgtgctatcgaataatgacggttgcgttatcgcccgaaacgctgaggcaaaggcgctgggtgttaaaatgggcgatccctggttcaaacaaaaagatctgtttcgtcgctgtggtgtggtttgctttagcagcaattatgagctttacgcagacatgagcaatcgggtgatgtcgacgctggaagaactatcgccccgcgtcgagatttacagtattgatgaggcattctgcgatctgacaggtgtgcgtaattgtcgcgatctgactgattttggcagagaaattcgcgcaacggtgctacaacgtacccatcttactgttggtatggggatcgcccagaccaaaacgctggctaagcttgccaatcatgcggcaaaaaaatggcagcggcagacggggggtgcccctattaagttgtcaagcatgttatga

SEQ ID NO: 485768 - DNA, 420 bp, Shigella sonnei; identical to SEQ ID NO: 459083

SEQ ID NO: 485769 - DNA, 381 bp, Shigella sonnei
atgactgaaatcgttgcagataaaacggtagaagtagttaaaaacgcaatcgaaaccgcagatggagcattagatctttataataaatatctcgatcaggtcatcccctggcagacctttgatgaaaccataaaagagttaagtcgctttaaacaggagtattcacaggcagcctccgttttagtcggcgatattaaaaccttacttatggatagccaggataagtattttgaagcaacccaaacagtgtatgaatggtgtggtgttgcgacgcaattgctcgctgcgtatattttgctatttgatgagtacaatgagaagaaagcatccgcccagaaagacattctcattaagggtgatgctgccaacttactgatttag

SEQ ID NO: 485770 - DNA, 177 bp, Shigella sonnei
atgaaacagcctgcgcccgtttatcagagaattgcgggtcatcaatggcgacatatctggctttctggcgatatacacggttgtcttgagcagttgcgccgcaaattatggcattgtcgttttgatccgtggcgagatttacttatctcagtgggagacgttatcgatcgtgggtaa

SEQ ID NO: 485771 - DNA, 1245 bp, Shigella sonnei
ttgattaagcacatcatcatagctgagagagcacaccaagaatctcttgttaagcaaaagcgtatagctcaggtctggaaccataaaacacagcttgcaagagaacttaagaagcctatgggtaagcaagcccccggatggttagagctatcagaagatggttcatactacatcgttgatgaagataaagcgtcactggtgaatatcatctatgacaagcgtctttctggtatgtcgatgtttgctatctgtaaatggctaaacgaacaaggttacccgaccattaatcagcgtaaggtcagaatatccaagactaagaaaccggatggcaactggtcagcattaagcgttaaacacatcctgacttcacgaagtgtattaggttaccttcccgctaagatttctacagaagaccgtaaaacagtgttacgtgaagaaattgaagggttctatcctcagattgtcacagactctaagttttacgctgtacagcaactgttagaggaaacagggaaggggaaaacatccagcggtgaacactggctatatgtgaacatactgaaggggcttatccgttgtaagtgtgggcttgtaatgactcctacagggatacgtaaacccgtttatcaaggtacttaccgttgcaatggtaataaggagtcccgttgtagctacggtacagtgtccagaaagttacttgatacacagctttgtagtcgtctgtttagcaaactgtcacagctacacgatgaagctaccgatacagctaaattagatgaactacaaagaagattaaacaccgttgatggtgaactggaaaaactcactgagacgctgatacagcttcctaacatcactcagattcaagaagcactacgggttaaacaggaagaaaaagatgaactgatagttcagttatcacgagaaaaggcgagggtaaaatctgtatcaagcttggatttaagcggtcttgatatggagtctgtagaggggagaactgaagcccagattattattaagcgtctggtgaaagagattgttgtttctggtaatgaaaagctggtggatatatatcttcacaatggaaatatgattcgtggttttcctcttgatggtaaagatgaccacaccttaacgcttgaagaagcaaccgatgagatgcagtcattagatgatatgcttatttttggtgaaccagtaacaaggatttatcctgctggtgatatggaagaggtggacgcttag

SEQ ID NO: 485772 - DNA, 549 bp, Shigella sonnei
atgaaagtgatctgcgccgggcaaagcgacgctggcatggcgttctccgctcagtatgccgatttcaacttctgtttcggcaaaggcgtaaatacacccacggctttcgccccgaccgctgtgcggatgaaacaggccgcagagcaaaccgggcgcgacgttggctcttatgtgttgtttatggtgattgccgatgaaaccgacgatgccgctcgcgccaaatgggaacactacaaagcgggcgcggatgaagaggcgttaagctggctaaccgaacaaagtcagaaagatacccgctccggtactgacaccaacgtccgtcagatggccgatcccacttcggcggtaaacatcaatatggggacattagtcggttcttacgccagtgtcgcgcgcatgttagatgaagtcgcaagcgtgcctggtgccgaaggcgtgctgttgaccttcgatgattttctgtcgggaatcgaaaccttcggcgagcgcattcaaccactgatgcagtgccgcgcccatctccctgcgctgactcaggaggtggcatga

SEQ ID NO: 485773 - DNA, 696 bp, Shigella sonnei
atgatgacgaccttaaccgctcgaccggaagccattaccttcgatccgcagcaaagtgcgctgatcgtggtggatatgcaaaacgcttatgccacgccaggcggctacttagatctcgccgggtttgatgtctcaaccactcgcccggtcattgccaacattcaaaccgccgtgaccgcagcgcgagcggcagggatgctgatcatctggtttcaaaatggctgggatgaacagtatgtcgaagctggcggacccggctcaccgaattttcataaatcgaacgccctgaaaaccatgcgtaagcagccgcagctgcaggggaaattgctggcgaaaggctcctgggattatcaactggtggatgaactggtgccgcagcctggcgatattgtgctgccgaagccgcgctacagcggtttcttcaatacgccgctggacagcattttgcgcagccgtggaatacgccatctggttttcaccggtatcgctaccaacgtctgcgtcgaatcgacgctacgcgatggcttttttctggagtatttcggcgtggtgctggaagacgcaacacaccaggcggggcctgaatttgcacagaaagccgcgttgttcaatatcgaaaccttttttggctgggtcagcgacgtcgaaacgttctgcgacgcgctttctcccacgtcctttgctcgtatcgcttaa

SEQ ID NO: 485774 - DNA, 129 bp, Shigella sonnei
atgccaaaatccgtaattattcccgctggcagcagcgcaccgctggcccccttcgttcccggcacgctggctgatggcgtggtgtatgtctccggtacgctggcttttgatcaacataataacgggtaa

SEQ ID NO: 485775 - DNA, 303 bp, Shigella sonnei
atgtccagaaaaagttgtttaatcaggctctttaaaacaacagtttcatgtaagttatttaccgcgattatactcagcgtttttttaggccaaccagcattaacttatgcaggcgttgtcattggtggtacgcgggtggtttacttaagtaataatgctgataaatctatttctgtatttagcaaagaagaaaaaataccttatctcatccaggcttgggtagatccatttaataaagaggataaaagcaaagcgccgtttaccgttattccgccagtatcacgattagaaccttcgcggtaa

SEQ ID NO: 485776 - DNA, 573 bp, Shigella sonnei; identical to SEQ ID NO: 459199

SEQ ID NO: 485777 - DNA, 360 bp, Shigella sonnei; identical to SEQ ID NO: 372517

SEQ ID NO: 485778 - DNA, 1029 bp, Shigella sonnei
atgaacgttattgcaatattgaatcacatgggggtttattttaaagaagaacccatccgtgaacttcatcgcgcgcttgaacgtctgaacttccagattgtttacccgaacgaccgtgacgacttattaaaactgatcgaaaacaatgcgcgtctgtgcggcgttatttttgactgggataaatataatctcgagctgtgcgaagaaattagcaaaatgaacgagaacctgccgttgtacgcgttcgctaatacgtattccactctcgatgtaagcctgaatgacctgcgtttacagattagcttctttgaatatgcgctgggtgctgctgaagatattgctaataagatcaagcagaccactgacgaatatatcaacactattctgcctccgctgactaaagcactgtttaaatatgttcgtgaaggtaaatatactttctgtactcctggtcacatgggcggtactgcattccagaaaagcccggtaggtagcctgttctatgatttctttggtccgaataccatgaaatctgatatttccatttcagtatctgaactgggttctctgctggatcatagtggtccacacaaagaagcagaacagtatatcgctcgcgtctttaacgcagaccgcagctacatggtgaccaacggtacttccactgcgaacaaaattgttggcatgtactctgctccggcaggcagcaccattctgattgaccgtaactgccacaaatcgctgacccacctgatgatgatgagcgatgttacgccaatctatttccgcccgacccgtaacgcttacggtattcttggtggtatcccacagagtgaattccagcacgctaccattgctaagcgcgtgaaagaaacaccaaacgcaacctggccggtacatgctgtaattaccaactctacctatgatggtctgctgtacaacaccgacttcatcaagaaaacactggatgtgaaatccatccactttgactccgcgtgggtgccttacaccaatagactggccccctga

SEQ ID NO: 485779 - DNA, 348 bp, Shigella sonnei
atgactgccctgatgatcctcatcactctgatgaactctgccggtggtaaagcatctgacctgttcggtgaactgaccggtatcgcagtactgctgactatgctgccgtacttctactcttgcgttgacctgattcgttttgaaggcgttaacatccgcaactttgtcagcctgatctgctctgtactgggttgtgtgttctgcttcatcgcgctgatgggcgcaagcttcttcgagctggcaggtaccttcatcgtcagcctgattatcctgatgttctacgctcgcaaaatgcacgagcgccagagccactcaatggataaccacaccgcgtctaacgcacattaa

SEQ ID NO: 485780 - DNA, 378 bp, Shigella sonnei
atgacaattatcggtgatgaaattcctcttatatctgaaaaacagtcgctttcaaaggtgcttttaaatgatgagaataatgaactgagtgatggtacaaacttctgggataaaaatcgtcaattaaccacagatgaaatagcttgctatcttcagaagatcgccgctaatgcaaaaaatactcaagtcaattatcctactggtctctacgtcccctactccaccagaactcacctggaagacgctctcaatgaaaatattaagagcgatccatcatggccgaatgaagtccagttattccccataaatactggcggacactggatattagtttcgctacagaaaatagtaaataaaaaaataataaactacaaataa

SEQ ID NO: 485781 - DNA, 504 bp, Shigella sonnei
atgccgggcaacagcacgcattatgggcgttggcctcaacacgattttacgtcacttaaaaaactcaggccgcagtcggtaacctcgcgcatacagccgggcagtgacgtcatcgtctgcgcggaaatggacgaacagtggggctatgtcggggctaaatcgcgccagcgctggctgttttacgcgtatgacagtctccggaagacggttgttgcgcacgtattcggtgaacgcactatggcgacgctggggcgtcttatgagcctgctgtcaccctttgacgtggtgatatggatgacggatggctggccgctgtatgaatcccgcctgaagggaaagctgcacgtaatcagcaagcgatatacgcagcgaattgagcggcataacctgaatctgaggcagcacctggcacggctgggacggaagtcgctgtcgttctcaaaatcggtggagctgcatgacaaagtcatcgggcattatctgaacataaaacactatcaataa

SEQ ID NO: 485782 - DNA, 450 bp, Shigella sonnei
atggcgtcgcaacgaaccaaagaggctcgtggtggagaattacagatcaacgaattacttcccgccagcctggatgcagcaaaagcccatggactgaccgaacgcgatgtttatgaagcaactgactactataaaacaccacgcgggcaacaaccgggaggtgcgacaaaaatgttgttctcacatgcacagaaaacgctggcctgggatgccttcgcatttactgaagtgttactgactcagccggtgatggtagtagttggtgaaaaagtcggtgccttcggtgcttatcgtgatggactggaagtctatggccgggcgatggtttcgcaggatcgtcagttagtttcattacccgatttctcacattatgaactgtatgacaaaccggaagcagttcaggaggcgctggaaaaagttattccttttttcaacacccatctgggataa

SEQ ID NO: 485783 - DNA, 651 bp, Shigella sonnei
atgagaaatattatgaaaaatgtactgattcttggtgctggcggtcagatagcccgccatgtgattaatcaactggcagataaacaaaccattaaacaaactttatttgcccgtcagccagcaaaaatccacaaaccctatccaactaatagcaagattattatgggagatgtactgaatcatgcagcactgaagcaggccatgcagggacaggacgttgtgtatgccaaccttacgggggaagatttagatattcaggcaaattcagtgatcgctgcgatgaaagcctgtgatgttaaacgtctgatctttgttctttccctcggtatttatgatgaagttccaggaaaatttggcgaatggaataatgcagttattggtgagcccctaaaaccattccgcagggctgcggatgcaattgaggcttctggactggaatatacaattcttcgccctgcctggctgactgatgaagatattattgattatgagcttacctcacgcaatgaaccattcaaaggtacgatcgtatcacgtaagagtgtcgcagcattaatcacagatatcatcgataaacctgagaaacacattggtgagaatataggtatcaatcaacccgtgactgatggtgacaagccattattcatgtaa

SEQ ID NO: 485784 - DNA, 1149 bp, Shigella sonnei
gtggcgctggaggatgcgagcacgacgaaaaaggggatagtacagctcagcagtgcgaccaacagcacttccgagtcactggcggcaacgccaaaagcggttaaggcggtaatgggtgaaacgaacaagaaagcgcccttaaatagtcctgcactgaccggaacgccaacaacaccaactgcgcgacagggaacgaataatacccaaatcgcaagcacggctttcgttatggctgcgattgccgcccttgtagattcgtcacctgatgcactgaacacgctgaacgagctggctgcggcgctgggcaacgacccgaattttgcgacctccatgactaacgcgcttgcgggtaagcaaccgaaagatgccaccctgacggcgctggccggacttactactgcggcaggcaagtttccgtattttacggggaatgatgtcgccagcctggcaaccctgacaaaagtcgggcgggatattcttgcgaaatcgaccgttgctgccgttatcgaatacctcggtttacaggaaacggtaaacaaggctggtaacgccgttcagcgttccggcgataaaatgaccggagaactgaaaattggcacggtgaatgcgctgcgaattttcaatgataccttcggtctaattttccgtcgttcagaagattttcttcatttcattccgacggctgaaggacaaggcgaaaacggtaatatcggcccattaaggccattcgctataaatctgagaacaggtgctatatctgtcagccacggggccaaaattaaaggaggtctagctattggagctactgataacgcactgggtgaaaactccattgttctgggagataacgacaccggatttaggcaagatggagatggtattattagcttctattcaaatggttcgcgcatcggacatattgatgagttaggattacatctttataaagatattgaatctaatggcagcaattttagattaaaaagtaattaccgccaccacattacattcgccaacgaagacggaagaattcgtatgtttttgtggaaagataacggtggtgatggtgttcatattaataacggttcagatggtggtggtgatttcatttttaaaacagatgggggatttgaggtgtactggcaatag

SEQ ID NO: 485785 - DNA, 1164 bp, Shigella sonnei
atgccaaatcatgatcgattcgaatgccaaactgcgatcgattcagatgccattttgcagctggcgtgggcggtctttaaaatctttcgtattccggtgaatcagtggacgctggcgacggcggcgctgggaggcgtgtttctggtgagtggtttgattttgttgatgaactacaaccacccttacacttttaccgcgcaaaaggcagtgatagcgatccctatcacgccacaggtgacgggaattgttactgaagtcactgacaagaataatcagcttattcaaaagggcgaggtgctttttaagctcgacccggttcgttaccaggcgcgagttgacagacttcaggctgacctgatgacggcgacgcataatataaagacgctgcgtgcgcagctcactgaagcgcaggccaacaccacccaggtttcagcggagcgcgaccgtctgtttaaaaattatcaacgttacctgaaaggcagccaggcggcggtgaatccgttctcggaacgtgacatcgacgatgcgcggcaaaatttcctcgcgcaggatgcgctggtgaaaggctcggtggcggagcaggcgcagatccagagccagctcgacagtatggttaacggcgagcaatcgcagattgtgagcttaagagcgcaacttactgaagcaaaatataaccttgagcagactgtcattcgcgcgccgagcaatggctacgttactcaggtactgatccgcccaggtacatacgcagctgccttgccgctgcgtccggtgatggtcttcatccccgagcaaaaacggcaaattgtcgcccaatttcggcaaaactcgctgttacgtctgaaacctggcgatgatgcggaagtggtgtttaacgcgctacctgggcaggtgttccacggcaaattgactagtattttacctgtcgtgccaggcggttcttatcaggcgcagggggtattgcaatcattaacggtcgttcccggcacggacggcgtgctgggaaccattgaactggaccctaacgatgatatcgatgccttacccgacggcatttacgcccaggtagcagtttactccgaccatttcagccatgtttcggtgatgcggaaggtgctgctaagaatgaccagttggatgcattatttgtatttggatcattga

SEQ ID NO: 485786 - DNA, 990 bp, Shigella sonnei; identical to SEQ ID NO: 462674

SEQ ID NO: 485787 - DNA, 1149 bp, Shigella sonnei
atgaggcgcttcgcaggcgcatgtcgtttcgttttcaatcgtgctctggcacgtcagaatgagaatcatgaggtcggtaataaatacatcccttacgggaaaatggcttcctggctggttgagtggaaaaatgccactgaaacgcaatggcttaaagatgccccgtcacagccattgcaacagtcactgaaagaccttgagcgggcttacaaaaacttcttccagaatcgggctgcttttccccgattcaaaaagcggggacagaatgatgtattccgctacccgcagggcgttaagctcgatcaggaaaacagccgtatttttctgccgaaactgggctggatgcgctaccggaacagccgtcaggtcacgggtgttgtgaaaaatgtcactgtcagccagtcctgcggtaagtggtacatcagtattcagacagaaagtgaagtatcaactccggttcacccttcagcatcaatggtcgggctggatgctggcgtggctaaactcgccacgctgtcagatggcacagtctttgagcctgtaaacagttttcagaaaaaccagaagaagctggcgagacttcagcgacagttaagccgcaaggtcaaattcagcaacaactggcagaagcagaaacgcaaaatacagcgactgcattcctgtatcgcaaatatccgcagggactaccttcacaaagtcacaacgaccgtcagcaaaaaccacgcaatgatagtcattgaggatttgaaggtcagcaacatgtcaaagtcagcagcgggtacggtcagccagccggggcgcaatgtccgggcaaaatcaggtttaaaccgttcgatactggatcagggctggtatgaaatgcgccgccagcttgagtacaagcagctctggcgtggcggtcaggtgcttgctgttccgccagcgtacacaagccagcgttgcgcgtgctgtggtcatacagcgaaagaaaaccgcctgtcacaaagtaaattcagatgccaggtatgtggatatacagtgaacgccgatgtaaatggcgctcgtaacattttagcggcggggcacgccgttcttgcctgtggagagatggtgcagtcaggccgcccgttgaagcaggaacccaccgaaatgattcaggcgacagcctga

SEQ ID NO: 485788 - DNA, 393 bp, Shigella sonnei
ttgcctgatgatcgcgagtcagtcttctggctgaatattaaaaatattccgccatcagcgagcaacaaagcgacgaactcgctggaaatagcagtaaaaacgcgtatcaagctgttctggcgaccagtaaatatccgccttattcccgaagatgctgcgccgaaagtgaaatggcgccgggaagggcgaaatctgatagcagagaatcccaacccaattcatatcagtgtgatggatgtcatcgttgatggccatgatgtgcccctcaatatgatccgtccttttgaaacgctcacgttacctttacctgctaattctgcgggaggccaaatgacctggcgatttattaatgattacggcgcagtcagtgacccgataaaaatgacgctgtaa

SEQ ID NO: 485789 - DNA, 378 bp, Shigella sonnei
atgaaccaatatattgctagttatatagaaaaaatggcatcattttccactgttttgtctgagacagtctcattagctaatgaatactggcatccagaaacgccaccggtggttatgttgttctctcaggttggaaaaacgattgtaaaaaatttttatgaaatgggggatattgaaagagaaaaaatatttaaacatgtcgaagatggtatggtctcgcttgatgatgaattggccacagttgtagctacagggcttatagaggcaatagtcactgcgaccgatagcaattctttactttggcaagatttaagtaaatttctgggtgacaaatcaaagtctcatgcattagtgtggaaaaattttggtcaggagtga

SEQ ID NO: 485790 - DNA, 816 bp, Shigella sonnei
atgatatcattaaaagctccgcacaataatttgatgccatatacgcaacaaagcatacttaatacggttaaaaacaatcagttaccagaggatatcaaaagctccctagtttcctgtgtcgatatattcaaggttttgattaaacaatattatgattatccttatgattgtcgtgatgatttagtcgatgacgacaaactcattcatctcatggctgccgtacgagactgtgagtggtcagacgataacgcactcaccataaatgtgcagtttaatgatttcccaggattttatgactggatggattaccctgatcacccggttaagtttgtttttcgcatacttgaaaatcaaaaagggacagtttgggtatatgaccaggatgatgcgtttcttgatattaaagcaaatgtgcaggctggacgctttaccgggcttaagaaattagtgcagtttatcaattcagtgcgaacagattgcaaatgtattcttcttgaacaccatatgcctttgctgagacttttccctaaagggaaagagtgtatgcatgtggaaaaatggcttcgcgaaatgtcgtctattccggagacagacgcgcccattaagcaggcgcttgcgcatggattattattacacttaaaaaatatctaccctgtttttcctgaatcactggtgatgttattgctctctgttctggacgtaaaaacatacagagatgatgcacgattaaatgaatggatatctaatagagtgcaggaattaggtgacagatattatcctgtaaataagcacgttaaaatccgctacactctttag

SEQ ID NO: 485791 - DNA, 390 bp, Shigella sonnei
atgaaattaatcattaccgaagattaccaggaaatgagccgtgtcgcggcacaccatctgcttggttatatgtcgaagacgcgtcgtgttaacctggcaattaccgccggtagcacgcccaaaggcatgtatgaatacctcaccaccctggttaaaggtaagccctggtacgataactgctatttctataatttcgatgaaattccctttcgcggcaaagagggagaaggcgtaacgattaccaatctgcgtaatctgtttttcacccctgcggggatcaaagaagagaatatccagaagctcactattgataactaccgcgagcatgatcagaaactggcgcgtgaaggcggcctggatttggtggtgctgggattaggtgcagggtga

SEQ ID NO: 485792 - DNA, 981 bp, Shigella sonnei
gtggtgggtgttccggttccggacaatattcacccgatgatcaaagacgaagcaggagtctggtcgtggcgcacgcctgtcctgaaaggcaacctgtatgagtattttttcaatgttgatggtgtacgcagcattgatataggcaccgcaatgactaagcctcagcgccaggttaactccagtatggttctggtgccaggcagttatctggatacgcgttctgttgcgcatggtgatttgatcgccataacttaccactccaacgcattgcaatctgaacgtcagatgtatgtctggaccccgccaggatacaccggcatgggcgagcctttgccagtgctctatttctatcacggttttggtgataccggacgttccgctatcgatcaggggcgtatcccgcaaatcatggataacctgctggctgaagggaaaattaaaccgatgctggtggtgatcccggataccgaaaccgatgcgaagggcattattcccgaagatttcgtgcctcaggaaagacgtaaagtcttttatccgctgaatgctaaagcggcagatcgcgaactgatgaacgatattatcccgctgattagcaagcgttttaatgtccgtaaagatgccgatggtcgcgcgctggcagggctttcacaaggcgggtaccaggcgctggtttccggaatgaatcatctggaaagctttggctggctggccacattcagtggtgttaccacgacaaccgtaccggatgaaggtgtcgcggcccggctgaacgatccggcagctattaaccagcaactacgtaattttactgtggtcgttggtgataaagatgtcgtaaccggcaaggatatcgccgggctgaaaactgagcttgagcagaaaaaaattaagtttgattaccaggaatatcccggcctgaaccatgaaatggatgtctggcggcctgcctatgcagccttcgtacagaaattatttaaataa

SEQ ID NO: 485793 - DNA, 345 bp, Shigella sonnei
atggcactgcaaaatgagaaaaatagtcgttatcttttacgcgactggaaaccagaaaatccggccttctgggaaaataaaggaaaacatattgctcgaagaaacctctggatatcagtcagttgtctacttcttgccttctgtgtctggatgctatttagcgcagttggatttgcccctatatttccagacatctgttatcacttaacccattacaagcccgctgccgcagatattcccgtggcgagcgataacccagcgcactatgcggatgccattcgttataatgctcgaacgcctctgcaaggttctttgctgccgttaacccgtctggtttgggcatga

SEQ ID NO: 485794 - DNA, 135 bp, Shigella sonnei
atgggctggcaaaagtgtagcggtattaagcgcagctatttagagtttgtgcaattagaatcttgcgaatgtctgcaatacctgaatctcagccataatcaattatctgatattgttgcaggtaataaaaattaa

SEQ ID NO: 485795 - DNA, 654 bp, Shigella sonnei
atgcacagctccattcaaattatggtgggatgtgcagggcagtcgcaagactggccgggttctcgagtgaccggtatttccacccctgtacgtctcaccacccttatggtcgtggaaaacctcggtggtgagttaattaacttatcactcgaggatgccatcatggctactatccctgccctttctcaccctgacgtaaccatcgaaaatggtcgcgctgtcactacgtctattgcgatcgcagagttctttggcaagcgtcacgacaatgtgttacgtgccatcgcaaatactgaatgctcacctgaatttaacgccctcaattttgaggacgtcacctacactgacgccaaaggcgaaaaacgcccgatgtaccaaatcaccaaaaacggcttcgttttcctggtgatgggattcactggcaaaaaagccgctgcatttaaagaagcctacattgctgagttcgatcgcatggaggccgaactgcgccagaataacaccccacccactgacaaaataattccaggcgatggccgcaccctggttgttcacttcgacgaacgcggcaacatcagattcaccgaaaccgttcctgatggcgcacgggtctgtaccatggagactttccggttggtaatgactccaacttattga

SEQ ID NO: 485796 - DNA, 1155 bp, Shigella sonnei
atgaaaattagcgatggaaactggttgattcaacctggcctcaatttgattcacccgcttcaggtgttcgaggttgaacagcaggataatgaaatggtggtctatgctgccccccgtgatgtgcgtgaacgtacctggcagcttgatacgcctttatttacgctgcgctttttctccccacaggaaggtattgtcggtgtgcggattgagcattttcagggggcgctgaataacggtcctcattatccgctcaatattttgcaggacgtgaaggtcacaatcgaaaacacagaacgttatgctgagtttaaaagtggcaacttaagcgcgcgtgtcagcaaaggtgagttctggtcactggattttctgcgcaacggcgaacgtattaccggtagtcaggtgaaaaataatggctacgtgcaggacacgaataatcaacgcaattatatgtttgagcggcttgatcttggcgttggcgaaacagtttacggtctgggagagcgctttactgccctggtgcgcaatggccagacggtagagacctggaaccgggacggcggcacaagtactgaacaggcgtataaaaatatcccgttctacatgactaaccgtggttatggggtactggtcaatcatccccagtgtgtctcttttgaagtgggatcggagaaagtctccaaagtgcagttcagcgttgagagtgaatatctcgaatactttgttatcgacggcccgacgccgaaagcggtacttgatcgttatacccgctttactggtcgtccggcgctgccgcccgcgtggtccttcggcctgtggctaaccacttcatttaccaccaactacgacgaagcgacggtaaacagctttatcgatggtatggcggaacgcaatctgccgctgcatgttttccactttgactgtttctggatgaaagccttccagtggtgcgattttgagtgggacccgctgactttccctgacccggaagggatgatccgccgcctgaaagcgaaagggctgaaaatctgcgtctggattaacccctatatcggtcaaaaatcccccgtctttaaagagttacaagagaaaggctatttactcaaacgcccggacggttcgctatggcagtgggataaatggcagccaggtctgtaa

SEQ ID NO: 485797 - DNA, 1014 bp, Shigella sonnei
atgtctacgagaagagaagttattctttcctggttgcgtgagaaacgtcagacctggcgtctgtgctatttgttgggtgaggctggaagtggaaaaacctggctggcgcagcaactgcaaaaagataaacatcgccgtgtgattactttaagcctcgttgtttcctggcaaggtaaggccgcatggatcgttaccgacgataacgcggctgaacagggctgccgtgacagcgcctggacgcgagatgagatggcggggcaattactgcatgcgcttcatcgaactgatagtcgctgccctcttattattattgaaaatgctcacctgaatcaccgccgcatacttgatgatctccaacgcgcgatatctcttattcctgacggtcaatttttgctgatcggcagacccgatcgaaaagtcgaacgtgattttaaaaaacagggcattgaacttgtctcgacaggacgtctgacggagcacgaacttaaggcaagcatccttgaaggtcagaatattgaccaacccgatctccttttaacctccagagttctgaaacggatagctttattatgtcggggcgatcgcagaaagctggcgcttgccggcgaaacaattcgcttattacagcaagccgagcagaccagcgttttcactgcaaaacaatggcgaatgatttaccgcatattgggtgataaccgcccccggaaaatgcagcttgccgtggtaatgagtggaaccattatcgctattacctgtggttggctactgctgtcctctttcacagctccgttccccgttcctgcgtggctggtacccgtaacgccagtagttaaacaagatatgactaaggatattgctcatgtggtgatgcgcgatagtgaggcgctaagcgtgttatacggcgtatgggggtacgaggtcccagctgattcggcctggtgcgatcaggcagtaagagcggggctggcatgtaaaagtgggaatgctgtcagcgccagtgatataagacggtaa

SEQ ID NO: 485798 - DNA, 210 bp, Shigella sonnei
atgcggtatccaacccgcgaatatcagcgtgattcaccgtcggatttactgctacgtcgccctcagggaattaaacctaaaaagaaaatcgtcaaaattagagattccggtttgacacggaaagtcatatcagcgctgggagcttaccaccataacaggcccatcatcgacagaggagaacaggataaatatattatcgtttcgtgttaa

SEQ ID NO: 485799 - DNA, 678 bp, Shigella sonnei
atgtttgatcatgtgcgaatgtcgacagggaattttaaagattgcattacagaacaattggaattaactattgattattcagatatatttgggaatgaagatctcgatggttatatcaataacattataaaaatgattgatacattgccagataatgcaatgatattgaaatccgttctggcagtaaaactggtgatgcaattaaaaattctcaatattgttaataaaaactttattgagaatatgaaaaaaacatttagccattgtccttatataaaagatccaattatacgtagttatatacattctggggaagatgacaagttcgataattttatgcgtcaacatcgattcagtaaggtgaatttcgatacccaacagatgatccattttattaacagatttaatatgaataaagggctgattgataaaaataacaatttttttatccaacttatcgatcaggccttacgatcaacggatgatatgatcaaagcaaatgcctggtatctttataaagagtggattcgtagtgatgatgtttcacctatatttatagaaactgaagaaaagttaagaacctttaacactaataaattaacacgaaacgataatatatttatcctgttctcctctgtcgatgatgggcctgttatggtggtaagctcccagcgctga

SEQ ID NO: 485800 - DNA, 633 bp, Shigella sonnei
atggatcctttgcacgccgtttacctgaccgtaggactgttcgtgattactttttttaatccgggagccaatctctttgtggtagtacaaaccagcctggcttccggtcgacgcgcaggggtgctgaccggactgggcgtggcgctgggcgatgcattttattccgggttgggtttgtttggtcttgcaacgctaataacgcagtgtgaggagattttttcgcttatcagaatcgtcggcggcgcttatctcttatggtttgcgtggtgcagcatgcgccgccagtcaacaccgcaaatgagcacactacaacaaccgattagcgcctcctggtatgtcttttttcgccgcggattaattaccgatctctctaacccgcaaaccgttttattttttatcagtattttctcagtaacattaaatgccgaaacaccaacatgggcacgtttaatggcctgggcggggattgtgctcgcatcagttatctggcgagtctttcttagtcaggcgttttctttgcccgctgtgcgtcgtgcttatgggcgtatgcaacgcgttgccagtcgggttattggtgcaattattggtgtattcgcgctacgcctgatttacgaaggggtgacgcagcggtga

SEQ ID NO: 485801 - DNA, 258 bp, Shigella sonnei
atgcacagtgattattataatatggtttttggtgaaaaattggccaatattttatatgaggctaactctcaatttttttacgagagaaatgtcatagaagaggcagtcaacgctttattctgtgagcgtgaaataataaacaacaagaacataataaagaagctgatgttctttttgtcagatgttaatcacaccaagaaagatgttgttcagagcgcacttaatattatcattgacattacatcaggtgatatttga

SEQ ID NO: 485802 - DNA, 894 bp, Shigella sonnei
atgagcgtgatgtttgatccagacacggcgatttatcctttccccccgaagccgacgccgttaagcattgatgaaaaagcgtattaccgcgagaagataaaacgtctgctaaaagaacgtaatgcggtgatggttgcccactactataccgaccccgaaattcaacaactggcagaagaaaccggtggctgtatttctgattctctggaaatggcgcgcttcggtgcaaagcatcccgcttctacgttgttagtcgctggggtgagatttatgggagaaaccgccaaaattctcagtccggaaaaaacaattctgatgctgacacttcaggctgaatgttcactggatctcggctgccctgttgaagaatttaacgcattttgcgatgcccatcccgatcatactgtcgtcgtctacgccaacacttctgctgcggtaaaagcgcgcgcagattgggtggtaacttcaagcattgccgtcgaacttattgatcatctggatagttttggtgaaaaaatcatctgggcacccgacaaacatctggggcgttacgtgcaaaaacagacgggcgcagacattttatgctggcagggtgcctgtattgtgcatgatgaatttaagactcaggcgttaacccgcttgcaagaagaatacccggatgctgccatactggtgcatccagaatcaccacaagctattgtcgatatggcggatgcggtcggttccaccagtcaactgatcgctgctgcgaaaacattgccacatcagcggcttatcgtggcaaccgatcggggcattttctacaaaatgcagcaggcggtgccagataaagagttactggaagcaccaaccgcaggtgagggtgcaacctgccgcaggtgtcagcgccagtga

SEQ ID NO: 485803 - DNA, 189 bp, Shigella sonnei
gtgcgtgaatatgtcgttcgtctgcgccgtttgggtaatcatctacacgagcaaaatatttccctcgatcagctgcaggacggtttccttgatgaaatcctcgccccgtggctgcccaccaccagcaccaacaattaccgcattgcgttacggaagtatcaacactatcagcgtcaaacgtgtacctga

SEQ ID NO: 485804 - DNA, 858 bp, Shigella sonnei
gtgtttacaaacaatggctctacactgcaaacagacataacaacattcggggtgaatatgaaattagcacatctgggacgtcaggcattgatgggtgtgatggccgtggcgctggttgcgggtatgagcgttaaaagttttgcagatgaaggtctgcttaataaagtcaaagagcgcggcacgctgctggtagggctggaaggaacttatccgccgttcagttttcagggggatgacggcaaattaaccggttttgaagtggaatttgcccaacagctggcaaaacatcttggcgttgaggcgtcactaaaaccgaccaaatgggacggtatgctggcgtcgctggactctaaacgcattgatgtggtgattaaccaggtcaccatttctgacgagcgcaagaaaaaatacgatttttctaccccttacaccatttccggtattcaggcgctggtgaaaaaaggtaacgaaggcaccattaaaacagccgatgatctgaaaggcaaaaaagtgggtgtcggtctgggcaccaactatgaagagtggctgcggcagaatgttcagggtgtcgatgtgcgtacctatgatgatgacccgaccaaatatcaggatctgcgcgtaggccgtatcgatgcgatcctcgttgaccgtctggcggcgctggatctggtgaagaaaaccaacgatacgctggcagtaaccggtgaagcattttcccgtcaggagtctggcgtggcgctgcgtaaaggaaatgaagatctgctgaaagcagtgaatgatgcaattgcggaaatgcaaaaagatggcactctgcaagccctttccgaaaaatggtttggtgctgatgtgaccaaataa

SEQ ID NO: 485805 - DNA, 141 bp, Shigella sonnei; identical to SEQ ID NO: 11535

SEQ ID NO: 485806 - DNA, 1113 bp, Shigella sonnei
atgaattactctcacgataactggtcagcaattctggcccatattggtaagcccgaagaactggatacttcggcacgtaatgccggggctctaacccgccgccgcgaaattcgtgatgctgcaactctgctacgtctggggctggcttacggccccggggggatgtcattacgtgaagtcactgcatgggctcagctccatgacgttgcaacattatctgacgtggctctcctgaagcggctgcggaatgccgccgactggtttggcatacttgccgcacaaacacttgctgtacgcgccgcagttacgggttgtacaagcggaaagagattgcgtcttgtcgatggaacagcaatcagtgcgcccgggggcggcagcgctgaatggcgactacatatgggatatgatcctcatacctgtcagttcactgattttgagctaaccgacagcagagacgctgaacggctggaccgatttgcgcaaacggcagacgagatacgcattgctgaccggggattcggttcgcgtcccgaatgtatccgctcacttgcttttggagaagctgattatatcgtccgggttcactggcgaggattgcgctggttaactgcagaaggaatgcgctttgacatgatgggttttctgcgcgggctggattgcggtaagaacggtgaaaccactgtaatgataggcaattcaggtaataaaaaagccggagctccctttccggcacgtctcattgccgtatcacttcctcccgaaaaagcattaatcagtaaaacccgactgctcagcgagaatcgtcgaaaaggacgagtagttcaggcggaaacgctggaagcagcgggccatgtgctattgctaacatcattaccggaagatgaatattcagcagagcaagtggctgactgttaccgtctgcgatggcaaattgaactggcttttaagcggctcaaaagtttgctgcacctggatgctttgcgtgcaaaggaacctgaactcgcgaaagcgtggatatttgctaatctactcgccgcatttttaattgacgacataatccagccatcgctggatttcccccccagaagtgccggatccgaaaagaagaactaa

SEQ ID NO: 485807 - DNA, 951 bp, Shigella sonnei
gtgaatttccaacaactaaagataatccgcgaggctgcacgtcaggattacaacctgacagaggttgcgaatatgctttttacctcacagtccggcgtcagccgtcatattcgggaactggaggatgaacttggcatcgaaatatttgttcgacgaggtaagcgactgctgggcatgactgaaccgggcaaagcattactggtcattgcagaacgtattctgaatgaagccagtaatgttcgtcggcttgcagacctgtttaccaacgatacgtctggcgttctcactattgcaacgacgcatactcaggcacgttatagcttgccagaggtcattaaagcttttcgcgaacttttcccggaggttcggctcgagctaatccaggggacgccacaggaaattgcgacgttgttgcaaaatggcgaagctgatattggtatcgccagcgagcgtttgagtaatgacccgcagctcgtcgccttcccgtggtttcgttggcaccatagtttgcttgttccactcgatcatcccttaacgcaaattacaccattgacgctggaatcaatagcgaagtggccgttaatcacttaccgacaggggattacggggcgctcacgtattgatgacgcatttgcccgcaaaggtttgctggcagatattgtattaagtgcgcaggattctgatgtcattaaaacctatgttgctcttgggcttgggatcggattagttgccgaacaatccagcggcgaacaagaggaagagaatttaatccgtctggatacgcggcatcttttcgatgctaatactgtctggttgggactgaagcgaggacaacttcagcgtaactatgtctggcgctttctggaactttgtaatgcaggactgtcagttgaggatatcaagcggcaggtgatggaaaacagtgaagaggaaattgattatcagatatag

SEQ ID NO: 485808 - DNA, 570 bp, Shigella sonnei
atgaagaataaggctgataacaaaaaaaggaacttccttacccatagtgaaatcgagtcactccttaaagcagcaaataccgggcctcatgcagcacgtaattattgtctgactttgctttgttttattcatggtttccgggcgagtgaaatttgtcgattgaggatttcggatattgatcttaaggcaaagtgtatatatatccatcgattaaaaaaaggcttttcaacaacgcacccgctattgaacaaagaagttcaggctttaaaaaactggttgagtatccgtacttcttatccgcatgctgagagcgagtgggtatttttatcacgtaaggggaatccgctttctcggcaacagttttaccatattatctcgacttccggtggtaatgccgggttgtcactggagattcatccgcacatgttacgccattcgtgtggttttgctttggcgaatatgggaatagatacgcgacttatccaggattatcttgggcatcgcaatattcgtcatactgtctggtataccaccagcaatgcagggcgtttttacggcatctgggggtaa

SEQ ID NO: 485809 - DNA, 294 bp, Shigella sonnei
atgcaactaatcttatctatatatcatgtgatatgttctgtaacaagtaaaatcaacataaaaaattcagcaaaatttaatattcgttcaactagccgtctcacatatgacattattagtcaactccatttgccacaaaatggctatttcatggaacacagtaatttcttagtggctattatcatgctaatgcttaggtccctagcgattattcctgcctggttcgtcagcttacgccatgagattgttacattcctttttatcctggagatggtaatgactccaacttattga

SEQ ID NO: 485810 - DNA, 804 bp, Shigella sonnei
atgcaccgtctctctgtagcggaacaatacaaagctattgcacaggctagagagatagcaaaacaatatgagcaaggggctatcagcctggcgcgtatgaatagtcagatgaaacgcctacaacagcaacaacgtaagattaatggcaacagaaaagctcaatttgcccccgttaagggaggatcagggaattccgccacgatgggcgctctgttatttggaggcgctacggctgctgctggcgtgatggctgttagtaaaacctctgaatttatggctaacagctttgctaatgctgaaacagaaggggagctaatccaacgtgcaaggcttggtggagttgattacaacttacttaataatcttgagcgttgggcgtatgacaacgggatcgatagcctccagggtgatccgggacgcagaaaaatactagatgccatcggtaaagatgtaaaggaacgcgctaccaaaagctatgacgaggctgaatatgtagttgataagaaaacagggaaaggcatatggaagggcggtgattctggtattaacactttaatgaatgaaggattcttaactaaaaaggatttgaaagactttgccaataactctgctggtttaatttcaaaagctgtcaacggaatggtgaaaaagggctataccgacgcacagatcggtagtcgtctggaagatttagcggacgacctcctcttaacttctaaatattggcaaagatcagccagagaggtgcaggcaagcattacccagcaaaaagccgccggacaatggctaacagaaacacagtag

SEQ ID NO: 485811 - DNA, 1020 bp, Shigella sonnei
ttggagtcattacccgattactgggcttccggacaaaatcgtagcaattactctattggctacagtaacagtgcatcctggggcagctacagtgtcagtgcccagcgttcatggaatgaagacggcgacactgacgatagcgtttatctcagtttcaccattcctattgaaaaattacttggcactgaacaacggacttcaggtttccagagtattgatactcaaatgagcagtgactttaagggtaataaccaactcaacgtcagtagcagtggctatagtgataacgctcgcgtcagttatagcgtaaatactggctatacgatgaataaagccagcaaagatttgagttatgttgggggttatgccagctatgaatcaccgtggggaaccctggcaggttcagtttctgcaaatagcgataacagtcgtcaagtgtctctcagcaccgacggtggttttgtattgcatagcggcggcctgaccttcagtaatgacagttttagcgactccgatacactggcggtagttcaggctccaggtgctcaaggagcgcgaataaattatggcaacagtactatcgatcgatggggttatggtgtcaccagcgctctttctccttatcatgaaaaccgtatcgcgctggatatcaacgatcttgagaacgatgttgaattaaaaagtaccagtgcagtagctgtaccgcgtcagggttcagtcgtctttgctgattttgaaaccgtgcaagggcaatcagccattatgaacatcacacgaagtgatggtaaaaatattccatttgctgcagatatttatgatgagcaaggcaatgtcattggtaatgttggacagggtggacaagcatttgttcgtggcattgagcagcagggaaatatcagcattaaatggctcgaagaaagtaaacccgtaagttgtcttgcgcattatcaacaaagttcagaagcagaaaaaatagcgcaatctattattctgaatggaattcggtgtcagattcagtaa

SEQ ID NO: 485812 - DNA, 303 bp, Shigella sonnei; identical to SEQ ID NO: 458125

SEQ ID NO: 485813 - DNA, 654 bp, Shigella sonnei; identical to SEQ ID NO: 476867

SEQ ID NO: 485814 - DNA, 153 bp, Shigella sonnei
atgaagcagcataaggcgatgattgtcgccctgatcgtcatctgtatcaccgccgtagtggcggcgctggtaacgagaaaagacctctgtgaggttcacatccgaactggccagacggaggttgctgttttcacggcttacgaatccgagtaa

SEQ ID NO: 485815 - DNA, 387 bp, Shigella sonnei
atggaaacgacattcgtgctggatgcactggagcaggcgttgtgggcccgtcgcccgtctggcaccatccatcacagcgataaaggctctcagtatgtgtcactggcctataaggcgcgactaaaagaagcaaaactgctggcatcaacagggagtactggtgactcgtatgacaacgcgatggcagagatcatcaagggcctttacaaagcggaggtaatacaccgtaagagctggaaaaaccggacagaagtggagctggccacactcacgtgggtggactggtataacaatcgacgattgctggaaaggctgggccatatcccaccggcagaagcagaaaaagcttattatgcttccatcggaaatgatgatctggcagcctga

SEQ ID NO: 485816 - DNA, 603 bp, Shigella sonnei
gtgaataaagtttattctcttaaatattgccccgtcaccggggggcttattgctgtctctgaacttgcccgcagggtaataaaaaagacatgccgaagattaacgcatattcttctggctggcattccagcaatctgtctgtgttactctcagatatccctggcgggtattgtccgttccgatattgcctatcagatttatcgtgatttcgccgaaaacaaagggctttttgtacctggtgccaatgatattccggtatatgataaggacggaaaacttgtgggaagactgggtaaagccccaatggccgatttcagcagtgtgagctcaaatggcgttgctacgcttgtatcgcctcagtatatcgtcagcgtaaagcataacggaggatatcggagtgtgagctttggtaatgggaaaaatacatattcccttgttgaccgtaataaccacccttctattgacttccatgctccacgtctgaataaactggttacagaagttattccctcagcggtaacatcagaaggaaccaaagccaatgcttataaatacactgaacgttacaccgctttttatcgggtgggtagtgaggtagcctga

SEQ ID NO: 485817 - DNA, 855 bp, Shigella sonnei
atgagcggtggccgtgtagaagggaaagtgatttacgaaacccagtccactcacaaactgctggcggcgttctctcaggcttccatgatccacgttaaaggtgacgtaaacgaagaaacctttaacgaagcctacatgatgcacaccaccacttctcctcactacggtatcgtggcgtccactgaaaccgctgcggcgatgatgaaaggcaatgcaggtaaacgtttgatcaacggttccattgaacgtgcgatcaaattccgtaaagagatcaaacgtctgagaacggaatctgatggctggttctttgatgtatggcagccggatcatatcgatacgactgaatgctggccgctgcgttctgacagcacctggcacggcttcaaaaacatcgataacgagcacatgtatcttgacccgatcaaagtcaccctgctgactccggggatggaaaaagacggcaccatgagcaactttggtattccggccagcatcgtggcgaaatacctcgacgaacatggcatcgttgttgagaaaaccggtccgtataacctgctgttcctgttcagcatcggtatcgataagaccaaagcactgagcctgctgcgtgctctgactgacttcaaacgtgcgttcgacctgaacctgcgtgtgaaaaacatgctgccgtctctgtatcgtgaagatcctgaattctatgaaaacatgcgtattcaggaactggctcagaatatccacaaactgattgttcaccacaatctgccggatctgatgtatcgcgcatttgaagtgctgccgactatggtaatgactccgtatgctgcgttccagaaagagctgcacggtatgaggtag

SEQ ID NO: 485818 - DNA, 750 bp, Shigella sonnei
atgcgctatttcatactaatgttcactttcgtgtgttcctttgttgcagcccaaccaactattgtcccacaattacagcaacaagttacggatcttacgagtagcttaaactcacaagaaaagaaagaactgacgcacaagttagaatctattttcaataatacccaagtgcaacttgctgtattaattgttcccacaaccaaagacgagacaattgaacaatatgctacaagagtttttgacaattggcgtttaggagatgccaaacgtaatgatgggatactgatcattgttgcctggtcagatcgtactgtccgcatccaggtaggttatgggctggaagaaaaggtaaccgatgctctggctggagatatcatccgtagcaacatgatacccgcatttaaacaacaaaaattagctcagggattagagctagctataaacgctttgaataaccaactcacttcacaacaccaatatccgactaatccttcagaaagtgaatcagcgtcttccagtgatcattattactttgctattttttgggtatttgcagtgatgttcttccctttctggttttttcatcaaggcagtaatttttgtcgcgcatgtaaaagtggagtctgtatttcagcaatctatcttttagatttattcctgttctccgataaaattttttccattgctgtattttccttcttttttactttcaccatatttatggtctttacctgtttatgtgtacggtaa

SEQ ID NO: 485819 - DNA, 984 bp, Shigella sonnei
gtgtactttgccttaaaaagcggctctgccacattaacgtcattaacagcggtgaccgatcaaaacggaatcgcgacaacaagcgtgaaaggagcgatgacaggtagcgtcacggtaagcgcagtcacgaccgctggtggaatgcaaacagtagatataacgctggtggcaggcccagcagacgcctcaaagtcagtccttaagaacaatcggtcatcattgaaaggagactttaccgatagtgctgagctacatcttgttctgcacgatatatcaggcaatccgatcaaagtttctgaagggctggaatttgtacagtcaggtaccaacgtgccctatgtgcaagttagtgcaattgactacagtaaaaatttctcaggcgagtacaaagccactgttacaggaggcggagagggtatcacaacgctgatccctgtattgaatggtgttcatcaagctggtctgagtaccacaatacaattcactcgcgcagaagacaaaataatgagcggtacagtatcagtcaatggtactgacctaccgacaactacattcccttcgcaggggttcaccggggcgtattatcagttgaataatgacaactttgccccaggaaaaacggcggctgattatgagttttcaagctctgcctcctgggtcgatgttgatgctaccggtaaagtgacatttaaaaatgtcggcagcaattcggaaaggattacggcgacaccaaaatcaggaggccctagctatgtatacgaaatccgtgtgaagagttggtgggtgaacgccggcgaggctttcatgatatacagccttgctgaaaatttttgcagcagcaatggctacacgctccccagagcaaactatttaaaccacagtagttcccgaggcatcgggtcactgtacagtgaatggggagatatggggcattacacgactgaagctggttttcaatcaaatatgtattggtcatctaaatag

SEQ ID NO: 485820 - DNA, 789 bp, Shigella sonnei; identical to SEQ ID NO: 458896

SEQ ID NO: 485821 - DNA, 441 bp, Shigella sonnei
atggaaatatatgacagtgaggacataaaggtatacatgttaactaaaagaatattattttctgtaatgctgatagtttcaccaagcgtggtggccagcgagaaagcgcatgaattgtatgacagcatatacggtggtaaacctgctcccgatgttataaatacactgcataaaatggctgaatcgggagatatcgacgcgcagagcctgttaggctgggaatattatcagcctcgttatgataccaaacctgatgttcaggaagcgattaaatggttcgagttagcggctaaacaaggtgacagagaagctccgttagcgctggggggtatctactacgacggtgagcaggtgcgggtggattatgccaaagcgtatgcactatttaatcaggccgcgcagcacggtgtgaatttagcatggtccaggttgggcaggtaa

SEQ ID NO: 485822 - DNA, 1032 bp, Shigella sonnei
atgccgatcatagcaccaatttcccgtgacgaacgacgcctgatgcagaaagccatccataaaacacacgataaaaattatgcccgcagactgactgccatgctgatgctgcaccggggcgaccgtgtcagcgacgttgccagaacgctctgctgcgcccgttcctctgttggacgctggattaactggttcacgcagtcgggtgttgagggactgaaatcattacctgccgggcgtgcccgtcgctggccgtttgagcatatctgcacactgttacgtgagctggtaaaacattctcccggcgactttggctaccagcgttcacgctggagtacagaactgctggcaataaaaatcaatgagataaccggttgccagttaaatgccggaaccgttcgccgctggttgccgtctgcggggattgtgtggcgaagggctgcgccaactctgcgtatccgtgacccgcataaagatgaaaagatggcagcaatccataaagcactggacgaatgcagcgcagagcatccggtcttttatgaagatgaagtggatatccatcttaatcccaaaatcggtgcggactggcaactgcgcggacagcaaaaacgggtggtcacgccgggacagaatgaaaaatattatctggccggagcgctgcacagcgggacaggtaaagtcagctgtgtgggcggcaacagcaaaagttcggcgctgttcatcagcctgctgaagcggcttaaagcgacataccgtcgggcgaaaaccatcacgctgatcgtggacaactacattatccacaaaagccgggaaacacagagctggctgaaggagaacccgaagttcagggtcatttatcagccggtttactcgccatgggtgaatcatgttgaacggctatggcaggcacttcacgacacaataacgcgtaatcatcagtgcagctcaatgtggcaactgttgaaaaaagttcgccattttatggaaaccgtcagcccattccccggaggcaaacatgggctggcaaaagtgtag

SEQ ID NO: 485823 - DNA, 789 bp, Shigella sonnei
ttgagattttctacaatcgtcagcgtcgtcactctcgtctggggaatatctccccggcagccttcagggaaaaatatcatcagatggctgcttaaaaaaagaacaaatggtagtgtccgctattgccagtacacctcacttaaagtttccaccgaagcaggtgctgcccccggtatctataccatcagcgtaacccaactggcgcaggcgcaatctttacgaactgattccccgacaatcattgcatcaacaaaagatgcactgggtgatgagtcatcagatacacgcacaataaaaattacccaagacggtcgtaaagagccgctggaaatcaagctcaataaagatcagacgtcattggatgagatcagcaaagccattaacgatgccgatagtggaatttccgctagtatcgttaaagtcaaagatggtaactatcaattggtattgaccgccagtgaaggtctggccaataaaatgaccatatctgttgagggtgacagtaaattaaatgatctgctggcttatgacagcaagaccaacaccgggaatatgaaggaactggttaacgcgcaaaatgcacagctaaacgttaacggtatcgatattgaacgttcaagtaacaaaattaccgatgctcctcagggagtgactctcgatttgaccaaaaaagtcactgacgtccgggtcacggtgacaaaaagcaacgataaagcaaccgaagcaattaaaggctgggtggattcatataactccctcattgacacctttaacaccctgacaaaatga

SEQ ID NO: 485824 - DNA, 672 bp, Shigella sonnei
atgacctttggttggaaagtcaccttgttgtacgcgattatcgcagccggcgtctccgttcttgccagtattatcctggattctctggggtttgaacgtcatatcattgccagtaaaagctcatcagcaaattgttgtgctccagcaaaaacttcgccgggaacgacatatacgcccataaaagtgagttgttgtagtccagcggctaaagccattgagaaccccgtagttacctgttgcagtaccaaagctgtagtaagtattaatcccataaaactagccaccaaagatgcgttgcaacagtttaaagatgtactgccatatcttttgttaggagtattaataggatcttttatttatggctttattccctcagcgtggattgccgctcatgcaggagcagataatcccttcgccatcccattaagcgccgttgtcggtattccgctgtatatccgggctgaggcggttatccctctggcatctgttctgatgacaaaaggaatgggtctgggagcattaatggcattaatcatcggcagtgccggcgcaagcctgacggaagtgatattacttaaatcaatgttcagaatgccgatgatagctgcattcctgacggttatattaggtatggctatcttgatgggctatttgactcaattgctattttaa

SEQ ID NO: 485825 - DNA, 480 bp, Shigella sonnei
atggtgaaatacctcaaggagaacttcttcgtccggtaccgcaggttcgacagcttcactcatgtcaatcaacaactggagcaatggatagccgatgtggctgacaaacgggagcttcgccagttcaaagaaacgccggaacagcgcttcgcgctggagcaggaacatctgcagccgttaccggatacagacttcgataccagttacttcgatatccgccatgtgtcctgggacagctatatcgaggttggtggtaatcgttacagcgttcccgaagcgctgtgtggtcagccggtatcgatacgaatatcgctggatgacgagttgcggatctacagtaatgagaaactggtggcctcacatcgcctctgttcagcatcgtctggctggcagacagtgccggagcatcacgccccgctctggcagcaggtcagtcaggtggaacatcgaccactgagtgcctatgaggagctgttgtga

SEQ ID NO: 485826 - DNA, 213 bp, Shigella sonnei
atgagtttttccgacaccaggagggcccagcaggatcacgttttcgctgcgctccacgaacgccagaccagccagttcccggacaaccttacggtcgatgcccggctggaaggtaaagtcgaactgctccagcgttttgacccacggcagacgagcctgcttcagcctggactccataccgcgctgatgcctgccgttccattcctgctgtag

SEQ ID NO: 485827 - DNA, 231 bp, Shigella sonnei
atggtagtgtccgctattgccagtacacctcaaaaggacgttgatttgcatcaggtcttgtggagccgctcgcgattaggtgaacgccaaaaagggcagggaattacaggtgctgatcatttctggtttggtcatacaccgttgcgacatcgcgtggatattggcaacctgcattatattgataccggtgctgtctttgggggcgaactgactcttgtgcaattgcaataa

SEQ ID NO: 485828 - DNA, 276 bp, Shigella sonnei
atggcgggttatttgtcctggttattcccccgttgtaaaatctctcctaaacttaacggtacggcaccacacttcggggatgaaatgttcgcgctggtactttttgtttgctacctggatggcggttgtgaagatattgttgtggatgtctacaacacggaacagcagtgtctttattctatgagcgatcaacggatccgccatggcggttgttttccgattgaggattttatagatggtttctggcgacctgcacaggagtacggtgatttttaa

SEQ ID NO: 485829 - DNA, 390 bp, Shigella sonnei
ttgaactataccaacaccgaaatgaaagaagcgatagcgcagcgtaaaccactggttaccaccgctgggccgcgtagtctgattttccgtggggccattaccggtgtagataccagcaaagaagggctgcaattctatgaagtggttcctgttgcattagtggttgcggggacgcaaatggctacaggccaccgtaccatggatactcgactctattttgaaggtgagctgattgatgcagcgactaataaaccggttatcaaagtcgttcgtcagggcgaaggtaaagacctgaataacgaaagtacgccaatggctttcgaaaatattaaacaagttattgatgacatggcgaccgatgccaccatgtttgacgttaacaaaaagtag

SEQ ID NO: 485830 - DNA, 252 bp, Shigella sonnei
atgcgtaccacatcatttgcgaaagttgcagctttatgcggcttgttggctctgtctggttgtgcctctaaaatcacccagccagataaatattctggttttttaaacaattactctgatttaaaagaaacaacctcagcaacaggtaaacctgttttacgttgggtagacccgagttttgatcaaagcaaatatgacagcatcgtctggaacccaatcacttattatccggtgccaaaaccttctacctag

SEQ ID NO: 485831 - DNA, 276 bp, Shigella sonnei; identical to SEQ ID NO: 484087

SEQ ID NO: 485832 - DNA, 183 bp, Shigella sonnei
atgaatgcatttttgcgttttctggatacagatatccagaacaacccgcaaaaaactcgtccattcaacattcaacattcaacattcaacattcaacattcaacattcaacattcaacaaggaaagaaacttgtcactggcatggacgtcaacattgatgatgagattggcgacgacgaataa

SEQ ID NO: 485833 - DNA, 342 bp, Shigella sonnei
atggattttccacaaagggttaatggttgggcgctatatgctcatccctgttttcaggaaacctacgacgctttagttgccgaagtcgagacattaaagggaaaagatcctgaaaattatcagagaaaagccgccacaaagttattggcggtagtccataaagtgattgaggagcatatcacggtcaatccatcatcaccggcattccgtcatggcaagtcgttaggctctgggaaaaataaagactggtcacgggtaaaatttggtgcaggtcgttatcgtctcttctttcgttatagtgaaaaagagaaagtcatcattctgggatggatgaacgggtaa

SEQ ID NO: 485834 - DNA, 522 bp, Shigella sonnei
atgaggactcacttccctgaatatgaaataatatccagcgcctctgcggaggaccttacattattacaattacgtcgttccggattagtcattgctgatttagccggtgaaagtgaagatccacgttctgtttgtgaacattattattctttaatctcacaatatcgggaaattcactgggttttcatggtgtcacgctcctggtattcccaggcagtagaattgctcatgtgccctacggcgacgttattgtctgatgttgaacccattgagaatctggtcaagaccgtacgttccggcaatacgcacgcagagcgtatcagcgccatgctgacctctccggcaatgaatgaaactcatgattttagctatcgctccgtcattctcactctttcagagcgcaaggtactgcggctattaggtaaaggatggggcatcaaccagatagcttcgttgcttaagaaaagtaataaaactatcagcgcccaaaaaaacagtgcgatgcgtcgactggcaagataa

SEQ ID NO: 485835 - DNA, 267 bp, Shigella sonnei; identical to SEQ ID NO: 11114

SEQ ID NO: 485836 - DNA, 663 bp, Shigella sonnei
atgtcaattgagcatattttaatcgggaaacatcatgggggttctgattactggagaactccatttttgttatttaagaacttacaccgtgaatttattttcagtctagatggtgctgcaactgagcatgacacgctgttaccacgattcaccaatgatataagccgtcaatcatgggttagtgaaaaggtcttctgtaacccgccgtacagcgatattccgtcgttcctcttaaaagcgtctgaagcggatttagtagctttcctgataccgcatagagccaacaccagctactggcttaggcacatttacagcaataaccactgtcatgaaatccgtattcttcatcgtgcagttaaataccttccaccagcaggccataacgggcttactattcgttcaccgtttcctagtgcagtcgttgtttttaaaaaagaaccacgtaagcacgaaattacacagacggtttgctgtggtgacacgctattaccgttaaccatcattaacagaggaggcttgagaggaagacccaccatttacccacctgagacgctcgacagcttcataaaactatacaggcaaggaaaacccattaagtacattgcagatgctctcagaatgcctctgagcacgtcatacaggattgctcaaaggttgagctaa

SEQ ID NO: 485837 - DNA, 261 bp, Shigella sonnei
atgaatcttgtgacactcaaaacgtggggaaaactcagatatccggataacccaccatcaatatcaacgctgagacgatgggcaaggaatggaaacatttatcctgcacctgaactacacgggaggagttacagggtggttccggaggctttctatatcaacccaaataaggttgataccgatataacacaccatcagcctaatgggcgacaagggagagacagtccgttaatgggtgatgctgccaacttactgatttag

SEQ ID NO: 485838 - DNA, 276 bp, Shigella sonnei; identical to SEQ ID NO: 484087

SEQ ID NO: 485839 - DNA, 312 bp, Shigella sonnei
atgcctggaacgggaaaaatgaaacatgtcagtttgactctgcaggttgagaacgacctgaaacatcagcttagtattggcgcattaaaacctggcgcacgcctgattactaaaaatctggcggagcaattaggtatgagtattacacctgtgcgtgaagcattattacgtctggtttcggtgaatgcgctttctgtcgcacctgcacaagcatttacagttccggaagtggggaaacgtcaattagacgaaatcaatcggatccgctacgaactggaattaatggcagttgctctggctgttgaaaactga

SEQ ID NO: 485840 - DNA, 774 bp, Shigella sonnei
atggtaaatggtccgcagtttggctggtatgcgcctgcgtatacttatggtattggtctgcacggtgctggttatgatgtcactggcaatacaccatttgcctatcctgggctggtttttggtcataatggtgtgatttcctggggatcaacggcaggtttcggcgatgatgtcgatatttttgctgaacggctgttggcagagaaaccaggctactacttgcataatggtaagtgggtgaaaatgttaagccgtgaggaaaccattacggtgaaaaatggtcaggcagagacctttactgtctggcgtacggtgcatggcaacattctccaaactgaccagacgacacaaacggcttacgctaaatcccgcgcatgggatggtaaagaggtggcgtctttgctggcctggactcatcagatgaaggccaaaaattggcaggagtggacacagcaggcagcgaaacaagcactgaccatcaactggtactatgctgatgtaaacggcaatattggttatgttcatactggtgcttatccagatcgtcaatcaggccatgatccgcgattacccgttcctggtacgggaaaatgggactggaaagggctattgccttttgaaatgaaccctaaggtgtataaccccctgtcgggatatattgctaactggaacaattctccccaaaaagattatcccgcttcggatctgtttgcctttttgtggggggggcccctattaagttgtcaagcatgttatgacccctgcggggtataa

SEQ ID NO: 485841 - DNA, 393 bp, Shigella sonnei
atgcatggtcttaacaaagacatcatctttccgttgcagatcttcgccctttcaaataacgtactttacaactttcccgaacaaggagttgtgcccgtgttgtatgttatttacgctcaagacaaagctgatagcctcgaaaaacgcctttccgttcgtccggcacatttagcacgtttacagttactgcatgatgaaggtcgtttgttgacagctggtccaatgccagcggtagacagtaacgatccaggggctgcgggatttactggctcaaccgttattgctgaatttgaatcgctggaagcagctcaggcctgggccgatgctgacccgtacgtagcggcaggtgtctatgaacacgtttcagtgaaaccatttaagaaagtgttctga

SEQ ID NO: 485842 - DNA, 492 bp, Shigella sonnei
gtgaaagcgcttgataagcaaatggtggcggcgcagaaagcagcggatgcatattggggaaaagatgcaaacggtaagcaaatgacccgcgaagaagcctttaaaaaaattcaccaacagcgtgatgagtttaataaacagaacgatagcgaggcgttcgcggttaaatatgacaaagaggtttatcaaccggcgattgcggcatgtcataaacagagtgaagagtgttatgaagtgccgattcagcagaaacgagatttcgatatcaacgaacaacggcgacagacttttctgcaatcacaaaaactcagccgtaaattgcaggatgactgggtaacgctcgaaaaagggcaatatccgttaacgatgaaagtttcagaaataaacagtaaaaaagtcgcgattttgatgaaaattgacgatatcaaccaagctaatgaacgctggaaaaaagataccgaacaactgcggcgcaatggggtgattaagtaa

SEQ ID NO: 485843 - DNA, 285 bp, Shigella sonnei
gtggagttcccgatccagggagagatggttgatattgtggcgcatggtgagttgggcggcgacttttcgttagtgcctgacagctacgtgacgatggggccgaaaagcatcatggcggcgaaaaacttgctgataattgtcagtggcgcaggtaaagcgcaggcactgaaaaatgtgctgcaaggtccggttaccgaagatgttccagcttccgtgttgcagctgcatccttcgctgatagtaatcgctgataaagccgctgccgcagaattagcgctcggttaa

SEQ ID NO: 485844 - DNA, 282 bp, Shigella sonnei
atgctgaaagagttggttgaacgcacgccaggttatcatggatggcaacaggaattctggcttgcgcattgtggcgatttctgtgcttttatcggctatgtgggctggaatgatataaaagatcgcctcgatgaatttgccaaccttgaagaagattgtgagaatttcggtattagaaattctgatctagctaaatgcctgcaaaagggtggtgattgtcagggttatctcttccgctgtctccactgcggcaagctgagactgtggggtgatttttcgtag

SEQ ID NO: 485845 - DNA, 348 bp, Shigella sonnei
atgaaaaccctgtcgcgacactcagaactggcgaaagcgttcgcatatgccctgaaccagtggccggcgctgacgtactatgcagatgatggctgggctgaggcggacaataacatcgctgaaaatgcgttgcggatggtcagtctgggccgcaaaaactacctgttcttcggttcggatcatggaggagagcggggagcgctgctgtacagcctgatcgggacgtgcaaactgaacggagtggagccagaaagctacctccgctatgtccttgacgtcatagccgactggccgataaaccgggtcggcgaactgctcccctggcgcgtagcactgccgactgaataa

SEQ ID NO: 485846 - DNA, 492 bp, Shigella sonnei
gtgcatgtcgatgtcgataccggtgtcggcctggaatttatccagtgcatcgtgcagcggttgcgggaactcatagttaccggtgtaggtcacgccgaaagtcggcaccacgccgatggtattttcgtcgcaggcttcaatcatgcgtttcgggtccataaacaactgaccggggcgcatagggatctcacgcagctccacatcccagtagcgggcgaatttatgccagcagatttgtaccggaccgcacaccaggtttggtttatccgttggtttgcctgcagcttccatacgcttgcgccaacgccatttcatcgccatcccgccgagcatacaggcctcggaagaaccaatggtgttggtgccaacggcctgaccatttttcggcgcaggcgcatgccacagatcggcaaccatatttacgcaacgcaggtcgatggctgcggattgcggatattcttctttgtcgatccagtttttgttaatggataa

SEQ ID NO: 485847 - DNA, 486 bp, Shigella sonnei
atgccactgctggataagctgcgtgagcagtacggggtcggaccgctatgcagcgaactgcatattgccccgtcaacgtattaccactgtcagcaacagcgacatcatccggataaacgcagtgcccgtgcgcagcgcgatgactggctgaagaaagagatacagcgcgtatacgatgaaaatcacaaggtatacggtgtgcgtaaagtctggcgtcagttgttacgggaaggtatcagagtggccagatgcactgtggcacgtctcatggcggttatgggacttgccggtgttctccggggtaaaaaggtccgtacgaccatcagccggaaagccgttgccgcaggcgaccgcgtaaaccgtcagttcgtggcagaacgacctgaccagctgtgggtggctgattttacttacgtcagcacatggcagggcttcgtctatgtggcgttcatcattgatgtgtttgccggatacatcgtgtggtga

SEQ ID NO: 485848 - DNA, 327 bp, Shigella sonnei
atgactaaaaatactcgtttttcccccgaagtccgtcaacgggcagtccgtatggttctggaaagtcagggcgaatatgactcacaatgggcgacaatttgttccattgctccaaagattggctgtacgccggagactctgcgtgtccgggttcgccagcatgagcgggataccgggggcggtgatggagggctcaccaccgctgaacgtcagcgtctgaaagagctggagcgtgaaaatcgtgaactgcgccgcagtaacgatatccttcgccaggcttccgcttattttgcgaaggcggagtttgaccgcctctggaaaaaatga

SEQ ID NO: 485849 - DNA, 612 bp, Shigella sonnei
atgccattctatttcaggaaggagtgtccgttaaactcaggctacctcacctggcaggaagtaaaaggcagcgacgatgcctggttttacaccgtttttcagcttagtggtcaggcaataatggagcaggatgagcgtcaggtgcagattggcgctggcgatattacgttactcgatgcctcacgcccctgttcgctttactggcaggagtcttctaaacagatttcattacttttgccacgcactctgctggaacaatattttccccatcaaaaacctgtctgcgcagaaagactggacgctgacttacccatggtgcaactcagtcatcgcctgttacaggagagcatgaataatccggcactttctgaaacagaaagtgaagctgcgctacaggcgatggtgtgtctgctgcgcccggtacttcatcagcgggaatctgttcaacctcgccgtgaacgtcagtttcaaaaagtggttacgttgatagacgataatattcgcgaagagatattacgcccggagtggatagccggagagacaggtatgtcagtacgtagtttgtaccgaatgtttgccgataaaggtttggtagtcgcgcaatatatttag

SEQ ID NO: 485850 - DNA, 216 bp, Shigella sonnei
atgaaatccatggacaaaatttcaacgggcattgcctacggcacctccgccggcagtgccggctactggtttttgcagtggttggatcaggtcagtccatcacagtgggctgcgattggtgtgctgggaagtctgcttctggggcttctgacttatctgacgaatctgtatttcaaaataagagaagataagcgtaaggctgcgagaggtgaataa

SEQ ID NO: 485851 - DNA, 303 bp, Shigella sonnei; identical to SEQ ID NO: 484410

SEQ ID NO: 485852 - DNA, 513 bp, Shigella sonnei
atgttccgcctcgaaattctggaggacattgcccgggataaagtcagaactctccattttgtggatgagatagaagtctacctggccttccagaccatgctcgcagagaaacttcagctctccactgccgtgaaggaaatgcgtttctatggcgtgtcgggagtgacagcaaatgacctccgcactgccgaagccatggtcagaagccgtgaagagaatgaatttacggactggttctccctctggggaccatggcatgctgtactgaagcgtacggaagctgaccgctgggcgctggcagaagagcagaaatatgagatgctggagaatgagtaccctcagagggtggctgaccggctgaaagcatcaggtctgagcggtgatgcggatgcggagagggaagccggtgcacaggtgatgcgtgagactgaacagcagatttaccgtcagctgactgacgaggtactggccctgcgattgtctgaaaacggctcacaactgcaccattcataa

SEQ ID NO: 485853 - DNA, 477 bp, Shigella sonnei
gtggcggacctgacgtatgttgccacacaggagggatggttgtacctcgctggcatcaaagatgtttatacgtgcgaaattgtcggctacgccatgggagagcgcatgacaaaagagctgacaggtaaagccctgtttatggcgctcaggagccagcgcccacctgccgggctaatccaccactctgatcgaggttcacagtactgcgcatacgattaccgggtcatacaggagcagtctggtctgaaaacatcaatgtcgcgtaaaggtaactgttacgacaacgctccgatggaaagcttctggggaacgctgaaaaatgagagcctgagccactatcgttttaataaccgggatgaagccatctcagtaattgcgtattccgctctattcgatcacggattggcatcgaagttcgatcagcgattcgcatccattcgatcaaccgggaacttaactttttctaccgctttttaa

SEQ ID NO: 485854 - DNA, 303 bp, Shigella sonnei
atgagcagaaaaacccaacgttactctaaagagttcaaagccgaagctgtcagaacggttcttgaaaatcaactttcgatcagtgaaggcgcttcccgattatctcttcctgaaggcactttaggacaatgggttaccgccgccagaaaagggctcggtactcctggttcccgcacggtggctgaactggaatctgaaattctgcaactacgtaaggcgttaaatgaagctcgccttgagcgagatatattaaaaaaagcaacagcgtattttgcacaggagtcgctgaaaaatacgcgttaa

SEQ ID NO: 485855 - DNA, 468 bp, Shigella sonnei; identical to SEQ ID NO: 19402

SEQ ID NO: 485856 - DNA, 303 bp, Shigella sonnei; identical to SEQ ID NO: 484410

SEQ ID NO: 485857 - DNA, 387 bp, Shigella sonnei
atggaaacgacattcgtgctggatgcactggagcaggcgttatgggcccgtcgaccgtccggcacggtccatcacagtgataaaggttctcagtatgtatcgctggcctacacacagcggcttaaggaagccggattactggcatcaacaggaagtacaggcgactcgtatgacaacgcgatggcggagagcatcaatggtctttacaaagcggaggtaatacaccgtaagagctggaaaaaccgtgcagaagtggaactggccatactcacgtgggtggactggtataacaatcgacgattgctggaaaggctgggccatactcctccggcagaagcagaaaaagcttattatgcttccatcggaaacgatgatctggcagcctga

SEQ ID NO: 485858 - DNA, 552 bp, Shigella sonnei
atggcgatacttggatattgcagggtgagtacagatgaccaatccatcactaaccagcaaatgcaaattgaagaggcagggtacaacattgctaaatggttcgctgatgaagctgtcagtggttctgtcaaagcttctttaagaaacggtttcagcagtttgttagcttatgcacgagaaggtgacaccgtagttgtggtagctgtagaccgtcttggacgtgacacaattgatgtgttatcaacggttaaagcgctacaggctaaaggtgtgacagttatcagccttagagaaggatttgacttatcaagcgctatgggtgaagcaatgttaggcattatgtcaacgttggcacagcttgaaagaagcttgatagcagagcgtagaaaggctggtattgaacgtgctaaagctgaaggggtacatatgggaagacctgtaaaagcttcttcagaggctgtacagatgcttatttcacaaggtaaaacgaggttgcagattcaggaagagctaggaatctctagagcaacttattacagacttgctaaataa

SEQ ID NO: 485859 - DNA, 570 bp, Shigella sonnei
atgtttgacacaaagcaaattagatactcaggtaaagatggtatctattttcaccttagagataatgtggaatcttttcttgccttaacagctactgaacagatggactatgactcaccgatgatggtgacaactcaggctatgcaatcggggcaaactatcactgataatgttcagagagcacctaagaccatctctattagcggtgttgtagtggttgattcgacgggttcagttctattaaccagacaggggcaacttgtagaaacctttatttctacggttgaacaatggcgagaccagaagcaaatcatcactattgtttgtagagatggaatagctatcactgatagtatcattactcagtttaaagcgagtaaagagcataccattggatttgcccctatatttccagacatctgttatcacttaacccattacaagcccgctgccgcagatattcccgtggcgagcgataacccagcgcactatgcggatgccattcgttataatgctcgaacgcctctgcaaggttctttgctgccgttaacccgtctggtttgggcatga

SEQ ID NO: 485860 - DNA, 498 bp, Shigella sonnei
atgtcgccatcattacgcaaggctgttgcagttgctattggtggcggggctgttgctatagcatctgtgttaatcactggcccaggtggtaacgatggtctggaaggtgtcagctacatactatacaaagatatcattggtgtatggactgtatgtcacggacacaccggaaaagacatcatgcttggtaaaacgtataccgaagcagaatgcaaagctctcctgaataaagaccttgccactgtcgccagacaaattaacccgtacatcaaagtcgatataccggaaacaacgcgcggcgctctttactcgttcgtttacaacgtgggcgctggcaatttcagaacatcgacgcttcttcgcaaaataaaccagggcgatatcaaaggcgcatgtgaccagctatgtcgctggacatatgctggcggtaagcaatggaaagggctgatgacccgtcgtgagattgagcgtgaagtctgtttgtgggggcagcaatga

SEQ ID NO: 485861 - DNA, 462 bp, Shigella sonnei
gtgctgatttaccgggaagtaaaatggcgccatttacccaaactgattctggagtcggttgttaccacttcgattgtattactgttgatcggtttttccgtgggcatgtcctgggcaatgactaatgctgatattccttatatgatcagcgacgcattgatggggatttctgataacccactgatcatattgctgctgattaatatcgtcttattaattgtcggcatctttatggacatgacaccggctgtactaatctttacaccgatcttcttgccgattgcacaagagctgggaatggacccagtacatttcggtattatgatggtggccaacctttgtattgggctgttaacaccgccggtgggtagtgcgctatttgttggttgttctatctcgggtgtgaagattcaacatttaatcaaaccattgctgccattttatgctagcattgctaaatag

SEQ ID NO: 485862 - DNA, 525 bp, Shigella sonnei
atggccgcaggtggcgcggagtccgtcgctgtgtacgttaacgacgtcaaaggcggttcgaaatcgttcgttaaagtgatcatcctcgccggaatttttatcggcgtactgtattccgtctcctcggtgctgattaacgtcttcgtcagcagcaaagagttgaaatttaccggcggatcggtgcaggtattccacggcatggcggcgtattttggtctaccggaagcgttgatgaatcgctttgtcggtctggtgtcctttaccgcgatgttcggttccctgctgatgtggaccgcaacgccggtgaaaattttcttctccgaaatcccggaaggcatctttggtaagaaaaccgtcgaactgaacgaaaacggcgttccggcgcgcgcagcgtggatccagttcctgatcgtcatcccgctgatgattatcccgatgctcggttccaataccgtgcaggatctgatgaatactattattaatatgaccgccgcagcgggtgatgctgccaacttactgatttag

SEQ ID NO: 485863 - DNA, 459 bp, Shigella sonnei
gtgagtgcggagagtgaggcatggcttgcgcagtgcgggctgacggtggagcagatggaaagccagatggaggcggaatacatcccggagcggaggctgcatctttaccactgtgaccaccggggactgccgcaggcgctcatcagcccggaaggggaaacggcgtggcgcggggagtatgacgagtgggggaaccagcttaatgaggagaacccgcatcacctgtaccagccgtaccgtttgccggggcagcagtatgatgaggagtcgggactgtattacaaccgtcaccggtactacgatccgttgcaggggcggtatatcacccaggatccgatagggttgaaggggggaataaatctatacacgtatccactggcaccaatacgttacaccactggggttagaacgagttataagtgtatatgggcctcccgctccagaccgggcaggtgctga

SEQ ID NO: 485864 - DNA, 456 bp, Shigella sonnei; identical to SEQ ID NO: 463414

SEQ ID NO: 485865 - DNA, 330 bp, Shigella sonnei; identical to SEQ ID NO: 461591

SEQ ID NO: 485866 - DNA, 303 bp, Shigella sonnei; identical to SEQ ID NO: 484410

SEQ ID NO: 485867 - DNA, 450 bp, Shigella sonnei
gtggcggacctgacgtatgttgccacacaggagggatggttgtacctcgctggcatcaaagatgtttatacgtgcgaaattgtcggctacgccatgggagagcacatgacaaaagagctgacaggtaaagccctgtttatggcgctcaggagccagcgcccacctgccgggctaatccatcactctgatcgaggttcacagtactgcgcatacgattaccggatcatacaggagcagtttggtctgaaaacatcaatgtcgcgtaaaggtaactgttacgacaacgctccgatggaaagcttctggggaacgctgaaaaatgagagcctgagccactatcgttttaataaccgggatgaagccatctcagtaatacgggaatacattgagattttctacaatcgtcagcgtcgtcactctcgtctggggaatatctcccataagcgctaa

SEQ ID NO: 485868 - DNA, 240 bp, Shigella sonnei
atgaacgttttaagacacgttaatgcgattaacatgggagtgtgcattctaattttggttattggatgtgcaaatgctaaagttcttaaacgatgtatattacccgctcctgatggtggcgtagaaaaactatcaaaacccaacttacatggagtaattaaaaaagttgatttgaacacaaatgaagcggaaattaaaataaaagagggtgcccctattaagttgtcaagcatgttatga

SEQ ID NO: 485869 - DNA, 348 bp, Shigella sonnei
atgatcccgttaccttccgggatcaaaatttggctggttgccggtatcaccgatatgagaaatggcttcaacggcctggctgcgaaagtacagacggcgctgaaagacgatcccatgtccggccatgttttcattttccggggccgcagcggcagtcaggttaaactgctgtggtccaccagtgacggactgtgcctcctgaccaaacggctggagcgtgggcgcttcgcctggccgtcagcccgtgatggcaaagtgttccttacacaggcgcagctggcgatgctgctggaaggtatcgactggcgacagcctaagcggctgctgacctccctgaccatgctgtaa

SEQ ID NO: 485870 - DNA, 366 bp, Shigella sonnei
atgagcagaaaaacccaacgttactctaaagagttcaaagccgaagctgtcagaacggttcctgaaaatcaactttcgatcagtgaaggcgcttcccgattatctcttcctgaaggcactttaggacaatgggttaccgccgccagaaaagggctcggtactcctggttcccgcacggtggctgaactggaatctgaaattctgcaactgcgtaaggcgttaaatgaagctcgccttgagcgagatatattaaaaaaagcaacagcgtattttgcacaggagtcgggtaatgactccaacttattgatagtgttttatgttcagataatgcccgatgactttgtcatgcagctccaccgattttga

SEQ ID NO: 485871 - DNA, 210 bp, Shigella sonnei
ttgcgcatacaaccgggcagtgatgtgattgtctgcgctgaaatggacgaacagtggggctacgtcggtgctaaatcacgtcagcgctggctgttttacgcgtatgacaggatacggaggacggttgtggcgcacgtcttcggtgaacgcactctggccacactggagcgtcttctgagcctgctgtcggcctttgaggtcgtggtatag

SEQ ID NO: 485872 - DNA, 441 bp, Shigella sonnei; identical to SEQ ID NO: 478325

SEQ ID NO: 485873 - DNA, 378 bp, Shigella sonnei
atgagcgatatgtcgcatggggtcgattcactaaccgatattagttacagggtacgagcgttctttgatgaggtgacattagcttatcgttcactaaatgacactcaaaaagctgtagctgatggtcttgcaaatggcctgttaagtgcattaaaggggcttgctggtatagtcgctgtacggtctgggattggtgctgtaggtggtatctggaacttaattagggccatttccacgcttggaaatgtggcaaatacagcagcaggaagaatcaattcacgttctactggtagtgttgaaggtggaaaaagtaggctatctgtagctgatgcaattaccagagtaatgattgtcggtatgacaactgaggtagcctga

SEQ ID NO: 485874 - DNA, 336 bp, Shigella sonnei
gtgtggctgacgcacgacccggaatacccggagaatttacctgccgcgccgctggtgcgctatggctggacgccacgcggcgaactggcggtggtgtatgaccgtagtggcaaacaggtgcgcagctttacttacgatgataaataccggggccggatggtggcgcaccgtcacacgggccggccggaaatccgttaccgttacgacagcgacgggcgggtgacagaacagcttaacccggcaggcttaagctacacgtatcagtatgagaaggaccgcatcaccatcaccgacagcctgaaccgccgtgaagtgctgcactgtcagcgccagtga

SEQ ID NO: 485875 - DNA, 363 bp, Shigella sonnei
atgcagacgaaacaacgtcttgatgtaccgctgagtctgaaatctgtcagtgactccggtgagtttgaagggtatggctccgtctttggtgtaaaggacagccacgatgatgtggtgatgtccggggcatttgctgcttccctgcgggcgtggagtgacagaaaagcgttacctgcgctgctctggcagcaccgcatggatgaacccatcggtgtttacaccgaaatgaaggaagacgatgtcgggctttacgtcaggggacggttgcttattgatgatgatcccctcgcaaaacgtgcacatgcacacatgaaggccggttcgttaaccggcctttctattgggtacgtcctgaaagactga

SEQ ID NO: 485876 - DNA, 276 bp, Shigella sonnei
atggaaaaaatatcaacaggcattgcctacggcacctccgccggcagtgccggctactggtttttgcagtggttggatcaggtcagtccatcacagtgggctgcgattggtgtgctgggaagtctgcttctggggcttctgacttatctgacgaatctgtatttcaaaataagagaagataagcgtaagtggatttgcccctatatttccagacatctgttatcacttaacccattacaagcccgctgccgcagatattcccgtggcgagcgataa

SEQ ID NO: 485877 - DNA, 177 bp, Shigella sonnei
atgacgcatgggtatgttgatagtcatattattgatcaggctttacgcttgcgtttaaaagatgaaaccagtgtgattctttctgatctctatctgcaaatattgcagtacattgaaatgcataagactacactaacggatatcattattaatgacagggaatccgtgctctcttag

SEQ ID NO: 485878 - DNA, 252 bp, Shigella sonnei
atgtctattgaagttctgttgcaaaaaaacagtgaattgcagattgtcctgaaaacggatgattaccgcataactggatttgcccctatatttccagacatctgttatcacttaacccattacaagcccgctgccgcagatattcccgtggcgagcgataacccagcgcactatgcggatgccattcgttataatgctcgaacgcctctgcaaggttctttgctgccgttaacccgtctggtttgggcatga

SEQ ID NO: 485879 - DNA, 228 bp, Shigella sonnei
atggcgatggatgcgctggcatcccagcagatgtctttgtggttgatgaatggcggcgactggtttattgcgctggcagataatcaacagaaacaagcgaaaacggcgctggaaaaatgtcagcatttgccctttattcttgaagtacacagtcgtaccggcaaacatgttattgctcatgccgattatccagatgatgtttatgaatggcaaaatgaggtagcctga

SEQ ID NO: 485880 - DNA, 225 bp, Shigella sonnei
atgctgttggtgactaaaggtgcagaaggggtggtggtctgttatcgaggacaagttcaccattttgctggaatgtctgtgaattgtgtcgatagcacgggggcgggagatgcgttcgttgccgggttactcacaggtctgtcctctacgggattatctacagatgagagagaaatgcgacgaattatcgatctcgctcaacgttgcggagcgcttgcagggtga

SEQ ID NO: 485881 - DNA, 303 bp, Shigella sonnei
atgacaaaagatcctggtgcggcctgtactgagcaattcaatattttagggagctttttcactacggatattttgagtgattatagccatctggatatgggtaatggactgctattgaagatatttcataaagatggaacagcaacggaatttaaccgcttctcacaatttgcttctttttcatcgtctagtgcaccttcggtcaccgcaccattcagggcagaacttagtgcgaacccggcagagactgttgttgagggaccgtttagtaaagacgtaatcctcaaaatcacctataactaa

SEQ ID NO: 485882 - DNA, 261 bp, Shigella sonnei
atggctgccctgcccgtaagttggatccagatgctggcaggtctggcgctgttgagtaccattggcggcagtttgtatcaggcgctgcataatgagcgtgagcgtgagcgtgagcgtgagcgcgacgcggcggtggtggcatttctggtaacggcaagtggattgacgctggtcgggattggttctgcgttctggggattaattgccggaggcgtttgttacgtggtgttgaatttaatcgctgacagaaaccgatattga

SEQ ID NO: 485883 - DNA, 141 bp, Shigella sonnei
atgaccagcatatttatcactatgatgctgatctggttgctgctttccgtgacctcggtgctgaccctgaaacagtacgcgcaaaaaaacctggcactgacagcagcaacaattgtcagcgccagtgatataagacggtaa

SEQ ID NO: 485884 - DNA, 246 bp, Shigella sonnei
atgaaccaggctggcgtgcagaatggtgatctgctggtagtggacagggccgaaaaaccacaacacggggacatcgttatcgctgagatcgacggtgagttcaccgtcaaacgactgctgttgcgcccacgcccggcactggagccggtttcagacagcccggagttccgcacactgtatccggaaaacatctgtatttttggtgttgtcactcacgtgatacacaggacgcgggagttacgctga

SEQ ID NO: 485885 - DNA, 1275 bp, Shigella sonnei; identical to SEQ ID NO: 475024

SEQ ID NO: 485886 - DNA, 417 bp, Shigella sonnei; identical to SEQ ID NO: 475025

SEQ ID NO: 485887 - DNA, 981 bp, Shigella sonnei; identical to SEQ ID NO: 475026

SEQ ID NO: 485888 - DNA, 309 bp, Shigella sonnei; identical to SEQ ID NO: 475027

SEQ ID NO: 485889 - DNA, 645 bp, Shigella sonnei; identical to SEQ ID NO: 8540

SEQ ID NO: 485890 - DNA, 780 bp, Shigella sonnei
atgcagcacctgccggcaccgatccaccatgcccgggatgctgctcagcttcctgttgccatcgattatccggcagcgctggcactccgccagatgtcgatggttcatgatgaactgccaaaatacctgctggcccctgaagtgagcgccctgctccattacgtgccggatctgcgccgcaaaatgctgctggccacactgtggaacaccggtgcgcgcattaatgaagcactggcgctgacgcggggggatttttcgcttgcgcctccgtatccgtttgtgcagctggccactctgaagcagcggacagaaaaagccgccaggacggcaggaaggatgcccgtcggtcagcagactcaccgtctggttccgctctccgacgcctggtacgtcagccagctgcagacgatggtggccacactgaaaatccccatggaacggcgtaataaacgaacaggcaggacagagaaagcgcggatctgggaagtgacggacagaacggtcaggacctggattggggaggcggttgccgccgctgccgctgatggtgtgacgttctctgtcccggtcacgccacatacgttccgccattcctatgcgatgcatatgctgtatgccggtataccgctgaaggtcctgcagagtctgatggggcataagtccatcagctcaacggaggtctacacgaaggtgtttgcactggatgtggctgcacggcaccgggtgcagttttcgatgcctgagtccgatgcggtgtctatgctcaaaagaattccataa

SEQ ID NO: 485891 - DNA, 414 bp, Shigella sonnei; identical to SEQ ID NO: 80741

SEQ ID NO: 485892 - DNA, 864 bp, Shigella sonnei; identical to SEQ ID NO: 12983

SEQ ID NO: 485893 - DNA, 1500 bp, Shigella sonnei; identical to SEQ ID NO: 12982

SEQ ID NO: 485894 - DNA, 255 bp, Shigella sonnei; identical to SEQ ID NO: 12981

SEQ ID NO: 485895 - DNA, 591 bp, Shigella sonnei; identical to SEQ ID NO: 467964

SEQ ID NO: 485896 - DNA, 1053 bp, Shigella sonnei; identical to SEQ ID NO: 12945

SEQ ID NO: 485897 - DNA, 603 bp, Shigella sonnei
atgggaaaatatcaggaagaaaggaaaactccggtcattgtggtgaaaaaacgtcgtactttttcgccaccgtccttatccgaaaaaacagatattatcgcacctgtatttactgaacagacggcagaatcagcccccgccggaataaattcatctgccgtcgaaacacatatccccgaagcgccagccaggaagaagaaaaagaaaagacaccgttttccacgtccctcccactggacccgtgagtatactcacgagtgcgtggaaaaaataaaggccctgtttcctcatcttcgtgctgaaggtggtggatttattcccctgaaaattggcataaacaatgatatttcggcatttctggcagaacacccggagacagaactgaccatggacgaatggctctgtgcagtgtcctgcatcacatcccgccgcgtatatctgcagcggacagctgtcgccggcgtcccacgttatggcctggatggtcaccccaaagggcaggtctcagactctgaagcacagagtgccggtcgcagactggcgacattagaacaaaagtggctcaggatgcaggcacagcaggagaatatttctgggcaataa

SEQ ID NO: 485898 - DNA, 156 bp, Shigella sonnei; identical to SEQ ID NO: 12946

SEQ ID NO: 485899 - DNA, 267 bp, Shigella sonnei; identical to SEQ ID NO: 12947

SEQ ID NO: 485900 - DNA, 276 bp, Shigella sonnei
atgaattacgatgaaataacgaaaattaccgctgaacgtattagcgactacatgaccgaagcagttaatacagactctatagccgttgcggaaatgtttcataacgctgcctggggagtgcgaacattgtggtttgaactcgtcacaaaaatagatatacataaaaagaacaggtatgcgagttatgatcttagaagggaaatcgaaatgcagcatgaagagtttcagaaaatgacagagcgcgagaaagtgcctttattgaaatcgccagaataa

SEQ ID NO: 485901 - DNA, 276 bp, Shigella sonnei; identical to SEQ ID NO: 12948

SEQ ID NO: 485902 - DNA, 279 bp, Shigella sonnei; identical to SEQ ID NO: 12949

SEQ ID NO: 485903 - DNA, 879 bp, Shigella sonnei; identical to SEQ ID NO: 8213

SEQ ID NO: 485904 - DNA, 642 bp, Shigella sonnei; identical to SEQ ID NO: 8214

SEQ ID NO: 485905 - DNA, 663 bp, Shigella sonnei; identical to SEQ ID NO: 8215

SEQ ID NO: 485906 - DNA, 621 bp, Shigella sonnei; identical to SEQ ID NO: 8216

SEQ ID NO: 485907 - DNA, 1695 bp, Shigella sonnei; identical to SEQ ID NO: 8217

SEQ ID NO: 485908 - DNA, 243 bp, Shigella sonnei; identical to SEQ ID NO: 8218

SEQ ID NO: 485909 - DNA, 1071 bp, Shigella sonnei; identical to SEQ ID NO: 8219

SEQ ID NO: 485910 - DNA, 438 bp, Shigella sonnei; identical to SEQ ID NO: 8220

SEQ ID NO: 485911 - DNA, 1620 bp, Shigella sonnei; identical to SEQ ID NO: 8221

SEQ ID NO: 485912 - DNA, 1296 bp, Shigella sonnei; identical to SEQ ID NO: 8222

SEQ ID NO: 485913 - DNA, 459 bp, Shigella sonnei; identical to SEQ ID NO: 8223

SEQ ID NO: 485914 - DNA, 1509 bp, Shigella sonnei; identical to SEQ ID NO: 8224

SEQ ID NO: 485915 - DNA, 1095 bp, Shigella sonnei; identical to SEQ ID NO: 8225

SEQ ID NO: 485916 - DNA, 537 bp, Shigella sonnei; identical to SEQ ID NO: 8226

SEQ ID NO: 485917 - DNA, 486 bp, Shigella sonnei; identical to SEQ ID NO: 8227

SEQ ID NO: 485918 - DNA, 627 bp, Shigella sonnei; identical to SEQ ID NO: 8228

SEQ ID NO: 485919 - DNA, 1362 bp, Shigella sonnei; identical to SEQ ID NO: 8229

SEQ ID NO: 485920 - DNA, 822 bp, Shigella sonnei; identical to SEQ ID NO: 8230

SEQ ID NO: 485921 - DNA, 1203 bp, Shigella sonnei; identical to SEQ ID NO: 8231

SEQ ID NO: 485922 - DNA, 459 bp, Shigella sonnei; identical to SEQ ID NO: 8232

SEQ ID NO: 485923 - DNA, 837 bp, Shigella sonnei; identical to SEQ ID NO: 8233

SEQ ID NO: 485924 - DNA, 1149 bp, Shigella sonnei; identical to SEQ ID NO: 8234

SEQ ID NO: 485925 - DNA, 291 bp, Shigella sonnei; identical to SEQ ID NO: 8235

SEQ ID NO: 485926 - DNA, 4062 bp, Shigella sonnei; identical to SEQ ID NO: 8236

SEQ ID NO: 485927 - DNA, 351 bp, Shigella sonnei; identical to SEQ ID NO: 8237

SEQ ID NO: 485928 - DNA, 696 bp, Shigella sonnei; identical to SEQ ID NO: 8238

SEQ ID NO: 485929 - DNA, 975 bp, Shigella sonnei; identical to SEQ ID NO: 8239

SEQ ID NO: 485930 - DNA, 1332 bp, Shigella sonnei; identical to SEQ ID NO: 8240

SEQ ID NO: 485931 - DNA, 714 bp, Shigella sonnei; identical to SEQ ID NO: 8241

SEQ ID NO: 485932 - DNA, 531 bp, Shigella sonnei; identical to SEQ ID NO: 8242

SEQ ID NO: 485933 - DNA, 399 bp, Shigella sonnei; identical to SEQ ID NO: 8243

SEQ ID NO: 485934 - DNA, 252 bp, Shigella sonnei; identical to SEQ ID NO: 8244

SEQ ID NO: 485935 - DNA, 627 bp, Shigella sonnei; identical to SEQ ID NO: 8245

SEQ ID NO: 485936 - DNA, 3045 bp, Shigella sonnei; identical to SEQ ID NO: 8309

SEQ ID NO: 485937 - DNA, 621 bp, Shigella sonnei; identical to SEQ ID NO: 8308

SEQ ID NO: 485938 - DNA, 1206 bp, Shigella sonnei; identical to SEQ ID NO: 8307

SEQ ID NO: 485939 - DNA, 570 bp, Shigella sonnei; identical to SEQ ID NO: 8306

SEQ ID NO: 485940 - DNA, 2166 bp, Shigella sonnei; identical to SEQ ID NO: 8305

SEQ ID NO: 485941 - DNA, 654 bp, Shigella sonnei; identical to SEQ ID NO: 8304

SEQ ID NO: 485942 - DNA, 1587 bp, Shigella sonnei; identical to SEQ ID NO: 8303

SEQ ID NO: 485943 - DNA, 153 bp, Shigella sonnei; identical to SEQ ID NO: 8302

SEQ ID NO: 485944 - DNA, 243 bp, Shigella sonnei; identical to SEQ ID NO: 236403

SEQ ID NO: 485945 - DNA, 369 bp, Shigella sonnei; identical to SEQ ID NO: 236404

SEQ ID NO: 485946 - DNA, 216 bp, Shigella sonnei; identical to SEQ ID NO: 8252

SEQ ID NO: 485947 - DNA, 252 bp, Shigella sonnei; identical to SEQ ID NO: 8253

SEQ ID NO: 485948 - DNA, 681 bp, Shigella sonnei; identical to SEQ ID NO: 8254

SEQ ID NO: 485949 - DNA, 468 bp, Shigella sonnei; identical to SEQ ID NO: 8255

SEQ ID NO: 485950 - DNA, 177 bp, Shigella sonnei; identical to SEQ ID NO: 8256

SEQ ID NO: 485951 - DNA, 1344 bp, Shigella sonnei; identical to SEQ ID NO: 8257

SEQ ID NO: 485952 - DNA, 1125 bp, Shigella sonnei; identical to SEQ ID NO: 8258

SEQ ID NO: 485953 - DNA, 2304 bp, Shigella sonnei; identical to SEQ ID NO: 8259

SEQ ID NO: 485954 - DNA, 294 bp, Shigella sonnei; identical to SEQ ID NO: 8260

SEQ ID NO: 485955 - DNA, 249 bp, Shigella sonnei; identical to SEQ ID NO: 15491

SEQ ID NO: 485956 - DNA, 396 bp, Shigella sonnei; identical to SEQ ID NO: 8262

SEQ ID NO: 485957 - DNA, 2712 bp, Shigella sonnei
atgaatgccattattccgcacaaaagacgtgacggcaggtcttcctttgaagacctgattgcgtacacgtctgtgcgggatgatgtgcaggaaaatgagctcacagaagacagcgaaatcaagagtgatgtccctcaccgcaaccgtttcagacggcttgttgattatgcaacacgcctgcgtaacgaaaaatttgtctccctgattgatgtgatgaaagacggcagtcagtgggtaaatttctatggcgtaacctgtttccataactgcaattcactggaaacagctgctgaagagatgcagtacaaggcggacaaagctgttttttcccgtaatgatacagaccccgttttccactacattctttcctggcctgcgcatgaaagcccgcgtcctgagcagctttttgactgtgtgcgtcacacactgaaatctcttgaactctcaaaacatcagtacgtggctgccattcatacggacacggataatctgcatgtgcatgttgccgtgaatcgtgtacatcctgaaactggttatattaactggctttcctggagccaggaaaaactcagccgtgcatgtcgtgaacttgaacttaagcacggattcgcgcctgataatggctgctttgtgcatgcacccggcaaccgtattgtgcgcaaaacagcgctggtacgtgagcgccgtaatgcctggcgacgcgggaaaaagcagacgttcagggaatatattgcgcagatgtcgattgccgggctgcgtgaagagcccgcacaagactggttgtctttgcataaacggctggccagtgatggtctgtatatcacgatgcaggaaggggaactggtggtgaaggatggctgggacagagcgcgggaaggtgttgcactcagttcgttcggaccgtcatggacagctgaaaaactggggcggaaactgggggaatatcagcctgtaccgacagatattttcagtcaggtggggacacccggtcgttatgatccggaagccataaacgttgatatccggccggaaaaagtggcagaaacggagagtctgaaacagtacgcctgccgttattttgccgaacgcttaccggaaatggcgagaaatggtgagctggaaagttgcctggatgtgcacagaactctggcaaaggctggattatggatggggatccagcacgggcatctggtactgcatgatggatttgataaacaacagacaccagtacgtgcagacagtgtgtggccgttaatgacgctggattatatgcaggatctggatggtggatggcagcctgtaccgaaggatatttttactcaggttatacccggagaacgattccggggacgtaatcttggtactcaggctgtcagtgattacgaatggtatcgtatgcggatggggacaggtccacagggagcaataaagcgcgaactgttttctgataaggaaagtctgtgggggtacacgactgttcagtgtgagtcgttgattgaagatatgatcgcgggcgggaatttcagctggcaggcgtgccatgagatgtttgcgcgtaaagggcttatgttgcagaaacagcatcatggtcttgtgattgtggatgcgtttaatcatgagctcacaccagtgaaggccagcagtatccacccggatttgacgttatccagggctgagctgcaggcagggccatttgagattgcaggtgcagatatatttgaacgggtgaagcctgaatgtcgctacaatccggaacttgctgccagcgatgaagtggaacccggcttccggcgcgatcctgtactgcgtcgtgaacgccgtgaagcccgtgcagctgcgcgggaagatttgcgcgcgcgttatcttgcatggaaggagcactggcgtaaacccgacttacgttacggagaacggttacgggaaattcatgctgcctgccgtcggcgcaaggcgtatatccgtgtgcagttccgggatccacaattgcgtaagctgcattaccatattgcggaagtgcagcgtatgcaggcgctgatcaggctgaaggagagtgtgaaggaagagcggttgtcactgattgcggagggtaagtggtatcctttgtcctaccggcagtgggtggagcaacaggcggtacagggagacagagctgcattatcacagttacgtggctgggattatcgtgatcgtcgcaaagacaagcgacgaacaacgaatgccgaccgctgcgtgattctctgtgaaccgggaggaactccactttatgaagacactggcgttctcgaagcccgtctgcagaaagatggcagtgtgcgttttcgtgatcggaggaatggcgagttagtctgtgtggattatggggaccgtgtggtgttctaccatcatcaggacagaaatgaactggtggataagctgaatctgattgctcctgtattgtttgatcgtgagccaggaatgggttttgaaccggaaggctcatatcaacagtttaatgatgtatttgcggaaatggtggcctggcataatgcagctggaataaccggaaatggacactttgtaatcagccgcccggatgtggatttacatcgtcagcgtagtgaacagtactaccacgaatatatcaggcaacagaaaagcatatccggggggcatggcgcatcttatgctccagttcaggataatgagtggacgccaccatcacctggaatgtag

SEQ ID NO: 485958 - DNA, 333 bp, Shigella sonnei; identical to SEQ ID NO: 8264

SEQ ID NO: 485959 - DNA, 336 bp, Shigella sonnei
atggcttctaaaaaattttactcagatgatgacatccagctggcaaaagctgccttatcggaattgccggatctcaccgctcaacggaaaacattgcgtgattttcttgatgccattcgtgatgacattattgtcctggtaaagacaaagggttatacactggcagatgttcgtgacacgctcaaaaatgcagggtatgaagtaggagagaaggcacttcgtgacattattcgggaagcagaatcgaaaaaaccatcccgccgttcttcctctaaaacagcacctaaaaagacagattcaggcaggaaagatggcatcgatatgaacaacaattga

SEQ ID NO: 485960 - DNA, 849 bp, Shigella sonnei
atgaatcagactttacccactgctgacctgaatactgccggcacgacagacattattccgtctgtggctatcgaccgcatcatcgcgcagcgtaacgaaggtattgcactgttcatgcaggcgatggaatgcctggcgacagcgcgcaggattctactcgatgcttccggtgacatttttctctacgggtttgaagactgtgtgactgactccgttcgatgcatggataaaccggaagaagcaaaaaagaatatcactcgtcttgccgaccggaaaatctgggatcgcctgatgacggatactggcatgtacaccttcatgagttcatgccagcgtgatgagtggaacagccagctgatgagcgacacctgtcctgaaatcaccctggacaatgtactggcaacattccgccatcttaatgccagcaagatgcagacgtttgaacaggggctgattgatgtctaccggaaattgtcatgggattacagaaccaataatccctgccgcctgggtaagaaaatcattattgaaaatctgctgtaccgctggagtaatgggcgtgtgacgctggactgcagcggacgggaggcactggatgacctggtacgtccgttttatctgctggaggggcgcaacgttcctgacttcaggaacagcatcggggcgcagtatggtgaatttatcgggaacggcgacaatgtcggtaagctgttagaaggggaatattttacggtgcgtggctaccagaaagggaccgtacacattgtctttaagcgttctgaccttgttgaaaaactgaatgatattattgcacggcattatccaggtgcattgccgccacgagtctga

SEQ ID NO: 485961 - DNA, 252 bp, Shigella sonnei; identical to SEQ ID NO: 79083

SEQ ID NO: 485962 - DNA, 183 bp, Shigella sonnei
atgacgattgcagaacgtcttatacagaaaggtttcgacgagggttttaaacaaggggctctagaagtggcgcgggaaatagcctgccggcttcgggatataggctggccgccggaacggattcaggaggtcacgggactttccggtgaagaactgaaaaagctgtttcctgatgagcagtag

SEQ ID NO: 485963 - DNA, 891 bp, Shigella sonnei
gtgagtaagaagaaaaacaccacaacgcccacgccgcatgatgccgcgttccggtcgttcctggcgaatcccgacgtcgccagagattttctggaactgcatcttcctgcggagtaccggcagttgtgcgacctgtccacgctgaagctggaacccgccacctttgtagagccggacctgcatcagtacgccagcgatatcctctggagcgtgaaaaccaccgggggtgaagacggctatgtttatacgctcatcgagcaccagagcaccgaaaatctgtacatgccttttcgcatgttacgttacagtgtggcggcgatgcagagacatctggagcagcacaaaacattgccactggtcattccggtgctgttctatcacggtgagcgcagcccgtacccgtacagcatgaactggctggactgttttgagaatccggcacttgcggctaaaatatacacaaagccgtttccgctggttgatatcactgtcgttgatgacaatgaaatcatgaaccatcgccggatggccgcactgacgctgctgatgaagcatatccgccatcgtgacatgatggagctgctggacaaactcccgcaggtcatggtggaaatttcagacgagcaggtgcgtgttctgattcattacatcgttaacgcaggggactctgtatcaccggaatttatgcgggcgctggctgagcgtctgccgcagcatgaggataaactgatgactatcgcagaacgtcttgagcaaaaaggtcgccaggaaggagcgcttgaaaaagccctggctattgcgtgccagcttcagaaaatggggatgacgccggagcagattaagcaggctaccggactttccgatgacgaactgaagaaaatcactcactga

SEQ ID NO: 485964 - DNA, 390 bp, Shigella sonnei; identical to SEQ ID NO: 8270

SEQ ID NO: 485965 - DNA, 267 bp, Shigella sonnei; identical to SEQ ID NO: 236348

SEQ ID NO: 485966 - DNA, 435 bp, Shigella sonnei
atgacagtcagcagcacgatttccgttttttgccgcgacggggtgttccgtaccgtttactgccacctgcacggtgagccgacctggaacggtcgcatcctgcatacccactatgccaccggtcagcaggccgaagccctggttgaacacggtgatatccgttgcctcggtccccgttgcgacaaacccgccgggcatacgcttcagaacccggtggacggtgtgacggcttattacggacgtgacagtggtttccggatggacagtgaggcgcgtgagtaccgttctttcagggaggctattgccactgaaagcactgaagaggtgcgcttccattatgtgttcatcgacggctactggaaggtgatgtaccgcacgccggaaggctggaagatgaaagcgctcgcgctggcactgcgtcgctgtccggaatga

SEQ ID NO: 485967 - DNA, 501 bp, Shigella sonnei; identical to SEQ ID NO: 236350

SEQ ID NO: 485968 - DNA, 597 bp, Shigella sonnei; identical to SEQ ID NO: 17091

SEQ ID NO: 485969 - DNA, 720 bp, Shigella sonnei
atgagcgcacgttcacgggcactgatccccctcagcgcagaacaacaggccgccatgcaggcggtggctgtcacagaacaacgtcgtcgtcagggacgcacactttcagcatggccttatgccaccgctttctttcgctgcctgaatggcagtcgccggatttcgctgaccgatctccgcttttttgcccctgcgctgacgaaggaggaatttcatggcaaccgtctcctgtggctggctgccgtggataaactgattgaaagttttggggaagtctgtgttcttcccctgccatccgatgcggggcaccgtctgttcccgtccgtgccttttcgtgaaggtgagcgtcgtcgtcagaaaaccacgctgacagagcagaaatacagccgccagcgggaacgtgaggcagaacgacgggaactggaataccagacatgttttgctcaggcgcagattgaccttgcgtttcatactcccgccacggtcggaagctggttgtcccgctggtctggtgttgttgaggagcatgatctggaaacgattttctgggggtggtgcgggcgttttccatcactgtcatcatttgaccggtttttctggcaggaggaaccactctggcggttgatttttgaagccggtgaggccggtcgtggtgcaccggtacaggtacgtgcacttgagcagtggatgatcccgaacaagctggagaacgtaatatga

SEQ ID NO: 485970 - DNA, 438 bp, Shigella sonnei; identical to SEQ ID NO: 8276

SEQ ID NO: 485971 - DNA, 1959 bp, Shigella sonnei
atgcctgtaacgaagtgtgaaccagaaaccacccgcaaagcaagccgtaaatctgtaaaaacgcaggaaactgtcctgtctgccctgctggcgcagacggaggaagtgagcgtgccgctggcctcgctgattaaatcaccgctgaatgtgcgcacggtgccgtattctgcggagtccgtcagcgaactggcggagtccattaagggcgtcggactgctgcagaatctggtcgtgcataccctgcctggtgaccgttacggtgtcgccgcaggtggtcgccgactggctgcactcaacatgctggcagagcgtggcatcattccggctgactggcctgtacgcgtgaaggttattccgcaggagctggcgactgccgcatcaatgactgaaaacggtcatcgtcgggatatgcaccctgccgaacagattgccggattccgtgcgatggcgcaggaaggcaaaacgcctgcacaaatcggtgatttgctgggctattcgccccgccacgttcagcgaatgctgaaactggcagaccttgcgcctgtcatcctcgatgcgctggcagaagaccgcatcaccacagagcactgtcaggcgctggcgctggagaacgacaccgcgcgtcaggtgcaggtgtttgaagccgcctgccagtcgggatggggcggtaaaccggaagtacagaccattcgtcgtctggtgaccgaaagtgaagtggcggtggcggggaacagtaaattccgcttcgtgggggctgatgccttctcgccagacgaactgcgcaccgatttgttcagcgacgacgagggtggctatgtggactgcgtggcgctcgatgccgccctgctggaaaaactccaggctgtcgcagagttccttcgggaagccgaaggctgggaatggtgcgccggacgcatggagcctgtcggtgagtgccgtgaggatgccggaacataccgctgtctgccggagccggaagcggtgctgacggaggcagaagaagaacgcctgaacgaactgatggcacgttacgacgcgctggaaaaccagtgtgaggaatccgacctgctggaagcagaaatgaagctgattgactgcatggcgaaggtcagggcgtggacgccggagatgcgtgccggaagtggcgtggtggtgtcctggcgttatggaaacgtatgtgtccagcgtggtgtgcagttgcgcagtgaagatgacgcgactgatgacgctgaccgcacggaacaggtgcaggagaaagcgtcagtggaggaaatcagtctgccgttgctgacgaaaatgtcttccgaacgcacgctggcagtccaggcagcactgatgcagcaaccggacaaatctctggcactgctggcatggacgctctgcctgaatgtgtttgacagcggagcgtacagtaaaccagcacaaatcagcctggaatgtaaacattattcgctgaccagcgatgcgccgtcagggaaggaaggtgccgcattcctggcgctgatggcagaaaaagcccgtcttgcggccctgttaccggagggatggtcacgggacatgacgacgttcctgtcactcagtcaggaggtgctgttatccctgctcagtttctgcaccgcatgcagccttaacggtgtccagacccgcgagtgtggtcgcacgtcacgcagtccgcttgactcactggagagcgccatcggttttcacatgcgcgactggtggcagccgacgaaagcaaacttcttcggacacctgaaaaagccgcagattatcgcagccctgaatgatgccggactgtccggtgccgcacgggacgcagagaagatgaagaaaggcgatgccgctgaacatgcagagttccatatgaaagacaaccgctgggtgcctggctggatgtgttcaccacgtccacagacggatgccactgaacgcgccgataacctggctgatgccgcctga

SEQ ID NO: 485972 - DNA, 234 bp, Shigella sonnei; identical to SEQ ID NO: 15508

SEQ ID NO: 485973 - DNA, 528 bp, Shigella sonnei; identical to SEQ ID NO: 15509

SEQ ID NO: 485974 - DNA, 192 bp, Shigella sonnei; identical to SEQ ID NO: 10832

SEQ ID NO: 485975 - DNA, 423 bp, Shigella sonnei
atgtactgtactgttaaagaaatcatccgcgatgtactggatacagacgtgccggacagtgaatgcgtttttgccgtggtgctgacccgtggggatgtgcgctacatagctcaggactggaacctgtcagacgatgagctggaaaccgtcatgcagcggctggacgatgcctttgagcatggtgcggatgtcagcgttgttcacgacgttgttcgtgaactgatggaggaaaagcacgccagccgtcaggtgacagtcccggcggtgatgctggaaaaagtgatggcgctggcaggcagtgaaatgaagcgcctgtatgccgtcgggagtgagaacgggggcgacggtgatgcattcgtcagggaagaacgcgaagcaatggacgttgtgttacaggcgctggacggggagcacatgtcatga

SEQ ID NO: 485976 - DNA, 426 bp, Shigella sonnei
atgcagtatgcgaaacctgtcactctgaatgttgaagagtgcgaccgtctgttttttctgccttacctgtttggccaggattttctgtatgtcgaagcgtctgtgtgcgcgctggcgaaaaaaatgatgccggaatatgaaggcggattctggcacttcatccgcctgccggacggtggcggttacatgatgccggatggcgaccgttttcatctggtcaacggtgaaaactggtttgaccgtaccgtgagtgctgatgccgcaggcatcattttgacttcccttgtgattaaccgccagttgtggctgtaccacgacagcggggatgcaggactgacccatctttaccggatgcgcgatgcgcagttgtggcgtcacatcgaatttcaccccgaatgcaacgcgatttacgcagctctggactga

SEQ ID NO: 485977 - DNA, 615 bp, Shigella sonnei; identical to SEQ ID NO: 475020

SEQ ID NO: 485978 - DNA, 435 bp, Shigella sonnei; identical to SEQ ID NO: 475021

SEQ ID NO: 485979 - DNA, 222 bp, Shigella sonnei; identical to SEQ ID NO: 8358

SEQ ID NO: 485980 - DNA, 684 bp, Shigella sonnei
atgtcccgttttgtcctcggtaactgcatcgatgttatggcccgtattcctgataacgccattgatttcatactgactgacccgccgtatctcgtcggtttccgtgaccgttccgggcgcaccatcgccggcgataaaaccgatgaatggctgcaaccggcctgtaatgaaatgtaccgcgtgctgaaaaaagatgcgctgatggtcagcttctacggctggaaccgcgtcgatcgctttatggccgcctggaaaaatgcgggattcagcgtggttggccacctggtgtttaccaaaacctacacatcgaaggccgcatatgtgggctatcgccacgaatgcgcctacatcctggcaaaaggccgtccggcgctgcctcagaagccattgcccgacgtgctgggctggaaatattcaggcaatcgccatcacccgacggaaaagcccgttaccagcctgcaaccgctcattgagagcttcacacacccgaacgcgattgtgctggacccgtttgcaggcagcggctcaacctgcgtggccgccctccagtccggacgccggtatatcggtatcgagctgcttgaacagtatcaccgtgccggacagcaacgactggccgccgtgcaacgggccatgcagcagggggccgcgaatgataactggtttgaaccggaggctgcgtaa

SEQ ID NO: 485981 - DNA, 927 bp, Shigella sonnei
atgccaaactggtgctcgaatcgtatgtatttttctggtgaaccggcacagatcgctgagattaaacgactggccagcggcgcagtcacaccgttttatcgccgcgccacaaatgaaggtattcagctgtttctggccggaagtgccggacttctgcagatcactgaaaatatccgctctgagcagtgccccggagtgacggctgccggacgtggtgctgtatcaccggaaaatatcgcgttcacccgctggctgacacacctgcagaacggtgtactgctggatgagcaaaactgcctgatgctgcatgaactctggctgcagagcggtactggacagcgtcgctgggaaggattaccggacgatgtcagggataccatcaccgcacttttcaccgcaaaaagaggtgactggtgtggcttctggagtaacgaggatgtatcggtgtggtggaaccgtctgtgtgacaacgtactgccggaaaaaaccatgccgtttgacctgctgacggttttgccgacccgcctggatattgaagtgaatggctttaacggcggtgttctgaacggtgttccttctgcatatcactggtatacagaacggtatggcgtgaagtggccttgtgggtatgacctgaatatcagcagtcagggggaaaacttcattcaggtagatttcgacacgccgtggtgtcagccggaaagcgacgttgttgcagaattaagccgccttttcggctgcacgctggagcactggtacgccgaacagggctgtgatttctgtggctggcagttgtatgagcgcggagagcttgttgatgtgctgtggggggaactggaatggtcttccccgacagatgacgatgagctgccggaagtcaccggacctgcgtggatagtcgacaatgtggcgcattatggcggatga

SEQ ID NO: 485982 - DNA, 705 bp, Shigella sonnei; identical to SEQ ID NO: 8686

SEQ ID NO: 485983 - DNA, 315 bp, Shigella sonnei; identical to SEQ ID NO: 35584

SEQ ID NO: 485984 - DNA, 660 bp, Shigella sonnei; identical to SEQ ID NO: 35583

SEQ ID NO: 485985 - DNA, 1191 bp, Shigella sonnei; identical to SEQ ID NO: 198466

SEQ ID NO: 485986 - DNA, 129 bp, Shigella sonnei; identical to SEQ ID NO: 33085

SEQ ID NO: 485987 - DNA, 279 bp, Shigella sonnei; identical to SEQ ID NO: 33086

SEQ ID NO: 485988 - DNA, 705 bp, Shigella sonnei
atgaacccattcaaaggccggcattttcagcgtgacatcattctgtgggccgtacgctggtactgcaaatacggcatcagttaccgtgagctgcaggagatgctggctgaacgcggagtgaatgtcgatcactccacgatttaccgctgggttcagcgttatgcgcctgaaatggaaaaacggctgcgctggtactggcgtaacccttccgatctttgcccgtggcacatggatgaaacctacgtgaaggtcaatggccgctgggcgtatctgtaccgggccgtcgacagccggggccgcactgtcgatttttatctctcctcccgtcgtaacagcaaagctgcataccggtttctgggtaaaatcctcaacaacgtgaagaagtggcagatcccgcgattcatcaacacggataaagcgcccgcctatggtcgcgagcttgctctgctcaaacgcgaaggccggtgcccgtctgacgttgaacaccgacagattaagtaccggaacaacgtgattgaatgcgatcatggcaaactgaaacggataatcggcgccacgctgggatttaaatccatgaagacggcttacgccaccatcaaaggtattgaggtgatgcgtgcactacgcaaaggccaggcctcagcattttattatggtgatcccctgggcgaaatgcgcctggtaagcagagtttttgaaatgtaa

SEQ ID NO: 485989 - DNA, 249 bp, Shigella sonnei; identical to SEQ ID NO: 381166

SEQ ID NO: 485990 - DNA, 1650 bp, Shigella sonnei
atgaaaagagttctgacggcgcttgccgccacactccctttcgcagctaacgccgcggatgctattagcggggccgtagagcgccagccaacgaactggcaggcgattattatgttcctgattttcgtcgtgtttacgctcggcattacctactgggcatcaaaactcgtacgttctcgtagcgactactacaccgcaggcggcaatatcactggcttccagaacgggctggcgattgccggggactatatgtccgccgcctcattcttggggatctccgcgctggtgtttacctccggctatgacggcttaatttactcgctgggcttcctggtgggctggccgatcattttgttcctgattgccgaacgtctgcgtaacctggggcgctacacctttgccgatgtggcctcttaccgtctgaaacaagggccgattcgtattctttcggcctgtggttctctggtggtggtggcgctttaccttatcgcccagatggtgggcgcaggtaaactgatcgagctgctgtttggccttaactatcacattgcggtggtgctggtcggcgtgctgatgatgatgtacgtcctgttcggcggcatgctggcgaccacttgggtacagattatcaaagccgtgctgttgctgttcggtgccagctttatggcctttatggtgatgaaacacgtcggctttagcttcaacaatctgttcagtgaagcgatggcggtacacccgaaaggtgtcgacatcatgaagccgggcgggctggtgaaagatccgatctccgcactctctctgggtctgggactgatgtttggtacggcgggcttgccgcacattctgatgcgcttctttacagtcagcgatgcccgcgaagcacgtaagagcgtgttctacgccaccgggtttatgggctacttctatattctgacctttattatcggcttcggcgcgatcatgctggttggtgcgaatccggaatataaagacgcggcgggccatctgattggtggtaacaacatggcggccgttcacctggcgaatgcagtgggcggcaacctgttcctcggttttatttcagcggttgctttcgccactatcctcgcggtggttgcgggtctgacgctggcgggcgcatccgcggtttcgcatgacttgtacgctaacgtcttcaaaaaaggcgcgaccgaacgtgaagagctgcgggtatcaaaaatcaccgtactgatcctcggcgtgattgcgattatcctcggcgtgctgtttgagaatcagaacatcgcctttatggtggggctggcgtttgccatcgcggcgagctgtaacttcccgatcattctgctttctatgtactggtcgaaactgaccacgcgtggcgcgatgatgggtggctggctggggctgattaccgcagtagtactgatgatcctcggcccgacgatttgggtacagatccttggtcacgaaaaagccatcttcccgtatgaatacccggcgctgttctctatcaccgtggcattcctcggcatctggttcttctcggcaaccgataactcagcggaaggggcgcgcgagcgtgaactgttccgcgcgcagtttatccgctcccagaccggctttggcgttgagcaaggccgcgcacattaa

SEQ ID NO: 485991 - DNA, 165 bp, Shigella sonnei
atgaatggcactatttatcagcggatagaagacaatgcgcatttcagggagttagtcgaaaaacggcaacggtttgccaccatcctgtcgattattatgctggcagtttatatcggctttattttactgatcgccttcgcgcccggctggctggcacgccgctga

SEQ ID NO: 485992 - DNA, 1959 bp, Shigella sonnei
atgagccaaattcacaaacacaccattcctgccaacatcgcagaccgttgcctgataaaccctcagcagtacgaggcgatgtatcaacaatctattaacgtacctgataccttctggggcgaacagggaaaaattcttgactggatcaaaccttaccagaaggtgaaaaacacctcctttgcccccggtaatgtgtccattaaatggtacgaggacggcacgctgaatctggcggcaaactgccttgaccgccatctgcaagaaaacggcgatcgtaccgccatcatctgggaaggcgacgacgccagccagagcaaacatatcagctataaagagctgcaccgcgacgtctgccgcttcgccaataccctgctcgagctgggcattaaaaaaggtgatgtggtggcgatttatatgccgatggtgccggaagccgcggttgcgatgctggcctgcgcccgcattggcgcggtgcattcggtgattttcggcggcttctcgccggaagccgttgccgggcgcattattgattccaactcacgactggtgatcacttccgacgaaggtgtgcgtgccgggcgcagtattccgctgaagaaaaacgttgatgacgcgctgaaaaacccgaacgtcaccagcgtagagcatgtggtggtactgaagcgtactggcgggaaaattgactggcaggaagggcgcgacctgtggtggcacgacctggttgagcaagcgagcgatcagcaccaggcggaaaagatgaacgccgaagatccgctgtttattctctacacctccggttctaccggtaagccaaaaggtgtgctgcatactaccggcggttatctggtgtacgcggcgctgacctttaaatatgtctttgattatcatccgggtgatatctactggtgcaccgccgatgtgggctgggtgaccggacacagttacttgctgtacggcccgctggcctgcggtgcgaccacgctgatgtttgaaggcgtacccaactggccgacgcctgcccgtatggcgcaggtggtggacaagcatcaggtcaatattctctataccgcacccacggcgatccgcgcgctgatggcggaaggcgataaagcgatcgagggtaccgaccgttcgtcgctgcgcattctcggttccgtgggcgagccaattaacccggaagcgtgggagtggtactggaaaaaaatcggcaacgagaaatgtccggtggtcgatacctggtggcagaccgaaactggcggtttcatgatcacgccgctgcctggcgctaccgagctgaaagccggttcggcaacacgtccgttcttcggcgtgcaaccggcgctggtcgataacgaaggtaacccgctggaaggcgctaccgaaggcagcctggtgatcaccgactcctggccgggtcaggcgcgtacgctgtttggcgatcacgaacgttttgaacagacctacttctccaccttcaaaaatatgtatttcagcggcgacggcgcgcgtcgcgatgaagatggctattactggatcaccgggcgtgtggacgacgtgctgaacgtctccggtcaccgtctggggacggcagagattgagtcggcgctggtggcgcatccgaagattgccgaagccgccgtagtaggtattccgcacaatattaaaggtcaggcgatctacgcctacgtcacgcttaatcacggggaggaaccgtcaccagaactgtacgcagaagtccgcaactgggtgcgtaaagagattggcccgctggcgacgccagacgtgctgcactggaccgactccctgcctaaaacccgctccggcaaaattatgcgccgtattctgcgcaaaattgcggcgggcgataccagcaacctgggcgatacctcgacgcttgccgatcctggcgtagtcgagaagctgcttgaagagaagcaggctatcgcgatgccatcgtaa

SEQ ID NO: 485993 - DNA, 1437 bp, Shigella sonnei
atgacaaggataaaaataaacgcacgccgtatcttcagcttattgattccttttttctttttcacttctgttcacgctgaacaaacggcagctcccgcaaaacctgtaactgtggaagcgaagaatgaaacctttgccccgcagcatcccgatcaatatctctcctggaaagccacctcggaacagtcagagcgtgttgacgccctggcggaagatccacggctggtgatcctgtgggcggggtatcccttctcgcgcgattacaacaagccgcgtggacatgcctttgctgtgaccgatgtgcgtgaaaccctgcgtaccggtgcgccgaaaaacgctgaagatggtccgctaccgatggcgtgctggagttgtaaaagcccggatgtggcgcgtctgatccagaaagacggcgaagatggctacttccacggtaagtgggcgcgcggcggcccggaaatcgtcaacaacttaggttgtgccgactgccataacaccgcctcaccagagttcgccaaaggcaaaccggagttaaccctttcccgtccgtatgcggctcgcgcgatggaagccattggtaaaccttttgagaaagccggacgtttcgaccagcaatcgatggtttgcggtcagtgccatgtggagtattacttcgacggcaaaaacaaagcggttaaattcccgtgggatgacggcatgaaagtcgaaaatatggagcagtattacgacaaaattgccttctctgactggactaactccctgtcgaaaacgccaatgctgaaagcgcagcacccggaatatgaaacctggacagcgggcattcacggtaaaaacaacgtgacctgtatcgactgccatatgccaaaagtgcagaacgccgaaggcaaactctataccgaccataaaattggtaatccgtttgataacttcgcccagacttgtgcgaactgccatacccaggacaaagctgccttgcaaaaagtggtcgcggaacgtaagcagtcgattaacgacctgaaaatcaaggttgaagatcaactggttcacgctcacttcgaagcgaaagcagcgctggatgcaggcgcgacggaagctgaaatgaagccaattcaggacgatatccgtcatgcccagtggcgctgggatctggcgatcgcttcccacggcattcatatgcacgcaccggaagaaggtttacggatgctcggtacggcgatggataaagcggcggatgcacgcaccaaactggcgcgcctgctggcgaccaaaggcatcacccatgaaatccagatcccggatatctcaaccaaagagaaagcccagcaggccattggcctgaacatggaacaaatcaaggccgagaagcaggacttcatcaaaacggtgatcccgcagtgggaagaacaggcacgtaaaaacggtctgttaagccaataa

SEQ ID NO: 485994 - DNA, 567 bp, Shigella sonnei
atgagcgtattacgttcgttattaactgccggggtgctggcgtcgggcctgttgtggagcctgaacggaattaccgctacccctgcggcgcaggcatctgatgatcgctacgaagttacccagcagcgtaacccggatgccgcctgtctggactgtcataaaccagataccgaaggtatgcatggcaaacatgcttccgttatcaacccgaataacaaactgccggtcacctgcaccaactgtcacggccagccatcaccgcaacaccgcgaaggggtgaaagatgtgatgcgctttaacgagccgatgtacaaggttggagagcagaacagcgtctgtatgtcctgtcatctgccggaacagttgcaaaaagcgttctggccgcacgatgtccacgtaaccaaagtggcgtgcgccagctgccattccctgcatccacagcaagatacgatgcagacgttaagtgacaaaggacggattaagatttgcgtcgattgccacagcgatcagcgcaccaatccgaactttaacccggcgtctgttccgttgcttaaggagcagccatga

SEQ ID NO: 485995 - DNA, 672 bp, Shigella sonnei
atgacctggtctcgtcgccagtttctcaccggcgtcggcgtgctggcagccgtcagcggcaccgcagggcgcgtggtggcgaaaacgttgaatatcaatggggtgcgttacggcatggtgcatgacgagtcgttatgcatcggctgtaccgcctgtatggatgcttgtcgggaagtgaacaaggtgccggaaggcgtctcgcgcctgacgattattcgtagcgagccgcagggcgaatttcctgatgtgaaatatcgcttcttccgtaagtcttgccagcactgcgatcatgcgccgtgcgttgacgtctgcccgaccggtgcgtcttttcgtgatgccgctagcgggattgtcgatgttaatcctgatctctgcgtcggttgtcagtactgcatcgccgcctgtccgtaccgcgtgcgctttatccatccggtcacgaagacggcggacaaatgcgatttctgccgtaaaaccaatttgcaggccggtaagctgcccgcgtgtgttgaggcttgcccgacgaaggcgctgacgtttggcaatctggacgatcctaacagtgagatttcgcaactgctgcgccagaagcctacttaccgctacaagctggcgctgggaaccaaaccgaagctgtaccgcgtaccgtttaaatacggggaggtgagccaatga

SEQ ID NO: 485996 - DNA, 957 bp, Shigella sonnei
atgacgcagacttccgcatttcattttgaatcgctggtgtgggactggccgattgccatctacctgtttttgattggtatttctgccggtctggtgacgctggccgtgctgttacgtcgcttctactcgcaggcgggcggtgcagacagtacgttgctgcgcaccacgctgattgtcgggccgggcgcggtgatcctcggtctgttgatcctcgtcttccacctgacaagaccgtggaccttctggaagctgatgttccactacagttttacctcggtgatgtcgatgggggtgatgctgtttcagctctacatggtggtgctggtgctgtggctggcgaaaatctttgaacatgatttgcttgccctgcaacaacgctggttgccgaagctggggatcgtgcaaaaggttctgagcctgctgacgcccgttcatcgcggactggaaacgctgatgctggtgttggcggtgctgctgggggcttataccggctttctgctgtcggcgctgaaatcgtatccgttcctcaataacccgatcctgccggtgctgttcctcttctccggcatctcgtccggtgcggcggtggcgctgatcgccatggcgatacgccaacgcagtaacccgcattccacggaagcgcactttgttcaccggatggaaatccccgtggtatggggtgaaatcttcctgctggtggcgttttttgtcggtctggcgctgggcgatgacggtaaagttcgtgcgctggtggcggcattaggtggcggtttctggacgtggtggttctggcttggtgtcgccgggctggggctgattgtgccaatgttgctcaaaccgtgggtcaatcgcagttccggcattcctgccgtgctggcggcgtgtggggccagtctggtcggcgtgttgatgctgcgctttttcattctctacgccggacagttgacggtggcgtaa

SEQ ID NO: 485997 - DNA, 1623 bp, Shigella sonnei
ttgcgctggcctgccatgatgcgactcacttgcatcggcattctggcgcagttcgcgctcctgctgctcgcctttggcgtactgacgtattgttttctcatcagcgatttctcggtcatttatgtcgcgcaacatagctatagcctgctgtcgtgggaattcaagctggcagcggtgtggggcggccatgaaggttcgctgctgctttgggtgctgctgctttccgcctggagcgcgctgtttgcctggcattatcggcagcaaaccgatccgctatttccgctgacgttagccgttttatctctcatgctcgccgcactgctactgtttgtggtgctgtggtccgatcccttcgtgcggatatttccaccagcaatcgaaggccgcgatctcaatccgatgctgcaacatcccggtcttatctttcatccaccgctgctttaccttggctatggcggtttgatggtagcggcgagcgtggcgctggcgagtctactgcgcggcgagtttgatgcggccagcgcccgaatttgctggcgctgggcgttacctggctggagtgcattaacggcggggatcatcctcggttcctggtgggcctactgcgaactcggctggggcggctggtggttctgggatccggtggaaaatgcctctttattaccctggctttctgccactgcgctgctgcacagtttatccctgacacgccagcgggggattttttgccactggtcgctgttgctggcgatagttactctgatgctgtcgctgctgggcaccttaattgtccgttctggcattctggtttcggttcatgcgttcgcactggataacgtccgcgccgtgccgttgttcagcctgtttgcactgattagccttgcgtctttggctctgtatggctggcgagcgcgggacggtggcccggcggtgcgtttttcggggttatcgcgggaaatgttaatcctcgctacgctgttgctgttttgcgcagtgctactgatcgtgctggtgggaacgctttatccgatgatttacggtctgctgggctggggacgcctctccgttggcgcgccgtattttaaccgcgcgacgttaccgtttggtctgttgatgctggtggtgattgtgctggcgacgtttgtctctggcaaacgcgcgcagcttccggcgctggtcgctcatgcgggcgtgctgttatttgccgcagggatcgtggtttccagcgtcagccgtcaggagatcagcctgaatttacagccgggtcagcaggtgacgctggcaggatacaccttccgttttgagcgcctcgatctgcaagccaaaggcaattacaccagcgaaaaagcgatagtggcgctgtttgaccatcagcaacgcattggtgaattaacgccggagcggcgtttttatgaagcacgccgtcagcaaatgatggaaccgtcaattcgctggaacggcatccatgactggtatgcggtcatgggtgaaaaaaccggagcggatcgttacgcttttcgtttgtatgtacaaagcggtgtgcgctggatctggggtggaggattgttgatgattgcgggcgcattgttaagcggatggcgggggaagaagcgcgatgaataa

SEQ ID NO: 485998 - DNA, 384 bp, Shigella sonnei
atgaataaagggcttctcacgctactgctgttatttacctgttttgcgcgcgctcaggtcgtagacacctggcaattcgccaatccgcaacaacagcaacaggcgttaaatattgccagccagttacgttgtccgcagtgccagaatcaaaacttactcgaatccaatgcgccggtggcggtcagtatgcgccatcaggtttatagcatggtgtcggaggggaagaacgaagtcgaaatcattggctggatgaccgaacgctacggagattttgttcgctataacccaccgttaacgggtcagacgctggtgttgtgggcgctgccagtggtgttgttattgctgatggcactgatcctctggcgagtgagggctaagcgatga

SEQ ID NO: 485999 - DNA, 597 bp, Shigella sonnei
atgaaacagcctcaaataccggtgaaaatgctgacaacactcacgatattgatggtattcctctgtgtcggcagttatctgttaagcccaaaatggcaggcggtacgtgcggagtatcagcgtcagcgcgatccgctacatcagtttgccagccagcaaaccccggaagcgcagcttcaggcattgcaggataaaatccgcgctaatccacaaaacagcgaacaatgggcgttactgggcgagtactatctgtggcaaaacgattacagcaattcgctgctggcgtatcgtcaggcgttgcaactacgtggtgagaacgctgaactgtatgcggcgctggcgacggtgctttattaccaggccagccagcatatgaccgcccagacttgcgcaatgatcgacaaagccctcgcgctggactctaacgaaatcaccgctctgatgctgctggcttccgatgcgtttatgcaggcgaattacgcgcaagccatcgaactatggcaaaaagtgatggatctcaactcaccccggatcaaccggacacagctggtcgagtcgattaatatggcaaaactgttgcagcggagatcggattaa

SEQ ID NO: 486000 - DNA, 1314 bp, Shigella sonnei
atgaaaaatataaaattcagcctggcctggcagattctgtttgctatggtgctgggcattctcctgggaagctacctgcactaccatagcgacagccgcgactggctggtcgtcaatttgctctctccggcgggtgatatcttcatccatctgatcaaaatgattgttgtgccgattgtgatctccacgctggtggtgggtatcgcgggtgttggtgatgccaaacagctcgggcgtattggcgcgaaaaccattatttacttcgaggtgatcaccaccgtcgccatcattttggggatcactctggcgaacgtcttccagcccggtgccggggtggatatgtcgcagctggcgaccgtcgatatctcgaaatatcagagcactacggaagcggtacaaagcagttcccacggcattatgggcacgattttgtcgctggtgccgacgaacattgtggcgtcgatggcgaaaggcgaaatgctgccgatcatctttttctcggtgctgtttggtctggggctttcttccctgcccgcgacgcatcgtgaaccgctggtgaccgtgttccgctccatctctgaaaccatgtttaaagtgactcacatggtgatgcgttatgcaccggtgggtgtgtttgcgctgattgcggtgacggtggctaactttggtttctcttctctgtggccactggcgaaactggtgctgctggtgcatttcgccattctgttcttcgcgctggtagtgctgggaattgtggcgcgcctgtgcgggttaagcgtctggatcctgattcgtattctgaaagatgagctgattctggcgtactccactgccagctctgaaagcgtactgccgcgaattattgagaagatggaagcctacggagcaccggcgtcgatcaccagcttcgtggtgccgaccggttactcttttaaccttgatggttcggcgctgtatcaaagtattgccgctattttcatcgctcagctgtatggcattgacctgtccatctggcaggaaatcattctggtgctgacgctgatggtgacctcgaaagggattgctggcgtgccgggcgtgtcgtttgtggtgctgctggcaacgctgggtagcgtaggtattccgctggaaggtctggcgtttattgctggtgttgaccgtatcctcgacatggcgcgtactgcgctgaacgtggtgggtaatgcgctggcggtgctggtgattgccaagtgggaacacaaatttgaccgcaaaaaggcgctggcttatgagcgtgaagtgctgggcaaatttgataaaactgcggatcaataa

SEQ ID NO: 486001 - DNA, 690 bp, Shigella sonnei
atgaaaaaaattatcgcattgatgttgtttttgacattctttgcccacgccaacgactccgagcctggcagccagtatttaaaggcagcagaggccggggaccgacgcgcacaatattttcttgccgacagctggtttagctccggcgatttgagcaaagccgaatattgggcacagaaagccgccgacagcggtgatgctgatgcctgcgcgctgctggcgcagatcaaaatcaccaatccggtcagtctggactatccacaagcaaaagttcttgcagagaaagcggcgcaagcgggcagtaaagaaggtgaagtaacgctggcgcatattctggtaaatactcaagcgggtaaaccggattatccaaaggctatttcgctgttagaaaacgcctcggaagatctggagaacgactctgccgtcgatgcccaaatgctgcttggtttgatttacgccaacggcgtgggcattaaggccgacgatgacaaggcaacctggtatttcaaacgcagctctgcaatttcccgaaccggttattccgagtactgggcgggaatgatgttcttaaacggtgaagaaggttttatcgagaagaacaagcaaaaggcgctgcactggttgaacctgagctgtatggaagggtttgataccgggtgtgaagagtttgaaaaattaaccaacggttaa

SEQ ID NO: 486002 - DNA, 1680 bp, Shigella sonnei
atgagcaatgctattaacgaaattgataataccgatttagtgttcgttttcgggtacaacccggctgattcccacccaatcgtggcgaatcacgtaattaacgctaaacgtaacggggcgaaaattatcgtctgcgatccgcgcaaaattgaaaccgcgcgcattgctgacatgcacattgcactgaaaaacggctcgaacatcgcgctgttgaatgcgatgggccatgtcattattgaagaaaatctgtacgacaaagcgttcgtcgcttcccgtacagaaggctttgaagagtatcgtaaaatcgttgaaggctacacgccggagtcggttgaagatatcaccggcgtcagcgccagtgagattcgtcaggcggcacggatgtatgcccaggcgaaaagcgccgccatcctgtggggcatgggtgtaacccagttctaccagggcgtggaaaccgtgcgttctctgaccagcctcgcgatgctgactggtaacctcggtaagccgcatgcgggtgtaaacccggttcgtggtcagaacaacgtgcagggtgcctgcgatatgggcgcgctgccggatacgtatccgggataccagtacgtgaaagatccggctaaccgcgagaaattcgccaaagcctggggcgtggaaagcctgcctgctcataccggttatcgcatcagcgagctgccgcaccgcgcagcgcatggcgaagtgcgtgccgcgtacattatgggcgaagatccgctgcaaactgacgcggagctgtcggcagtacgtaaagcctttgaagatctggaactggttatcgttcaggacatctttatgaccaaaaccgcgtcggcggcggatgtcattttgccgtcaacgtcgtggggcgagcatgaaggcgtgtttactgcggctgaccgtggcttccagcgtttcttcaaagcagttgaaccgaaatgggatctgaaaacggactggcaaatcatcagtgaaatcgccacccgtatgggttatccgatgcactacaacaacacccaggagatctgggatgagttgcgtcatctgtgcccggatttctacggtgcgacttacgagaaaatgggcgaactgggcttcattcagtggccttgccgcgatacttcagatgccgatcaggggacttcttatctgtttaaagagaagtttgataccccgaacggtctggcgcagttcttcacctgcgactgggtagcgccaatcgacaaactcaccgacgagtacccgatggtactgtcaacggtgcgtgaagttggtcactactcttgccgttcgatgaccggtaactgtgcggcactggcggcgctggctgatgaacctggctacgcacaaatcaataccgaagacgccaaacgtctgggtattgaagatgaggcattggtttgggtgcactcgcgtaaaggcaaaattatcacccgtgcgcaggtcagcgatcgtccgaacaaaggggcgatttacatgacctaccagtggtggattggtgcctgtaacgagctggttaccgaaaacttaagcccgattacgaaaacgccggaatacaaatactgcgccgtgcgcgtcgagccgatcgccgatcagcgcgccgccgagcagtacgtgattgacgagtacaacaagttgaaaactcgcctgcgcgaagcggcactggcgtaa

SEQ ID NO: 486003 - DNA, 420 bp, Shigella sonnei
atgaaaaaagtcgtcacggtttgcccctattgcgcatcaggttgcaaaatcaacctggtcgtcgataacggcaaaatcgtccgggcggaggcagcgcaggggaaaaccaaccagggtaccctgtgtctgaagggttattatggctgggatttcattaacgatacccagatcctgaccccgcgcctgaaaacccccatgatccgtcgccagcgtggcggcaaactcgaacctgtttcctgggatgaggcactgaattacgttaccgagcgcctgagcgccatcaaagagaagtacggtccggatgccatccagacgaccggctcctcgcgtggtacgggtaacgaaaccaactatgtaatgcaaaaatttgcgcgcgccgttattggtaccaataacgttgactgctgcgctcgtgtctga

SEQ ID NO: 486004 - DNA, 1467 bp, Shigella sonnei
atgatcaatcgtcaactttcacgtctgctgttgtgcagcattctcggcagcacgacgctgatttccggctgtgccttggtacgcaaggattctgcgcctcatcaacagctcaaaccggaacaaatcaaactggccgatgatattcatcttgccagctccggctggccgcaggcgcagtggtggaaacaactcaatgacccgcagctggatgcgctgatccaacggacgctaagtggttcacacaccctcgccgaagcgaaactgcgggaagaaaaagcgcagtcccaggccgatttgttagatgccggttcacaattacaggtcgcagcgttagggatgctcaaccgccaacgcgtctcggcgaacggctttttaagcccttatgcgatggatgcgcccgcactgggtatggacgggccgtactatacggaagccacagtaggtttgtttgccggactggatcttgatttgtggggtgtgcatcgctcagcggttgccgccgccattggcgcgcataatgccgcgctggcagaaaccgcagcagtagagctatcgctgaccacgggcgtagcgcagctttattacagtatgcaggccagctatcagatgctcgatctgttagaacaaactcgcgatgtgattgattacgcggtgaaagcgcaccagagtaaagtggcgcacggtctggaagcacaagtgcctttccacggcgcgcgggcacagattctggcggtcgataaacaaattgctgccgtcaaagggcaaatcaccgaaacgcgagaatctctgcgtgcattgattggcgcgggggccagcgatatgccggagatcaaaccggtggcattaccacgagtccagaccggcattccggcgacactctcttatgagttgctcgccagacgcccggatctgcaagccatgcgctggtatgttcaggcgtcattagatcaggtggattccgcgcgggcgctgttctacccgagctttgatatcaaagcgtttttcggccttgatgccatccacctggataccttattcaaaaaaaccagtcgccagttcaacttcatcccgggtctgaaattgccgctgtttgacggtggacggttgaatgccaatctcgaaggcacgcgcgccgccagcaacatgatgattgaacgttacaaccagtcagtactgaacgcggtgcgtgacgttgccgtcaacggcacgcgtctgcaaacgctcaacgacgagcgagaaatgcaggctgaacgcgtggaagcaacgcgcttcacccagcgcgctgccgaggccgcctatcagcgcggcttaaccagccgcttacaggccactgaagcccggttgccagtacttgccgaagagatgtcattactgatgctggacagccgccgggtgatccaaagcattcagttgatgaaatcgctgggcggcgggtatcaggcggctcccgtcgtcgagaaaaaataa

SEQ ID NO: 486005 - DNA, 2052 bp, Shigella sonnei
atgagcgcgctcaactccctgccattaccgatggtcaggctgctggcgttctttcatgaagagttaagcgagcggcgacccggccgcgtgccgcagatcgtgcaactctgggtaggctgcctgctggtgattctgatctcgatgacttttgagatcccttttgtggcgttatcgctggcagtgctgttttacggtattcagtcgaacgcgttttacaccaaatttgtggcgatcttgtttgtggttgccacggtgctggagatcggcagcctgtttttgatctacaaatggtcatacggcgaaccgttgatccgattgatcatcgccgggccgatcctgatgggccgcatgtttttgatgcgcacccatcggctgggactggtctttttcgctgtcgccattgtcgccatttacgggcaaaccttccccgccatgctcgactatccggaagtggtcgtgcgcttaacgctgtggtgtatcgttgttggcctctatccaaccttgctgatgacgttaatcggcgtgctgtggtttcccagtcgtgccatttcgcaaatgcatcaggcgcttaatgatcggcttgatgatgccattagtcacctgacagacagcctcgcaccgctacccgaaacgcggattgaaagagaggcgctggcgctgcaaaaactgaatgtcttttgtctcgcggacgatgccaactggcgaactcaaagcgcatggtggcaaagctgcgtggcaacggtaacctacatttactcgacgctgaatcgctacgatcccacctcttttgctgattctcaggcaattattgaatttcggcaaaaattagcctcagaaatcaacaagctgcagcatgccgttgctgaaggtcagtgctggcaaagcgactggcggatcagtgaaagtgaagcggtggcggcacgggaatgtaacctggagaatatctgccagacgttgttacaactgggccagatgaacccgaatacgccgccaacgcccgccgccaaaccgccatcaatggtcgccgatgcttttaccaatccagactatatacgctacgcggtaaaaacattgctcgcctgtttgatctgttacaccttttacagcggcgtggactgggaaggcattcacacctgtatgctgacctgcgtgatcgtctctaatccaaatgtcggttcgtcgtaccagaagatggtgctgcgttttggcggggccttttgcggcgcgattctggcgctgttattcacgctactggtcatgccctggctggacaatattgtcgaattgctgtttgtgctggcaccgattttcctgttgggcgcatggattgccaccagctctgaacgctcttcttatatcggcacacagatggtggtcaccttcgcgctcgccacgctcgaaaacgtttttggcccagtgtacgacctggtggaaattcgcgatcgcgccctgggtatcatcattggtaccgtggtgtccgcggtgatttacacctttgtctggcctgaaagtgaagcgcgcacgctgccgcaaaaactggctggcgcgctgggtatgttaagtaaagtaatgcggatcccacgccagcaggaagtcacggctctgcgcacttatctgcaaattcgtatcggtctgcatgcggcgtttaatgcctgtgaagagatgtgccaacgcgtggcgctggagcgtcaactggacagcgaagaacgcgccttactgattgaacgttcgcaaacggttattcgtcagggccgcgatatccttcacgcctgggatgccacctggaattcggcgcaggcgctggataacgcactacagccggacagagcaggtcagtttgccgacgccctggaaaaatacgctgccggtctggcaaccgcactcagccgttctcctcaaataacgcttgaagagacacccgcctcgcaggccatcctgcccaccttattaaaacaggagcaacacgtctgccagcttttcgcccgcttgccagactggacagccccggcattaacgcccgccacggaacaggcacaaggagccacgcaatga

SEQ ID NO: 486006 - DNA, 1032 bp, Shigella sonnei
atggaaagtacgccgaaaaaagctcctcgcagtaaattccctgctctgttagtggttgcattggcgctggttgcccttgttttcgttatctggcgcgtagacagtgcgccatcaactaatgacgcttacgcgtcagcagataccattgatgtggtgccggaagtcagcggccgcattgtagaactggcggtcaccgacaaccaggcagtcaaacagggcgatttgctgttccgcattgacccgcgcccgtacgaagccaatctggcgaaagctgaagcctccctcgcggcgctggataagcaaattatgctcacccagcgtagcgttgatgcgcaacagtttggtgccgactcgattaatgccacggtagaaaaagcccgtgccgccgcgaaacaggccacagatacattacgccgtaccgagccattactgaaagagggttttgtctcagcggaagacgttgaccgtgcaagaactgcgcagcgcgccgcagaagccgatcttaatgccgtattgttacaggcgcagtcagccgccagcgccgtcagcggcgtcgatgcgctggtggcgcaacgtgcggcggtcgaagcggatattgccctgaccaaactgcatctggaaatggcgaccgttcgcgcgccgtttgatggccgggtcatttccctcaaaacctccgtcgggcaatttgcttctgccatgcgccctatttttaccctaatcgacactcgtcactggtacgtgatcgccaacttccgcgaaaccgatctgaaaaatattcgctcaggtacacccgcaacgattcgcctgatgagtgacagcggcaaaaccttcgagggtaaagtggattcgattggctacggcgtgctaccggatgacggcggcctggtgctgggcggcctgccgaaagtttctcgctctattaactgggtccgcgttgcccagcgttttccggtcaaaatcatggtcgataaacctgacccggaaatgttccgcatcggcgcttcggcagtcgctaatcttgagccgcaataa

SEQ ID NO: 486007 - DNA, 276 bp, Shigella sonnei
atgccaacagttctctctcgcatggcgatgcaactcaaaaaaacagcctggataattcccgtcttcatggtttcgggatgctcattatctccggcaatcccggtgatcggtgcttattatcccagctggtttttctgcgccattgccagccttattttgatgctcatcacgaggcgagttattcagcgggcaaatatcaatctggcatttgtcggaattatttataccgccctttttgctctctacgccatgctgttctggctggcatttttctaa

SEQ ID NO: 486008 - DNA, 1986 bp, Shigella sonnei
atgaataactctcggttattccgtttgagcagaattgttattgcgttaactgccgccagcggcatgatggtaaataccgctaacgcgaaagaggaagcgaaagccgccactcaatatacccaacaggttaatcagaattacgccaaatcattaccgtttagcgatcgtcaggattttgacgacgctcagcgtggatttatcgctccgctgctggatgaaggtattctgcgcgatgctaatggcaaaccatattatcgcggggaagattataaatttgatatcaatgcgcccgcgcccgaaaccgttaaccctagcctgtggcgtcagtcgcagttaaacggtatttccggcctgtttaaagtcaccgacagaatgtaccaggttcgcggtcaggatatctccaacatcacctttatcgaaggtgataccgggattattgtcatcgacccgctggtgacgccaccgagcgcaaaagccgcccttgacctttacttccaaaatcgcccgcaaaaaccgattgttgcggttatttatacccacagccataccgaccactatggcggcgtgaaaggcattatctctgaagctgatgtgaaatccggtaaagtgcaggttatcgcccctgctggctttatggacgaagccatcagcgaaaacgtactggcgggtaatattatgagccgccgtgcactttactcctacggcctgctgctggcgcataaccctcagggtaacatcggcaatggtcttggcgtaacgctggcatcgggctacccgagcatcatcgcaccgaacaaaaccatcaccaaaaccggtgagaagatgattatcgacggcctggagtttgacttcctgatgaccccaggtagcgaagcaccagccgaaatgcacttctatattccggccctgaaagcgctgtgtaccgccgagaacgccacgcataccctgcacaacttctacactctgcgcggcgcgaaaacccgcgacaccagcaagtggaccgagtatctgaacgaaacgctggatatgtggggtaacgacgcggaagtcctgtttatgccgcacacctggccggtctggggcaataagcatatcaatgattatattggtaaatatcgcgatactatcaagtacattcacgaccagaccctgcacctggcgaaccagggctacaccatgaatgaaatcggcgacatgattaaactgccgcctgcacttgccaataactgggccagccgtggctattacggttctgtcagccacaacgcccgcgcggtgtataacttctatcttggctattacgacggtaacccggctaacctgcatccgtatggtcaggtggagatgggtaaacgttacgtgcaggcgctgggcggttctgcccgtgtcatcaacctggcgcaagaagcgaacaagcaaggtgattaccgctggtcggcagaactgctgaaacaggtgattgccgccaacccgggtgaccaggtcgcgaagaatctgcaagcgaataactttgaacagctgggctatcaggccgagtccgccacctggcgcggtttctacctgaccggcgcgaaagagctgcgcgaaggggtgcataagttcagccacggcaccatcggttccccggacaccattcgcgggatgtcggtcgaaatgctgttcgactttatgtccgttcgcctcgatagcgcgaaagccgcgggtaaaaatatcagcctgaacttcaatatgagcaatggcgataacctcaacctgacgctgaacgatagcgtgcttaactaccgtaaaacactgcaatcccaagctgacgcctctttctacatcagccgtgaagatctgcacgccgtgctgaccgggcaagccaaaatggcggatctggtaaaagcgaagaaagccaaaattattggcaatggcgcgaaactggaagaaattatcgcctgtctggataatttcgatttgtgggtgaatatcgtaaccccaaattaa

SEQ ID NO: 486009 - DNA, 318 bp, Shigella sonnei
atgcaaccggtgtttctttttaaaaaacgtaccggagcaatgggcggtcatgtcgctggcaccgcaggattctgcgttgctgtgccagccttttattcatggtcaatgagtgaggtgattgataaagacaccaggtcgtcagagcgcactgattatccgcattatgccagtgaagttgcactggcttttggttcacgagtggttggcctcgaactggcaaaaatgattgtggatgcgtggctgggcgcacagtacgaaggcggtcgtcatcaacaacgcgtggaggcgattacggcaatagagcagcggagaaattga

SEQ ID NO: 486010 - DNA, 330 bp, Shigella sonnei
atgaaacgctttccgctatttcttttattcaccctgctcacgctgtccaccgttccggcccaggctgatattatcgacgatactattggtaatattcagcaggcgattaatgacgcttataaccctgaccgtgggcgagactatgaagattcgcgcgacgacggctggcagcgtgaagtgagcgacgatcggcgcagacaatatgacgaccgccgccgccagtttgaagatcgccgcaggcagctggacgatcgccagcgccagcttgatcaggagcgtcggcaactggaggatgaagagcggagaatggaagatgagtatgggcgatga

SEQ ID NO: 486011 - DNA, 759 bp, Shigella sonnei
atgagtctgaccctcacgctcaccggcaccggcggcgcacagggcgttccggcatggggctgcgagtgcgcggcctgcgaccgagcgcggcgctcgccgcagtatcgccgccaaccgtgcagcggcgtagtgaagtttaacgaggcgatcaccctgatcgacgccgggctgcacgatctcaccgatcgctggtctcccggatcgttccagcagtttttgctgacgcattatcatatggatcacgtccaggggctgtttccgctgcgctggggcgtgggcgatccgatcccgatctacggcccgccggatgaacagggctgcgacgatctgtttaaacatcccgggctgcttgatttcagccacacggtggaaccgtttgtggtgtttgatttgcaggggttgcaggtcacgccgctgccgcttaaccactcaaaactcactttcggctatttactggaaacggcgcacagccgggtggcgtggctgtctgacaccgctggcttgccggaaaaaacgctgaaatttttacgcaataatcagccgcaggtaatggtgatggattgcagtcacccgccgcgcgcggatgcaccgcgtaatcactgtgatttaaataccgtgcttgcgctgaatcaggttatccgctcgccacgggtgattctgacccatatcagccaccagtttgatgcgtggctgatggaaaacgcactaccgtcagggtttgaggtggggtttgatgggatggagattggggtggcgtga

SEQ ID NO: 486012 - DNA, 435 bp, Shigella sonnei
atgcctgcttgtgagcttcgcccggccacgcagtatgataccgacgcggtttacgcgctgatttgtgagctaaaacaggcggagtttgaccaccacgcatttcgcgtgggctttagcgccaatctgcgcgacccgaacatgcgctatcatctggcgctgctggatggcgaggttgtcggcatgatcggcctgcatttgcagtttcatctgcatcatgtcaactggatcggcgaaattcaggaactggtagtgatgccgcaggcgcgcggcctgaacgtcggtagcaagttgctggcgtgggcagaagaagaagcccgccaggccggggccgaaatgaccgagctttcgaccaacgtgaagcgccacgacgcgcaccgtttctatctgcgagaaggctacgagcagagtcacttccgcttcaccaaggcgctgtaa

SEQ ID NO: 486013 - DNA, 558 bp, Shigella sonnei
atgatgggaaaactgatttggttaatggggccgtccggctccgggaaagatagcctgctggcggaactccgcctgcgggaacaaactcagctactggtggcgcatcgctacatcacgcgcgacgccagcgccggaagcgaaaaccatatcgctctgagcgagcaggagttttttacccgcgcggggcagaacctactggccttaagctggcacgctaacggtctgtattatggcgtcggcgtcgagatcgacctctggctgcacgccggattcgacgtgctggtcaacggctcacgcgcccatctgccgcaggcgcgggcgcgctatcaatcggcgctgctgcccgtctgtttacaggtttcgccggagatcctccgccagcgcctggaaaaccgtggccgtgaaaacgccagtgaaattaacgcccgcctggcgcgcgccgcccgctatactccacaggattgccatacgctcaacaatgacggcagcctgcgccagtcggtcgacacgctgctgacgctgattcatcagaaggagaaacaccatgcctgcttgtga

SEQ ID NO: 486014 - DNA, 1137 bp, Shigella sonnei
atgattatcaataacgtcaaattggtgctggaaaacgaagtggtacacggttcactggaggtgcaggacggcgaaatccgcgcctttgccgaaagccagagccgcctgccggaggcgatggacggcgaaggcggctggctgctgccggggctgattgagctgcataccgataatctggataaattcttcaccccgcgcccgaaagttgactggcctgcccactcggcgatgagcagccacgacgcgctgatggtggcgagcggcatcaccaccgtactggatgccgtggcaattggcgacgtgcgcgacggcggcgatcggctggtgaatctggagaagatgatcaacgccatcgaagagacgcagaaacgcggcgtcaaccgcgccgagcaccgtctgcatctgcgctgcgaactgccgcatcacaccacgctgccgctgtttgaaaaactggtgcagcgcgagccggtgacgctggtgtcgctgatggaccactcgccgggccagcgccagttcgccaatcgcgagaagtatcgcgaatattatcagggcaaatactccctcactgatgcgcagatgcagcagtacgaagaagagcaactggcgctcgccgcacgctggtcgcagccgaatcgcgaatccatcgccgccctgtgccgcgcgcgaaaaattgcgcttgccagccacgatgacgccacccacgcccacgttgctgaatctcaccagcttggcagcgtgatcgccgaatttcccaccacgttcgaagcggcggaagcctcgcgcaagcatggcatgaacgtgctgatgggcgcgccgaatattgtgcgcggcggctcgcactccggcaacgtggcggccagtgaactggcgcagcttggcctgctggatatcctctcttccgactactaccccgccagcctgctcgatgcggcatttcgcgtcgccgatgacgagagcaaccgctttacgctgccgcaggcggtgaagctggtgactaaaaatccagcgcaggcgcttaatctccaggatcgcggggtgattggcgagggcaaacgcgcggacttggtgctggcgcatcgcaagggcaatcacattcatatcgaccacgtctggcgtcagggtaaaagggtgttctga

SEQ ID NO: 486015 - DNA, 681 bp, Shigella sonnei
atgattaacgtacaaaacgtcagtaaaaccttcatcctgcaccagcaaaacggcgtgcgcctgcccgtcctcaaccgcgcctcgctcatcgtcaacgcgggcgaatgcgtggtgctccacggccattccggcagcggaaaatcaaccctgctacgctcgctgtacgccaactatctgcccgacgaagggcaaatccagatcaaacacggtgacgaatgggtcgatctggtcaccgcgccagcgcgcaaagtggtggagatccgcaaaaccaccgttggctgggtgagccagtttctgcgcgtcatcccgcgtatttcggcgctggaagtggtgatgcagccgctactcgataccggcgtaccgcgtgaagcctgcgccgctaaagccgcgcgtctgctcacccgcctgaacgtgccggaacgcctgtggcatctggcgccatcgaccttctccggcggcgaacagcagcgcgtcaacatcgcccgcggctttatcgtcgactaccccattctgctgctcgacgaacctaccgcctcgctggacgccaaaaacagcgccgccgtagtcgagctgattcacgaagccaaagcccgtggcgcggccatcgtcggcatcttccacgacgaagccgtacgtaatgacgttgccgaccgcctgcacccaatggaagcctcttcatga

SEQ ID NO: 486016 - DNA, 759 bp, Shigella sonnei
atgaatcaaccgttactttcggtcaataacctgacccacctttacgcgccgggcaaaggctttagcgatgtctcttttgatttatggccgggggaagtgctgggcattgtcggggaatccggctccgggaagaccacgctgctgaagtcgatctccgcgcgtctgacgccgcagcagggggagattcactatgaaaaccgttccctctatgcaatgagcgaggccgaccgccgtcgcctgctgcgcaccgaatggggcgtggtgcatcagcatccgctcgacggcctgcgccgccaggtgtcggcaggcggcaatatcggcgagcggctgatggcgaccggggcgcgacattacggcgatattcgcgctaccgcgcagaagtggctggaagaggtggagattcccgccaaccgtatcgacgacctgccgaccaccttttccggcggtatgcagcagcgtttgcagattgcccgcaacctggtgacgcatccgaagctggtgtttatggatgaaccgaccggcgggctggatgtgtcggtgcaggcccgcctgctcgacctgctgcgcggactggtggtggagctgaacctcgcggtagtgattgtcacccacgatttaggcgtcgcccgcctgctggcggaccgtttgctggtgatgaagcaggggcaagtggtggagagtgggttaaccgaccgcgtgctcgacgacccgcatcatccgtatacacagctgctggtgtcatcggttttgcagaattga

SEQ ID NO: 486017 - DNA, 846 bp, Shigella sonnei
atggctaatctgagcggctacaactttgcctacctcgacgagcagaccaaacgcatgatccgccgcgccatcttaaaagcggtggcgatccccggttatcaggtaccgtttggcgggcgcgagatgccgatgccgtacggctggggaactggtggtatccagctcaccgccagcgtgattggcgaaagcgacgtgttgaaggtgattgaccagggtgcggatgacaccaccaacgccgtgtcgattcgcaacttctttaagcgcgtgaccggggtaaacaccactgaatgtacggacgatgcgacgcttatccagacgcgtcaccgcatccccgaaacgccgctgaccgaagatcagatcattatcttccaggtgccaatcccggaaccgctgcgctttatcgagccgcgcgaaacggagacccgcactatgcacgcgctggaggagtacggcgtgatgcaggtgaaactgtatgaagatatcgcccgcttcggtcatatcgccaccacctatgcttatccggtgaaggtgaacgggcgctacgtgatggacccgtcgccgatcccgaaattcgataacccgaaaatggacatgatgcccgccctgcagctgttcggcgcagggcgcgagaagcgcatctatgcggtgccgccgtttacccgcgtggaaagtctcgatttcgacgatcacccgttcaccgttcagcagtgggatgagccatgcgccatctgcggatcgacccacagctatcttgatgaagtggtgctggatgacgccggaaaccgcatgtttgtctgctccgataccgattattgccgccaacagagcgaggcgaaaagccaatga

SEQ ID NO: 486018 - DNA, 1065 bp, Shigella sonnei
atgtacgttgccgtgaaagggggcgaaaaggcgatcgacgccgcccacgccctgcaagagagccgacgccggggcgataccgatttgcccgaactgagcgtcgcccagattgaacagcagcttaacctcgcggtggatcgcgtgatgacagaaggcggcattgccgaccgcgaactggcggcgctggcgctgaaacaggccagcggcgataacgtcgaagcgattttcctgctacgcgcctaccgcaccacgctgacgaaactggcggtaagcgagccgctcgacaccacggagatgcgtctcgaacggcgtatttcagcggtttataaagatattcccggcggccagctgcttggcccaacctacgactacacccatcgcctgctcgatttcactctgctggcaaacggcgaagcgccgacgctgaccaccgccgacagcgaacaacagccgtcgccgcacgttttcagcctgctggcgcgtcaggggctggcgaagtttgaagaggatagcggagcacagccggatgacatcacccgcacgccgccggtttacccctgttcacgttcttcccgtttgcagcagttaatgcgcggcgacgaaggctatttgctggcgctggcttactccacccagcgcggttacgggcgcaaccacccgttcgcgggcgagatccgcagtggttacatcgacgtgtcgattgtgccggaagagctgggatttgcggtaaacgtcggcgaactgctgatgaccgagtgtgaaatggtcaacggttttatcgacccgccggatgagccgccgcacttcacgcgcggctacgggctggtattcggcatgagcgagcgcaaagcgatggcaatggcgctggttgaccgtgcgttgcaagccccggaatacggcgagcacgcgacaggcccggcgcaggatgaagagttcgtgctggcgcatgccgacaacgtcgaagccgcaggctttgtctcgcacctcaaactcccgcactacgtcgatttccaggccgaactggagctactcaaacgtctgcaacaggagcagaaccatggctaa

SEQ ID NO: 486019 - DNA, 585 bp, Shigella sonnei
atgaccctggaaaccgcttttatgcttcccgtgcaggatgcccagcacagttttcgtcgcctgttaaaggccatgagcgagccgggcgtgattgtcgccctgtatcagctcaaacgcggctggcagccgctgaatatcgccaccaccagcgtgctgctgacgctggccgataacgacacgccggtgtggcttgccacgccattaagtaacgatatcgtcaatcagagcctgcgttttcataccaacgcgccgctggtcagccagccggaacaggcgaccttcgcggtgacggatgaggcgatttccagcgaacagctcaacgccctttccaccgacaccgccgttgcgccggaagcgggcgcgacgctgattttacaggtcgccagcctgagcggcggacgcatgttgcgtctcaccggcgcgggcattgccgaagaacgaatgatcgctccgcagctgccagagtgcattctgcacgaactcaccgagcgcccgcacccgttcccgctcggcatcgacctaatcctgacctgcggcgagcgcctgctggctatcccgcgaaccactcatgtggaggtgtgctga

SEQ ID NO: 486020 - DNA, 453 bp, Shigella sonnei
atgcacgcagataccgcgacccgccagcactggatgtccgtactggcgcacagccaaccggctgaactggcagcccgcctgaacgcgctgaacatcaccgccgactatgaagtgatccgcactgccgaaactggcctggtgcagattcaggcgcgaatgggcggtaccggcgaacgcttttttgccggcgacgccacgctgacccgtgccgccgtacgcctgactgacggcaccctcggctacagctgggtgctggggcgtgataaacagcacgccgaacgctgcgcgctgattgatgcgctgatgcagcaatctcgccactttcaaaacttatcagaaacccttattgccccgctggacgctgaccgtatggcacgcattgccgcacgccaggccgaagtgaacgccagccgggtcgacttctttacgatggttcgcggagacaacgcatga

SEQ ID NO: 486021 - DNA, 726 bp, Shigella sonnei
atgcacttgtctacacatccgaccagctacccaacacgctatcaggagatagccgcaaaacttgagcaggagcttcgtcaacactatcgctgcggcgactatcttcccgccgagcagcaactggcggcgcgctttgaggtaaaccgccacaccctgcgccgcgccatcgaccaactggtggaaaaaggctgggtacagcgccgtcagggcatcggcgtgctggtgctgatgcgcccgttcgattacccgctcaacgcccaggcgcgttttagccagaacctgctggaccagggcagccatcccaccagcgaaaaactgctgtcggtattgcgccccgcgtccggtcacgttgctgacgcgctggggattaccgagggtgagaacgttatccatttgcgcaccctgcgtcgcgtcaacggcgtcgcgctctgtttaatcgaccactactttgcggacctcaccctctggccgacactgcaacgtttcgacagcggttcgctgcacgattttctgcgcgagcaaaccggaattgcgctgcgccgcagccagacgcggatcagcgcccgccgcgcccaggccaaagagtgccagcgccttgaaatcccgaatatgtcgccgctgctgtgcgtgcgcacccttaaccaccgtgacggtgaaagcagcccggcggagtactccgtcagcctgacgcgcgccgacatgattgaattcactatggagcactga

SEQ ID NO: 486022 - DNA, 780 bp, Shigella sonnei
atgcaaaccatcaccatcgccccacccaagcgcagctggttctcgcttctgagctgggccattgttctcgccgtgttggtcgtctcgtggcagggcgcggaaatggccccgcttacgctgatcaaagacggcggcaacatggcgaccttcgccgccgacttcttcccgcccgatttcagccagtggcaggattacctcaccgaaatggccgtcacgctgcaaatcgccgtctggggcaccgcgctggcagtggttctctccatccccttcggcctgatgagcgccgaaaacctggtgccgtggtgggtttaccagcccgttcgccgcctgatggacgcctgccgcgccattaacgaaatggtcttcgccatgctgttcgtggtcgccgtcggtctcggaccgttcgctggcgtgctggcgctatttattcacaccaccggcgtgctctcgaaactgctttccgaagcggtggaagcgattgaacccggcccggtggaaggcattcgcgccaccggcgccaacaagctggaagagatcctttacggcgtgctgccacaggtaatgccgctgctgatctcctactccctctatcgcttcgaatccaacgtccgctcggcgaccgtcgtcggcatggtcggtgcaggcgggatcggcgtcaccctgtgggaagcgattcgcggtttccagttccaacaaacctgcgccctgatggtgcttatcatcgtcacggtcagcctgctggatttcctctctcaacggttgcgtaagcactttatctga

SEQ ID NO: 486023 - DNA, 1017 bp, Shigella sonnei
atgaacgctaagataattgcctcgctggccttcaccagcatgttcagcctcagcaccctgttaagcccggcacacgccgaagagcaggaaaaggcgctgaatttcggcattatttcaacggaatcacagcaaaacctgaaaccgcaatggacgccattcttacaggatatggagaagaagctgggcgtgaaggtgaacgccttctttgccccagactacgcaggcattatccagggaatgcgcttcaataaagtggatatcgcctggtacggcaacctgtcggcaatggaagcggtggatcgcgccaacggccaggtcttcgcccagacggtcgcggcggatggatcgccaggttactggagcgtgttgatcgtcaacaaagatagtccgatcaacaacctgaacgatctgctggcgaagcggaaagatctcaccttcggcaatggcgatcctaactccacctctggcttcctcgtccccggttactacgtctttgccaaaaacaatatctccgccagcgactttaagcgcaccgtcaacgccgggcatgaaaccaacgcgctggccgtcgccaacaagcaggtggatgttgccaccaacaacaccgaaaacctcgacaagctgaaaacctccgcgccagagaagctgaaagaactgaaggtgatctggaagtcgccgctgatcccaggcgatccgatcgtctggcgcaagaatctctccgaaaccaccaaagacaagatctacgacttctttatgaactacggaaaaacgccggaagagaaagcggtgctggaacgcctgggctgggcaccgtttcgcgcctccagcgacctgcaactggtgccgattcgccagctcgcactgtttaaagagattcagggcgtaaaaagcaataacggactgaatgagcaggacaagctggcgaaaaccaccgagattcaggcgcagctggatgacctggaccgcctgaacaacgcgttaagcgcgatgagttcggtgagtaaagcggtgcagtaa

SEQ ID NO: 486024 - DNA, 789 bp, Shigella sonnei
atgcaaacgattatccgtgtcgagaagctcgccaaaaccttcaatcagcatcaggcgctgcatgcggttgctctgaacattcatcacggtgaaatggtggctctgcttgggccgtcgggttccggcaaatccacccttttacgtcacttaagcggtttgattaccggcgataaatccgccggcagccatatcgagctgctgggccgcacagtccagcgcgaaggccgtctggcgcgcgatatccgcaaaagccgcgccaacaccggctacatcttccaacaattcaacctggtgaaccgcctgagcgtactggagaacgtgctgattggcgcgctcggcagcacgccgttctggcgcacctgttttagctggtttacccgcgagcagaaacaacgcgcgttacaggcgctgacccgcgttggcatggtgcattttgcccatcaacgcgtttccaccctctccggcggacagcagcagcgtgtggcgattgcccgcgcgctgatgcagcaggcgaaggtgattctggccgatgaacccatcgcctcgctggacccggaatccgcccgcatcgtgatggacaccctgcgcgacatcaatcagaacgacggcatcaccgtggtcgtcacgctgcatcaggtggattacgccctgcgctactgcgaacgcatcgtcgccctgcgccaggggcacgttttctacgacggcagcagccaacagtttgataacgaacgttttgaccatctctaccgcagcattaatcgcatcgaagagaacgcgaaagctgcctga

SEQ ID NO: 486025 - DNA, 363 bp, Shigella sonnei
atgccgttaagtccctacctctcttttgccggtaactgtgccgacgcaattgcttattatcaacgtacgttgggcgctgaactgctctataaaatcagcttcggcgaaatgccaaaatcagcgcaggacagcgccgagaactgcccttccggaatgcaatttcccgataccgccatcgcccacgccaatgtgcgcattgccggaagcgacatcatgatgagcgatgccatgccgtcaggaaaagccagctactccggctttacgctggtgctcgattcgcaacaggtcgaagaaggaaaacgctggtttgacaatcttgccgctaacggaaaaatcgaaatggcctggcaggaaactttctag

SEQ ID NO: 486026 - DNA, 336 bp, Shigella sonnei; identical to SEQ ID NO: 461045

SEQ ID NO: 486027 - DNA, 2229 bp, Shigella sonnei
atgtacacacagaccctgtatgagttaagtcaggaggctgaacgcctgttacagctttctcgccaacagttgcagttactggaaaaaatgcctctctctgtacccggagacgacgcgccacaactggctttaccctggagtcagcctaatatcgccgaacgtcacgcgatgctgaataatgagttgagtaaaatttcccgactggaaatggtgctggcgattgtcggtactatgaaagcagggaaatcaaccaccattaatgccattgttggtacggaggttctgcctaatcgtaatcgcccaatgactgcgctgccgacgcttattcgccatacgcccgggcaaaaggaaccggtactgcatttttcacatgtcgcgccaatcgattgtttaattcaacaattacaacagcgcctgcgtgattgcgatattaagcatctgaccgatgtgctggaaatagataaagatatgcgtgcgcttatgcagcggatcgaaaatggcgtcgctttcgaaaaatattatctgggtgcccagcctatttttcattgtctgaaaagtttgaatgatttagtgcgactggcgaaggcgctggacgtcgattttcctttttctgcttacgccgccattgagcatattcccgtgattgaagtggagtttgtccatctggcggggctggagagttatcccggtcagttgacgttactggatacccccgggccaaatgaagccgggcaaccgcatctgcaaaaaatgcttaaccagcagctggcacgcgcctcggcggtactggcggtgctggattatacgcaactgaaatcgatctccgatgaagaggtccgtgaggcgattttggcggtggggcaatcggtgccactgtatgtgctggtcaataagttcgatcaacaggatcgtaacagtgacgacgccgaccaggtgcgggcactgatttccgggacgctgatgaaaggctgtattacgccacagcagatatttccggtgtcgtcgatgtggggctacttggcaaatcgagcgcgccatgagttagccaacaacggtaagttaccagcgccagagcaacaacgctgggtggaagattttgcccatgccgcgctcggcaggcgctggcgtcatgccgatctggcggacctcgaacatattcgtcatgctgccgatcagttgtgggaagattcgctgttcgcccagccaattcaggcgttgcttcatgccgcttacgctaacgcctcgttgtatgctctgcgatctgctgcgcataaactgttgaattacgcgcagcaggcgcgggaatacctggattttcgtgcgcacgggttaaacgtcgcttgtgaacaattgcggcaaaatatccatcaggtcgaagaaagtttgcagctattgcaactcaatcaggcgcaggtgagcggcgagattaaacatgaaatcgagctggccctgacctccgccaaccactttctgcgtcaacagcaagatgcgctgaatgcgcagttagccgccttgtttcaggatgattcggagccgttaagcgagattcgtacctgctgtgagacactgttacagacggcgcagaacaccatcagtcgcgactttacgctgcgttttgccgagcttgaatccaccctttgccgggtgttaaccgatgttattcggcccattgagcaacaagtcaaaatggaattgagcgagtcagggtttcgtcctggggttcattttcctgtttttcacggagtagttccccacgtcaacactcgccagctgttcagtgaagtcatttcgcgccaggatgcaacggacgagcagagcacgcgtttaggcgttgtgcgtgagactttttcgcgctggttgaatcagcccgactggggacggggaaatgagaaatccccgacagagacggttgattacagtgtgttgcaacgagctttaagcgcagaagtcgatctttattgccaacaaatggctaaagttctggcagagcaggtcgatgaatctgttacggcaggcatgaatactttttgcgctgagttcgcttcatgtttgacggaattacagacgcgtttacgcgaaagcctggctctgcgtcaacaaaatgaatcggtggtcaggctgatgcagcagcaattgcagcagactgtgatgactcacggctggatttacaccgacgcccagctgttacgcgatgatattcaaacacttttcacggcagaacgatattga

SEQ ID NO: 486028 - DNA, 867 bp, Shigella sonnei
ttgaccaagacgttactggacggccccggtcgcgtgctggagtcggtttatccccgctttttagtggatctggcgcagggcgatgatgcccgccttccacaagcccatcagcagcagtttcgtgaacgactgatgcaggaacttctttcgcgtgtgcagcttcagacatggacgaacggcggcatgttaaatgcgccgcttagcctgcgactgacaatggtggaaaaactggcgtcgatgctggatcccggtcatctggcgctgacgcagatcgcgcagcatctggcgctgctgcaaaaaatggatcaccgccagcactctgctttcccggagctcccccagcaaattgccgccttgtatgagtggttttcagcccgttgtcgctggaaggaaaaggcgttaacgcaacgaggcctactggtgcaggcaggtgatcagagcgagcaaatttttacccgctggcgtgctggggcgtataacgcctggtcgttgcctgggcgctgttttatcgttctggaggagttgcgctggggtgcatttggcgatgcctgccgtctgggaagcccgcaagcggtggtgttgttactgggtgatttgcgcgagaaagcgacacaacatctggcagagagtatcaatgcggcaccgaccacgcgtcactattaccatcagtggtttgcctcttcgggaggggagcatgctgattttttaagttggctgggaaagtggtccacggcagataaacagcccgtttgctggtcagtgacccaacgctggcaaacagtcgcgctggggatgccacgactctgttcagcgcagcgtttggtgggggcaatggtcgaggaaatcttctctgtaaatttggcgtaa

SEQ ID NO: 486029 - DNA, 1503 bp, Shigella sonnei
atgctgaaaaggaaaaaagtaaaaccgattacccttcgtgatgtcaccattattgatgacggtaaactgcgtaaagccattaccgcagcatcactgggtaatgcaatggaatggttcgattttggtgtttatggttttgttgcttacgcattaggtaaagtttttttcccgggggctgaccccagcgtgcagatggttgctgcacttgccactttctccgttccctttctgattcgaccgcttggcgggctcttctttggtatgttgggcgataaatatggtcgccagaagatcctcgctatcactattgtgattatgtcgatcagtacgttctgtattggcttaataccgtcctacgacacgattggtatttgggcaccgattctgctgttgatctgtaagatggcacaaggtttctcggtcggcggtgaatataccggggcgtcgatatttgttgcggaatactcccctgaccgtaaacgtggctttatgggcagctggctggacttcggttctattgccgggtttgtgctgggtgcgggcgtggtggtgttaatttcgaccattgtcggcgaagcgaacttcctcgactggggctggcgtattccgttctttattgctctgccgttagggattatcgggctttacctgcgccatgcgctggaagaaactccggcgttccagcagcatgttgataaactggaacagggcgaccgcgaaggtttgcaggatggcccgaaagtctcgtttaaagagattgccactaaatactggcgcagcctgttgacatgtattggtctggtaattgccaccaacgtgacttactacatgttgctgacctatatgccgagttatttgtcgcataacctgcattactccgaagaccacggggtgctgattattatcgccattatgatcggtatgctgtttgtccagccggtgatgggcttgctgagtgaccgttttggccgtcgtccgtttgtgctacttggtagtgttgccctgtttgtgttggcgatcccggcgtttattctgattaacagtaacgtcatcggcctgatttttgccgggttactgatgctggcggtgatccttaactgctttacgggcgttatggcttctaccttgccagcgatgttcccgacgcatatccgttacagcgcgctggcggcggcatttaatatttcggtgctggttgccggtctgacgccaacactggcggcctggctggtcgaaagctcgcagaatctgatgatgcctgcctattacctgatggtagtggcggtgattggtttaatcaccggcgtaaccatgaaagagacggcaaatcgtccgttgaaaggtgcgacaccggcggcgtcagatatacaggaagcgaaggaaattctcgtcgagcattacgataatatcgagcagaaaatcgatgatattgaccacgagattgccgatttgcaggcgaaacgtacccgcctggtgcagcaacatccgcgaattgatgaataa

SEQ ID NO: 486030 - DNA, 1101 bp, Shigella sonnei
ttgaatctgatgcgttttctgcgccgaccaatatcgctgcgccaacggctgatattgaccatcggggccattttgttggtgtttgagctgatcagcatcttctggctatggcatgaaagtaccgagcagattcagctgtttgagcaggcgctacgcgacaatcgcaacaacgatcgccacatcatgcgtgagatccgcgaggcggtcgccagcctgattgtccccggcgtctttatggtcagcctgacgctatttatctgctatcaggcggtacgccgcatcacccgcccgctggcggagctgcaaaaagagctggaagcgcgcaccgccgacaacttaacgcccattgccattcacagcgccaccctcgaaatcgaagcggtggtttcggcgttgaacgatctggtcagtcgcctgacgagcacgctggataacgaaaggttatttaccgctgacgtcgcgcacgaactgcgaacgccactggcgggggtgcgtttgcatctggaactgctggcgaaaacgcatcacattgatgtagcaccgttagtggcacggcttgatcagatgatggagagcgtctcccagctgctgcaactggcgcgtgccggacagtcattttcttccggtaattatcaacatgtaaaactgctggaagatgtcattctcccctcgtatgacgaactcagtaccatgctcgaccagcgacagcaaaccctgctattgccagagagcgccgccgacatcaccgttcagggtgatgcaaccctgctgcggatgttattgcgaaacctggtagaaaacgcccatcgttacagcccacaaggcagcaacattatgattaagctgcaagaagatggcggagcggtcatggccgttgaagatgaaggaccgggtattgatgagagtaaatgcggggagttgagtaaagcgtttgtacgtatggacagccgttatggcgggattggtctggggttaagtattgtcagccgcattacacagttgcatcacgggcagtttttcctgcaaaaccggcaagagacttccggcacgcgggcctgggtacggctgaagaaagatcagtacgtagcaaaccagatataa

SEQ ID NO: 486031 - DNA, 669 bp, Shigella sonnei
atgaaaattctgattgttgaagacgatacgctgttattgcagggactgattctggcggcgcaaaccgaaggctacacgtgcgatggcgtaacaaccgcgcggatggcggaacaaagccttgaggccggtcattacagcctggtggtactggatttagggttacccgacgaagatggactgcattttctcgcccgtatccggcagaaaaaatacaccctgccggtactgatcctcaccgctcgcgatacgctgaccgacaaaatcgccgggctggatgtcggtgccgatgactatctggtgaagccttttgcgctggaagagttacacgcccgtatccgcgccctgctacgacgccataataatcagggcgaaagtgagctgattgttggcaatctgacgctgaatatgggtcgccgtcaggtatggatgggcggtgaagagttgattctgacgcccaaagaatatgctctgctgtcacggttaatgctcaaagcaggcagtccggtacatcgggaaattctctacaacgacatctataactgggacaatgaaccctcgaccaacaccctggaagtgcatatccacaatctgcgcgacaaagtgggcaaagcccgtatccgcaccgtgcgcggctttggctatatgctggtcgcgaatgaggaaaactaa

SEQ ID NO: 486032 - DNA, 1644 bp, Shigella sonnei
atgttgaagcgcctactaaaaagcccctctttgaatttactcgcctggctattgttggccgctttttatatctctatctgcctgaatattgccttttttaaacaggtgttgcaggcgctgccgctggattcgctgcataacgtactggttttcttgtcgatgccggtcgtcgctttcagcgtgattaatattgtcctgacactaagctctttcttatggcttaatcgaccactggcctgcctgtttattctggttggcgcggctgcacaatatttcataatgacttacggcatcgtcatcgaccgctcgatgattgccaatattattgataccactccagcagaaagttatgcgctgatgacaccgcaaatgttattaacgctgggattcagcggcgtgcttgctgcgctgattgcctgctggctaaaaatcaaacctgccacctcgcgtctgcgcagtgttcttttccgtggagccaatattctggtttctgtactgctgattttgctggtcgccgcactgttttataaagactacgcctcgttgttccgcaataacaaagagctggtgaaatccttaagcccctctaacagcattgttgccagctggtcatggtactcccatcagcgactggcaaatctaccgctggtgcgaattggtgaagacgcccaccgcaacccgttaatgcagaacgaaaaacgtaaaaatttgaccatcctgattgtcggcgaaacctcgcgggcggagaacttctccctcaacggctacccgcgtgaaactaacccgcggctggcgaaagataacgtggtctatttccctaataccgcatcttgcggcacggcaacggcagtttcagtaccgtgcatgttctcggatatgccgcgtgagcattacaaagaagagctggcacagcaccaggaaggcgtgctggatatcattcagcaagcgggcatcaacgtgctgtggaatgacaacgatggcggctgtaaaggtgcctgcgaccgcgtgcctcaccagaacgtcaccgcgctgaatctgcctggtcagtgcatcaacggcgaatgctatgacgaagtgctgttccacgggctggaagagtacatcaataacctgcagggtgatggcgtgattgtcttacacaccatcggcagccacggtccgacctattacaaccgctatccgccgcagttcaggaaatttaccccaacctgcgacaccaatgagatccagacctgtaccaaagagcaactggtgaacacttacgacaacacgctggtttacgtcgactatattgttgataaagcgattaatctgctgaaagaacatcaggataaatttaccaccagcctggtttatctttctgaccacggtgaatcgttaggtgaaaatggcatctatctgcacggtctaccttatgccatcgccccggatagccaaaaacaggtgccgatgctgctgtggctgtcggaggattatcaaaaacggtatcaggttgaccagaactgcctgcaaaaacaggcgcaaacgcaacactattcacaagacaatttattctccacgctattgggattaactggcgttgagacgaagtattaccaggctgcggatgatgttctgcaaacttgcaggagagtgagtgaatga

SEQ ID NO: 486033 - DNA, 1338 bp, Shigella sonnei
atgtcttcggatgctgatgctcacaaagtgggcttaatccccgtcaccctgatggtgtcggggaatattatggggtcaggtgtttttctgttacctgcaaacctggcctccactggcgggattgccatttatggatggttggtgacgattatcggtgcgctggggctctcgatggtatacgccaaaatgtcgttcctcgatccaagtcctggtggttcttacgcttacgcccgccgctgctttggcccgtttctcggttatcaaaccaacgtcctctactggctggcctgctggatcggcaatatcgctatggtggtcattggcgtaggatatttaagttacttcttcccgattctgaaagatccattggtattaaccatcacctgcgtcgtggtgctgtggatcttcgtcctgctgaacattgtcggtccgaaaatgatcacccgtgtgcaggccgttgccaccgtgctggcgctgatccccatcgtcgggattgccgtatttggctggttctggttccgtggtgaaacctatatggcggcatggaacgtcagcggcctgggcaccttcggtgcgattcaaagtacccttaacgttacgctgtggtcgttcatcggtgtggaaagtgcctccgttgccgcaggtgtggtgaaaaacccgaaacgcaatgtccctatcgccaccattggtggggtattgattgccgccgtttgctatgtgctctccaccaccgcgattatggggatgatccctaatgccgcactgcgcgtttctgcctcgccattcggtgatgccgcacggatggcgttgggtgacaccgctggggccattgtttccttctgcgcagctgcgggttgcttaggttcactgggcggctggacgttgctggcgggtcaaacggcgaaagccgctgccgatgacggactgttcccaccgatttttgcccgtgtaaataaagcgggtacgccagtggcggggctgattatcgtcggtattttgatgaccatcttccagctcagtagcatttcgccaaacgcaaccaaagagttcggtctggtatcttccgtgtcggtcatctttacactggtgccatatctttacacctgtgcggcgttactgctgctcggccacggtcactttggtaaagcacgcccggcatatctggctgttactaccattgccttcctctactgcatctgggccgtggtggggtccggggcgaaagaggttatgtggtcatttgtcaccctgatggtcatcaccgccatgtatgcgctgaattacaaccggctacataaaaacccgtatcccttagatgcaccaataagcaaagattaa

SEQ ID NO: 486034 - DNA, 762 bp, Shigella sonnei
atgaggatttgcagcgaccaaccttgtattgttttattgactgaaaaagatgtctggataagggtgaatgggaaagaacctattagccttaaagctaaccatatggcgttattaaattgtgaaaataatattatcgacgtctcctctcttaacaacactttggttgctcatattagtcacgacatcatcaaagattacctccggtttctgaataaagatctctcgcaaataccagtatggcaacgtagcgctacgcccatactcaccctgccatgcctgacgccagacgtctttcgcgttgccgcgcaacacagcatgatgcccgcagaaactgagtcagaaaaggaacgaacacgcgcattattattcacggtgctatcccgttttctcgacagtaaaaaattcctttcattaatgatgtatatgttacgtaattgtgtaagtgacagcgtttatcaaattattgaaagcgatattcacaaagactggaatcttagtatggtagccagttgtttatgtcttagcccaagtctgttaaagaaaaagctgaaaagcgaaaacaccagttatagccaaataatcaccacctgccgcatgcgttatgccgtaaatgaattaatgatggacggtaaaaatatctctcaggtatcacagtcctgcggctacaacagtacgtcgtactttatttctgtctttaaagacttctacggtatgacgccgctgcattatgttagtcagcacagagaacgaactgtcgcctga

SEQ ID NO: 486035 - DNA, 2271 bp, Shigella sonnei
atgatgaaagtattaattgttgaaagcgagtttctccatcaagacacctgggtcggtaacgccgttgagcgtctggcagatgctttaagccagcaaaatgttaccgtgattaaatccacctcctttgatgatggttttgccattctctcttcaaacgaagccattgactgcctgatgttcagctatcaaatggaacatccggacgaacatcaaaacgtcagacaattgatcggtaagcttcatgagcgccaacaaaacgtgccggtcttcctgttgggcgatcgggaaaaagccctcgccgcaatggatcgcgacctgctggagcttgtcgatgaattcgcctggattctggaagataccgccgactttatcgccggacgcgctgttgccgcgatgacccgctaccgccagcagctgttgccgccactgttcagcgcgctgatgaaatatagcgacatccatgaatattcctgggcagcgccaggccaccagggcggcgttggttttaccaaaacacccgccggacgtttctaccatgactactatggtgaaaatctgttccgcaccgatatgggcatcgaacgaacttccctcggttctttgcttgaccatactggcgcatttggcgaaagcgaaaaatatgccgcacgcgtatttggtgccgatcgctcctggtcggtagtcgtcggtacttccggctctaaccgcaccatcatgcaggcttgcatgaccgataacgatgtcgtggtcgttgaccgtaactgccataaatccatcgaacaaggcttgatgctgacaggcgcgaaaccggtctacatggtgccaagccgcaaccgctacggcattatcgggccaatctatccgcaggaaatgcaacctgaaaccttgcagaagaaaatcagtgaaagcccgctgactaaagacaaagccgggcaaaaaccgtcttactgcgtggtgaccaactgcacctatgacggcgtgtgttataacgctaaagaagcgcaggatctgctggaaaaaacctccgatcgtctgcactttgacgaagcctggtacggctatgcacgtttcaacccgatctatgccgatcactatgccatgcgcggcgaacctggcgatcacaacggtcctaccgttttcgccacccactccacccacaaactgctgaatgcgctttcacaggcttcttatattcatgtacgtgaaggtcgtggggcgattaacttctcccgcttcaaccaggcctacatgatgcatgccaccacctccccgctgtatgccatctgcgcatccaacgacgtggcggtgtcgatgatggacggcaacagcggcctgtcactgacgcaggaagtgatcgacgaagcggttgatttccgtcaggcgatggcgcggctgtataaagagttcaccgctgacggtagctggttcttcaaaccgtggaacaaagaagtcgtcaccgacccacaaaccggcaaaacctatgactttgctgacgcaccaaccaaactgctgaccaccgttcaggactgctgggtaatgcatccgggcgaaagctggcacggcttcaaagatattccggataactggagtatgctcgacccgattaaagtcagcatccttgctccgggaatgggtgaagatggtgaactggaagaaaccggtgttccggcggcgctggtcactgcctggcttggtcgccacggcattgtgcctacccgcaccactgacttccaaattatgttcctgttctctatgggcgtaacccgtgggaaatggggaactctggttaacaccctttgctccttcaaacgccactatgacgccaacacaccgctggcgcaggtgatgccggaacttgttgaacaatatcctgacacttacgcgaacatggggattcacgatctgggtgacaccatgtttgcctggctgaaagaaaacaaccctggcgcacggttgaacgaagcctattccggcctgtcggtggcggaaatcaccccgcgtgaagcgtacaacgcgattgtcgacaacaatgtcgaactggtatccattgaaaatctgccaggacgcatcgcggcaaactcagttatcccatatccgccaggaatcccgatgctgctgtctggtgaaaacttcggcgataaaaacagtccgcaagtaagttatttacgctcgctgcaatcctgggaccaccatttccctggatttgaacacgaaactgaagggactgaaattattgacggtatttaccacgttatgtgtgtgaaagcgtaa

SEQ ID NO: 486036 - DNA, 909 bp, Shigella sonnei
atgaatacagatacgtttatgtgcagcagcgacgaaaaacagacccgcagcccgctgtcgctgtattcggaataccagcggatggagattgagtttcgcgcaccgcatatcatgcccaccagccactggcatggtcaagtcgaagtgaatgtgcctttcgatggcgatgtggaatacctgatcaacaatgaaaaagtgaatatcaatcagggtaatatcacgctgttctgggcctgtacaccgcaccaactaacagataccggaacctgtcagagcatggcgatttttaatctgccgatgcatctgtttctctcctggccgctggataaagacctgattaaccacgtcactcacggcatggtgatcaaatcactggccacacagcaacttagcccgtttgaagtgcgccgctggcagcaggaattaaacagtccgaacgagcaaattcgccagctcgccattgatgaaattggcctgatgctcaagcgatttagcctctctggctgggaaccgattctggtcaataaaacctcgcgcacacacaaaaacagcgtctcgcgccatgcgcaattttatgttagccagatgctgggctttattgccgaaaactatgatcaggcgctgaccatcaacgatgtggctgagcacgtcaaacttaacgccaactatgcaatggggatattccagcgggtcatgcaattgacgatgaaacagtacattaccgcgatgcgcatcaaccacgttcgcgcgttactgagcgataccgataaaagtattctcgatattgccctgacggcaggctttcgttcaagtagtcgtttttacagcacgttcggcaaatatgtcggcatgtcgccgcaacaataccgcaaacttagccaacagcgccgccagacgtttcccggctaa

SEQ ID NO: 486037 - DNA, 1356 bp, Shigella sonnei
atgatgactgcacccaaaattacatttatcggcgctggttcgacgattttcgttaaaaatattcttggtgatgtgttccatcgcgaggcgctgaaaacggcgcatattgccctgatggacattgatcccacccgcctggaagagtcgcatattgtggtgcgtaagctgatggattcagcaggggccagcggcaaaatcacctgccacacccaacagaaagaagccttacaggatgccgattttgtcgtggtggcatttcagattggcggttatgaaccttgcacggtgactgatttcgaggtctgtaagcggcatggtctggaacaaaccattgccgatacgttggggccgggcggtattatgcgcgcgctacgtaccattccgcatctgtggcaaatttgcgaggacatgacggaagtctgccccgatgccaccatgctcaactacgttaacccaatggcgatgaatacctgggcgatgtatgcccgctatctgcatatcaaacaggtagggctgtgccattcggtgcagggaacggcggaagagctggcgcgtgacctcaatatcgatccgtccacgctgcgttaccgttgcgctggtatcaaccatatggcgttttacctggaactggagcgtaaaaccgccgacggcagttacgtgaatctctacccggaactgctggcggcttatgaagcagggcaggcaccgaagccaaatattcatggtaatactcgctgccagaatattgtgcgctacgaaatgttcaaaaagctgggctacttcgttacggaatcgtcagaacattttgctgaatacacgccgtggtttattaagccaggtcgtgaggatttgattgagcgttataaagtaccgctggatgagtacccgaaacgctgcgtcgagcagctggcgaactggcataaagagctggaggagtataaaaacgcctcccggattgatattaaaccgtcacgagaatatgccagcacaatcatgaacgctatctggactggcgagccgagtgtgatttacggcaacgtccgtaacgatggtttgattgataacctgccacaaggatgttgcgtggaagtagcctgtctggttgatgctaatggcattcagccgactaaagtcggtacgctaccttcgcatctggccgccctgatgcaaaccaacatcaatgtacagacgctgctgaccgaagctattcttacggaaaatcgcgaccgtgtttaccacgccgcgatgatggacccgcatactgccgccgtgctgggcattgacgaaatatatgctcttgttgacgacctgattgccgcccacggcgactggctgccaggctggttgcaccgttaa

SEQ ID NO: 486038 - DNA, 858 bp, Shigella sonnei
atgactacaaaactcagttatggatttggagcgttcgggaaggattttgcgatcggcattgtgtatatgtacctcatgtattactacaccgatgtcgttgggctgtctgtgggtttggtcggtactttgtttctggtggcgaggatctgggatgctattaacgatccgattatgggatggattgtaaatgctacgcgatcgcgatggggtaagttcaaaccctggatcctgatcggtacgttggcaaactctgtaatcttatttctcctctttagtgcgcatctgtttgaaggtactactcagattgtctttgtttgcgtgacctacatcctctggggcatgacttacaccattatggatattcccttctggtcgctggttccaaccatcacgctcgataaacgtgagcgtgaacaactggttccttatccgcgtttttttgccagtctggcgggctttgttacggcaggtgtgacgctaccatttgttaattatgtcggcggtggcgatcggggatttggctttcagatgttcacactggtactgatcgccttttttattgtttcaaccatcatcactctgcgcaatgtgcatgaagtcttttcgtcagacaatcaaccgtctgctgaaggaagccatctgacacttaaagccatcgttgcgctaatttataaaaacgatcagctttcatgcctcttgggtatggctcttgcttataatgtagccagcaacattattaccggatttgctatctattatttctcatatgttatcggtgatgcggatttgttcccctattatctgtcgtatgcgggagctgctaacctggtgacgttagtatttagactggccccctga

SEQ ID NO: 486039 - DNA, 1014 bp, Shigella sonnei; identical to SEQ ID NO: 482885

SEQ ID NO: 486040 - DNA, 2685 bp, Shigella sonnei; identical to SEQ ID NO: 483428

SEQ ID NO: 486041 - DNA, 948 bp, Shigella sonnei; identical to SEQ ID NO: 483527

SEQ ID NO: 486042 - DNA, 219 bp, Shigella sonnei
atgattcgcttagcgcccttgattaccgccgacgttgacaccaccacattgcctggcggcaaagccagcgatgctgcacaagattttctcgcgttgttgagcgaagcattagcaagcgagacaactaccgacaaagcggccccccaggtgctggtggcaacagataagcccacgacaaaaggcgagctgctgatcagcgatattgtttccgacgcgtaa

SEQ ID NO: 486043 - DNA, 804 bp, Shigella sonnei; identical to SEQ ID NO: 483971

SEQ ID NO: 486044 - DNA, 606 bp, Shigella sonnei
atgcactcctggaaaaagaaacttgtagtatcacaattagcattggcttgcactctggctatcacctctcaggctaatgcagctacttataacaccttcgggtatcacgatgacgcagccaccatctacaattggggtgacagcactaaaattgatcacgattatctgacttacggtggttatgtatatgaccacgcagctgatggttactttgataccactttcagcggcgacactgtaaatggtgtaatttctacttattatctgaaccacgattatggcacagataccggtaatacactgaacatctccaactcaattgttcatggtatggttacatcttaccaggttggttatggcgactacgtctggaccaacggtagcgattatactggccacgactgggttgatggcgacatcttcactctgaacatcgctaattctactattgacgatgattttgacgccttctacttcaccgatacttatctggatgcagacggtaaaacatctaagacagattatgatcgtttggtaaccgctggtcttggtaccgctgtgactctggatgttgaaagtaacatcaacatcagcaacaactattga

SEQ ID NO: 486045 - DNA, 1041 bp, Shigella sonnei; identical to SEQ ID NO: 484268

SEQ ID NO: 486046 - DNA, 1683 bp, Shigella sonnei; identical to SEQ ID NO: 484981

SEQ ID NO: 486047 - DNA, 1404 bp, Shigella sonnei; identical to SEQ ID NO: 483587

SEQ ID NO: 486048 - DNA, 1302 bp, Shigella sonnei; identical to SEQ ID NO: 483589

SEQ ID NO: 486049 - DNA, 696 bp, Shigella sonnei
atgacccgcacactcaaaccgttaattcttaacaccggcgcactggcgctaacgttaatcctgatttataccggcatttcggcccatgacaaactcacctggctgatggaagtgacaccggtgattattgtcgtgccgctactgcttgccaccgctaaacgttatccgttaacgccgctgctctatacgctcattttctttcacgccatcatcctgatggtcggcgggcaatacacctacgcgaaagtccccatcggttttgaggtgcaggaatggctggggttgagccgtaatccgtatgacaagctggggcattttttccaggggctggtgcctgcactggtggcacgagaaattctcgtgcgcgggatgtacgtgcgcggacgtaaaatggtggcgttcctagtctgctgcgtggcgctggcgataagcgcgatgtatgaattaatcgagtggtgggcggcgctggcaatgggccagggagcggatgattttctcggcacccagggcgaccagtgggacacgcaatccgatatgttctgcgcgctgcttggcgcattaacgacggtgatattcctcgctcgctttcattgccgccagctacggcgctttggcggtaatgactccaacttattgatagtgttttatgttcagataatgcccgatgactttgtcatgcagctccaccgattttga

SEQ ID NO: 486050 - DNA, 1647 bp, Shigella sonnei
atgtcaaacaaaccctttatctaccaggcacctttcccgatggggaaagacaataccgaatactatctactcacttccgattacgttagcgttgccgacttcgacggcgaaaccatcctgaaagtggaaccagaagccctgaccctgctggcgcagcaagcctttcacgacgcttctttcatgctccgtccggcacaccagaaacaggttgcggctattcttcacgatccagaagccagcgaaaacgacaagtacgtggcactgcaattcttaagaaactccgaaatcgccgccaaaggcgtgctgccgacctgccaggataccggcaccgcgatcatcgtcggtaaaaaaggccagcgcgtgtggaccggtggcggtgatgaagaagcgctgtcgaaaggcgtctataacacctatatcgaagataacctgcgctactcgcaaaacgcggcgctggacatgtacaaagaggtcaacaccggcactaacctgcctgcgcaaatcgacctgtacgcggtagatggcgatgagtacaaattcctttgcgttgcgaaaggcggcggctctgccaacaaaacgtatctctaccaggaaaccaaagccctgctgactcccggcaaactgaaaaacttcctcgtcgagaaaatgcgtaccctcggtactgcagcctgcccgccgtaccatatcgcgtttgtgattggcggtacgtctgcggaaaccaacctgaaaaccgtcaaattagcaagcgctcactattacgatgaactgccgacggaagggaacgaacatggtcaggcgttccgcgatgtccagctggaacaggaactgctggaagaggcccagaaactcggtcttggcgcgcagtttggcggtaaatacttcgcgcacgacattcgcgttatccgtctgccacgtcacggcgcatcctgcccggtaggcatgggcgtctcctgctccgctgaccgtaacattaaagcgaaaatcaaccgcgaaggtatctggatcgaaaaactggaacacaatccaggtcagtacattccacaagaactgcgtcaggccggtgaaggcgaagcggtgaaggtcgaccttaaccgcccgatgaaagagatcctcgcccagctttcgcaatatccggtttccactcgtttgtcgctcactggcaccattattgtgggtcgagatattgcacacgccaagctgaaagagctgattgacgccggtaaagaacttccgcagtacatcaaagatcacccgatctactacgcgggtccggcgaaaactcctgccggttatccatcaggttcacttggcccaaccaccgcaggtcgtatggactcctatgtggatctgctgcaatcccacggcggcagcatgatcatgctggcgaaaggcaaccgcagccagcaggttaccgacgcgtgtcataaacacggcggcttctacctcggtagcatcggcggtccggcggcggtactggcgcagcagagcatcaagcatctggaatgcgtcgcttatccggagctgggtatggaagctatctggaaaatcgaagtagaagatttcccggcgtttatcctggtcgatgacaaaggtaacgacttcttccagcaaatcgtcaacaaacagtgcgcgaactgcactaagtaa

SEQ ID NO: 486051 - DNA, 1341 bp, Shigella sonnei
atgttatttactatccaacttatcataatactgatatgtctgttttatggtgccagaaagggtggtatcgcgctgggtttattaggcggtatcggtctggtcattctggtcttcgtcttccaccttcagccaggtaaaccaccggttgatgtcatgctggttatcattgcggtggtggcggcatcggcgaccttgcaagcttcgggcggtcttgatgtcatgctgcaaattgccgagaagctgctgcgccgcaacccgaaatatgtctcaattgtcgcgccgtttgtgacctgtacgctgaccattctttgcggtacgggtcatgtggtttacaccattctgccgatcatctacgacgtcgccattaagaacaacatccgtccggaacgtccgatggcggcaagttctatcggtgcacagatggggatcatcgccagtccggtgtcggttgcggtcgtgtctctggttgcaatgctgggtaatgtcacctttgatggtcgccatcttgagttcctcgacctgctggcaatcaccattccatcgacgttaatcggtatcctggcgatcggtatcttcagctggttccgtggtaaagatctggataaagacgaagagttccagaaattcatctccgtaccggaaaaccgtgagtatgtttacggtgataccgcgacgctgctggacaaaaaactgccgaaaagcaactggctggcaatgtggattttcctcggggcaatcgctgtagtcgcccttcttggtgctgattcggacctgcgtccatccttcggcggcaaaccgctgtcgatggtactggttattcagatgtttatgctgctgaccggggcgctgattattatcctgaccaaaaccaatcccgcgtctatctcaaaaaacgaagtcttccgttccggtatgatcgccatcgtggcggtgtacggtatcgcatggatggcagaaaccatgttcggtgcgcatatgtctgaaattcagggcgtactgggtgaaatggtgaaagagtatccgtgggcctatgccattgttctgctgctggtttccaagtttgtaaactctcaggctgcggcgctggcggcgattgttccggtcgcgctggcgatcggcgttgatccggcatacatcgtggcttcagcaccggcttgctacggttattacatcctgccgacttatccgagcgatctggcagcgattcagtttgaccgttccggcaccacccacatcggtcgcttcgtcatcaaccacagctttattctgccggggttgattggtgtgagcgtatcgtgcgtcttcggctggatcttcgccgcgatgtacgggttcttataa

SEQ ID NO: 486052 - DNA, 720 bp, Shigella sonnei
atgatcaatgtattaattatcgatgacgacgcaatggtcgcggagctgaatcgccgatacgtagcacaaatcccaggctttcaatgctgtggaacagcctcgacgctggagaaagccaaagagattatcttcaatagcgatacgcctatcgacctgatattgctcgatatctatatgcaaaaagagaacgggctcgatttactgcctgtcctgcataacgcgcgttgcaaaagtgatgtgattgtcatctcctccgcagccgatgcggcaaccattaaagattcgctgcattacggtgtcgtggattacctgatcaaacccttccaggcttcccgctttgaagaggcgctcaccgactggcggcaaaagaaaatggcgctggaaaaacatcagtattatgaccaggccgagcttgatcagctaatccacggcagcagctccaacgaacaggatcctcgtcgcttgccaaaaggcttaacgccgcagacgttacgcacactgtgccagtggattgacgcgcatcaggactatgaattttcaaccgacgagctagccaacgaggttaacatttcgcgtgtttcctgccgtaaatacctcatctggctggtcaactgccacatcttgttcaccagtatccattatggcgtcacggggcgtccagtttaccgttaccgtattcaggcagaacactactcactactgaaacaatattgccaataa

SEQ ID NO: 486053 - DNA, 1632 bp, Shigella sonnei
atgagacattcattgccctaccgcatgttacgcaaacgtccgatgaaattgagtaccacagtgatcttaatggtcagtgcggtactgttctcggtgctattggtggtgcatctgatttacttctcgcaaatcagtgatatgacgcgagacgggctagccaacaaggcactggcagtggcgcgtaccctcgccaactcgccggaaatccgtcagggcttgcagaaaaaaccgcaggagagcggcatccaggccatcgcggaagccgtgcgcaaacgcaacgatctgctgtttattgtcgttaccgatatgcaaagtcttcgctactcgcatcctgaagcccagcgtattggtcagccatttaaaggtgatgacatccttaaagcgctgaatggcaaagaaaatgtcgctatcaatcgcggttttctggcgcaggctttacgcgtatttacccccatctacgatgaaaatcataaacaaattggcgtggtggcgatcggccttgagttaagccgcgtgacccaacaaatcaatgacagtcgctggagcattatctggtcggtattatttggcatgctggtcggactgattggcacctgcattctggttaaggtactgaaaaaaatccttttcggcctggaaccctacgaaatctccacgctgtttgagcaacgccaggccatgttgcagtctatcaaagaaggcgtcgttgccgtggacgatcgcggcgaggtcacgctgatcaacgatgccgcacaagaattgctgaattaccgtaagtcgcaggacgatgagaaactgtcgacgctcagccactcatggtcacaggtggtagatgtctcggaagtgttacgcgacggtacgccgcgccgcgacgaagagattacgattaaagaccggctattactgatcaacaccgttccggtgcgcagtaatggcgttatcatcggtgccatttcaaccttcagggacaaaaccgaagtacgtaaactgatgcagcgactcgacggtctggtcaactatgccgacgcacttcgtgaacgatcccacgaatttatgaataaattgcacgtgattctcggattattgcatctgaagagttataagcagttggaagattacattctaaaaacagccaataactatcaggaagagattggctctctgctgggtaagatcaaatctccggttatcgctggttttttaatcagcaagattaatcgcgcgaccgatttaggccatacgctgattttaaacagtgaaagccagctgccagacagcggcagtgaggaccaggtcgcgacgctgattaccacattgggaaatctgatagaaaacgcgctggaagcattagggccggaacccggtggcgaaattagcgtaacattgcactaccgtcacggctggctgcactgcgaagttaacgatgatggaccggggatcgcacccgacaaaatcgatcacatttttgacaaaggtgtctcgacaaaaggaagcgagcgaggcgtcggtttagcacttgtcaaacaacaggtagaaaatctcggcggcagcatcgccgtggaatcggaacccgggattttcacacaattttttgtccagataccctgggacggggagaggtcgaacagatga

SEQ ID NO: 486054 - DNA, 303 bp, Shigella sonnei
atgacggtcagatattatatcagttctgctgatttaaccgcagagaagttcgccacagcaatccgaaaccactggcacgtggagaataagctgcattggcgtctggacgtggtaatgaatgaagacgactgcaaaataagaagaggaaatgcagcagaattattttcagggatacggcacattgctattaatattttgacgaatgataaggtattcaaggcagggttaagacgtaagatgcgaaaagcagccatgggcagaaactacctggcgtcagtccttacggggagcgggctttcgtaa

SEQ ID NO: 486055 - DNA, 993 bp, Shigella sonnei
ttggctacaatgaaagatgttgcccgcccggcgggcgtttctacctcaacagtttctcacgttatcaataaagatcgcttcgtcagtgaagcgattaccgccaaagttgaagcggcgattaaagaactcaattacgcgccatcagccctggcgcgtagcctcaaactcaatcaaacacataccattggcatgttgatcactgccagtaccaatcctttctattcagaactggtgcgtggcgttgaacgcagctgcttcgaacgcggttatagtctcgtcctttgcaataccgaaggcgatgaacagcggatgaatcgcaatctggaaacgctgatgcaaaaacgcgttgatggcttgctgttactgtgcaccgaaacgcatcaaccttcgcgtgaaatcatgcaacgttatccgacagtgcctactgtgatgatggactgggctccgttcgatggcgacagcgatcttattcaggataactcgttgttgggcggagacttagcaacgcaatatctgatcgataaaggtcatacccgtatcgcctgtattaccggtccgctggataaaactccggcgcgcctgcggttggaaggttatcgggcggcgatgaaacgtgcgggtctcaacattcctgatggctatgaagtcactggtgattttgaatttaacggcgggtttgacgccatgcgccaactgttatcacatccgctgcgtcctcaggccgtctttaccggaaatgacgctatggctgttggcgtttaccaggcgttatatcaggcagagttacaggttccgcaggatatcgcggtgattggctatgacgatatcgaactggcaagctttatgacgccaccattaaccactatccaccaaccgaaagatgaactgggggagctggtgattgatgtactcatccatcggataacccagccgacccttcagcaacaacgattacaacttactccgattctgatggaacgcggttcggcttag

SEQ ID NO: 486056 - DNA, 999 bp, Shigella sonnei; identical to SEQ ID NO: 485128

SEQ ID NO: 486057 - DNA, 294 bp, Shigella sonnei; identical to SEQ ID NO: 13522

SEQ ID NO: 486058 - DNA, 210 bp, Shigella sonnei; identical to SEQ ID NO: 9340

SEQ ID NO: 486059 - DNA, 267 bp, Shigella sonnei; identical to SEQ ID NO: 11114

SEQ ID NO: 486060 - DNA, 303 bp, Shigella sonnei
atgacggtcagatattatatcagttctgctgatttaaccgcagagaagttcgccacagcaatccgaaaccactggcacgtggagaataagctgcactggcgtctggacgtggtaatgaatgaagacgactgcaaaataagaagaggaaatgcagcagaattattttcagggatacggcacatcgctattaatattttgacgaatgataaggtattcaaggcagggttaagacgtaagatgcgaaaagcagctatggacagaaactatctggcgtcagtccttgcggagagcgggctttcgtag

SEQ ID NO: 486061 - DNA, 2046 bp, Shigella sonnei; identical to SEQ ID NO: 485100

SEQ ID NO: 486062 - DNA, 711 bp, Shigella sonnei
atgacaaatgatatttacattaatggcaaagtgattgatagcttcagtgactggtcgccacagactgaacatccagctatcactattcagcgtaaagagcatgacaagcgtattgagcttgagcaatcgctaaagatgtcaccaaaaacaaccatctttgtgtctcctgagcctcaagagatgcctgatatttgcaagagtgaagcattacttgagcttgaaaagaaatattaccaactgctgaaagaacagcgccttagattagatgacgcttacagcaaagttaccttgatgcaatcagctattgagccgtcagaatttgagattcaggatgaattgtcacagaaaccatttgtctattaccaatacgaagataatgatggttttggtacttttcaagaaaacgtcgcagccgtgattagtagtcttcctgctggacatcgaattgtgaagatggttaaggcatcaagaggtgctggtcagtttatttacatgactaataagagcgatgaagaactcgctgaaattgctagacagaacatcttggcatcacgtaacaagcaacttgataatgttaagttgtatctctcaagagagcttcaggctatgaaagagcttgtgaaagaatatgaagatgctaagaagattgctatgcaggctgatattgagcagcttacgaagatttctagcaaatatgcaaaggctatttaa

SEQ ID NO: 486063 - DNA, 291 bp, Shigella sonnei
atgactcacacagttacgcgccttttgccagaggcatttgaacgactggcagcaatcaaagccaaatatcccgatatgaagcacacagcgcttgttggggagattttaaaagagtcggtaaaccttagccctttcgataacgttaagggcgtcgcagagggttctaaggccatcagaatcacaacgggccaactggaactactcaaagcacagtccgcagtagcaggttgctcaatgattcaggtgttaagcgctaaggtccatcaactggcggatagattggaggtttaa

SEQ ID NO: 486064 - DNA, 177 bp, Shigella sonnei
atgcatgattttttcacagcaattattgaatctcatcgttttagctcgttgggctttgcggtatttattgtgctattggtgttttgcgttatgaatcgagtcattacaaaaaagacaaagcttacaattcgacttaaacttcttcgtgttgagatagagatttcagtaaataaatag

SEQ ID NO: 486065 - DNA, 663 bp, Shigella sonnei
atgtcaattgagcatattttaatcgggaaacatcatgggggttctgattactggagaactccattgttgttatttaagaacttacaccgtgaatttggttttacgctagatggtgctgcaactgagcatgacacgctgttaccacgattcaccaatgatataagccgtcaatcatgggttagtgaaaaggtcttctgtaacccgccgtacagcgatattccgtcgttcctcttaaaagcgtctgaagcggatttagtagctttcctgataccgcatagagccaacaccagctactggcttaggcacatttacagcaataaccactgtcatgaaatccgtattcttcatcgtgcagttaaataccttccaccagcaggccataacgggcttactattcgttcaccgtttcctagtgcagtcgttgtttttaaaaaagaaccacgtaagcacgaaattacacagacggtttgctgtggtgacacgctattaccgttaaccatcattaacagaggaggcttgagaggaagacccaccatttacccacctgagacgctcgacagcttcataaaactatacaggcaaggaaaacccattaagtgcattgcagatgctctcagaatgcctctgagcacgtcatacaggattgctcaaaggttgagctaa

SEQ ID NO: 486066 - DNA, 2931 bp, Shigella sonnei; identical to SEQ ID NO: 485092

SEQ ID NO: 486067 - DNA, 1404 bp, Shigella sonnei; identical to SEQ ID NO: 485645

SEQ ID NO: 486068 - DNA, 195 bp, Shigella sonnei; identical to SEQ ID NO: 7925

SEQ ID NO: 486069 - DNA, 1215 bp, Shigella sonnei; identical to SEQ ID NO: 485225

SEQ ID NO: 486070 - DNA, 231 bp, Shigella sonnei
atggtagtgtccgctattgccagtacacctcatccatcaccgaaaaaaattggcttttacaccattggcgataaaagcatttacctgtatgacctacgccgcatggatgaaatcatggaggctcttgataatcgttcgtcgatggattggtgtgttgctgttcatgatatgaatgcagggtttgatgaaaagattttgttcccctcatcagttgaaagcactgcgggttaa

SEQ ID NO: 486071 - DNA, 951 bp, Shigella sonnei; identical to SEQ ID NO: 485807

SEQ ID NO: 486072 - DNA, 381 bp, Shigella sonnei; identical to SEQ ID NO: 458903

SEQ ID NO: 486073 - DNA, 1083 bp, Shigella sonnei; identical to SEQ ID NO: 485436

SEQ ID NO: 486074 - DNA, 138 bp, Shigella sonnei
atgtttgagttttatatggcagaacttcttcgccaccgctgggggcatctgcgcttatatcgtttccccggttctgttttgaccgattaccgaatactgaagaattacgccaaaaccctgacaggagcaggagtatga

SEQ ID NO: 486075 - DNA, 1497 bp, Shigella sonnei; identical to SEQ ID NO: 485471

SEQ ID NO: 486076 - DNA, 1026 bp, Shigella sonnei; identical to SEQ ID NO: 485458

SEQ ID NO: 486077 - DNA, 390 bp, Shigella sonnei; identical to SEQ ID NO: 485463

SEQ ID NO: 486078 - DNA, 960 bp, Shigella sonnei; identical to SEQ ID NO: 485466

SEQ ID NO: 486079 - DNA, 276 bp, Shigella sonnei; identical to SEQ ID NO: 484087

SEQ ID NO: 486080 - DNA, 303 bp, Shigella sonnei; identical to SEQ ID NO: 21213

SEQ ID NO: 486081 - DNA, 369 bp, Shigella sonnei; identical to SEQ ID NO: 485529

SEQ ID NO: 486082 - DNA, 492 bp, Shigella sonnei
atgccatcactggcagcaaggaaggtggattttacgcagggacgtctgccaccgacgctgatgccggtaatgagttctgtcgaccgggaaacccgccagcttcagcttttgctggtcatgggcgtggatgactctctgggcggtgttgtccggcttaatggtacgctgtatcccgcgtttgccgttccctcagccgataacagccagctggtcatcagtgcactgaccgataaggggttacggtatgcagggtatggtgttgccgtaaatcacgatgcagacagccacatatcacctgcgccggaacttatggagtttcatctgaaaacccgtgaggtaccgctttttgctgccgtcaacacaccagaaaaacagccggatcatctgttccgctcgctgggtttcaatcgtacctgggacgaatggcggcgcgaggaagatgcaagaacacacaccaccgagaggagacatgatcgcggttggtcacagtga

SEQ ID NO: 486083 - DNA, 693 bp, Shigella sonnei; identical to SEQ ID NO: 7206

SEQ ID NO: 486084 - DNA, 255 bp, Shigella sonnei
atgagcagaacgctcgaacagaagattgctgatgctgaggcgagattacagcgcctgaaggcgaagagccggagcttggacacagcgcagaaggttgttgtgggtgcagcattgctggcaaaggtcagaaagccggaggaggtgcagttgcgtgcctggttactccagttcctgaaggcagaggtgacacgacaggctgatgtgacgcgcatactgccgctgattaacgagctggaggcgctgccaggacagtga

SEQ ID NO: 486085 - DNA, 2517 bp, Shigella sonnei; identical to SEQ ID NO: 485610

SEQ ID NO: 486086 - DNA, 1035 bp, Shigella sonnei
atggaaattcgcataatgctatttatattaatgatgatggttatgcctgtgagctatgcggcatgttatagtgagttatctgttcagcacaatttggttgttcagggggattttgcacttactcaaacacaaatagcgacatatgagcataattttaatgattcgtcatgcgtgagtacaaatactatcacccctatgagttcgtcggatattattgttgggctttataacgataccataaaattaaatttacattttgaatggaccaataaaaacaacatcacgttgtcaaataatcagaccagtttcaccagtggttattcagttacggtgacacctgcggccagtaatgcaaaagtgaatgtttctgcggggggcggcggttcagtgatgattaatggtgttgcgacattatccagtgcttcatcatcgacacgcgggagtgccgcagtacaatttctactgtgtttattaggtggcaagtcatgggatgcatgtgtaaatagctacagaaatgcattggcacaaaatgcaggtgtctattcctttaatctgacattgtcatacaacccgataaccacaacctgcaaaccggacgatttattaattactttagacagtattcccgtttcacaattaccagccacaggtaacaaagcaacaataaatagtaaacaaggggatattattctgcgttgtaaaaatttattaggtcaacaaaatcaaacatcacggaaaatgcaggtgtatttatcaagttctgatttgttagccggcagtaacacgatcctgaaaggtgcagaaaataatggagtcggatttatgcttgaaagcaatggttctccagtcacatttttaaatatcactgataacagcaaaggatacacaaatttaaaagaaattgcggcaaagtcaaaacttacagatacaacggtttcaattccgataactgccagttactacgtctacgatacaaacaaagttaaatctggcgcactggaggcaaccgcattaatcaacgtgaaatacgactaa

SEQ ID NO: 486087 - DNA, 372 bp, Shigella sonnei; identical to SEQ ID NO: 485640

SEQ ID NO: 486088 - DNA, 219 bp, Shigella sonnei
atggttacattatttagaaaaaaatatccgcgaaagagtagaacaacagaattcctgtttctcattctgtttatcgtgttgatgacaccgatatccccgctaatttttgtctggataatcggaaaaataattgagccagttattgaattgtataacgacgtggtatgggcgtcattcaacacactgcacaataaaattaatccgtataaggaaagctga

SEQ ID NO: 486089 - DNA, 366 bp, Shigella sonnei
atggcactgacgaaaaaacaacgtgcagaactgcgcatgaagttcggtggtcgctgcgcttattgcggctgcgaacttggcgaaaagtggcatgcagaccatgtaaaaccggtcattcgttttgatggaaatatgcttcaccaggaacgtgacgatatatccaacatggtaccagcatgccacccatgcaatctgcacaagcattgcagtagcctggaagattatcgacgaattatcagtgatggtcgtcgtgaattccttgcgtccgggaaaggcaaagcgctggttcgtatgggattggttgaaatgaaatctgacccggttgtgttctggtttgaaaaatatcaagaaggggctacggcatga

SEQ ID NO: 486090 - DNA, 666 bp, Shigella sonnei
atgaccactattaccaaagagcgactgcaatggctggctaacatttctggccgcgatgatattgacgatatagacggcggtgaaattcgtgaactggcgcttatcgctctggcatcactggaagcagagcctgtagcggaatgcattgttgaagatgggggcatgtgtattgacgggttcggtgagtatgtgggtcactcgctgcctgatggaatgcatgagctttatgctgccccgcgaatgcgacaacctgatggatggaaagccgtagctgtagcgtggaaggtgacgtttactcaagttgaccaggaatctaatacgttcactgctatatattttgacaaagcggaagttgagtgttgggtacgactgcataaagcatgtgattttcgggcagatataacaccgctttacgcagcgccggcagtgccggttgcagtaaacgacgacatggcttacgcattccatcacgcactgtcagattcatcgcttggctctgatgaaatcgaagaaattaaaaccggtttgcgtgctgcctttgccaacgtcactatccaaccagagccgatagtgccggatgaaatcgggccaaacgatagtaatacgtttgattatgttgatggctggaacgcctgccgcgctgccatgcttaagggagataaataa

SEQ ID NO: 486091 - DNA, 366 bp, Shigella sonnei
atgattaatcgaaccaaactggagcacattctcgaatatgccaggcagcagaaatgtattgggcaactttgtaaaattccaccaggagatatggttgaaatcgtggaaatggccatgcgtaaggctggcaactctccggtagctccggctggctggataagctgtagtgatgcagttcctgctgaatattgcgatgtgattcttctcgatgatctcgggaatgtattccccggttcctgggataaggttttttgccccactcgtggcgggaataagatggcttttgtggacaaagacggcgttgaagtagagagctcaactcactggatgccgctaccggaaccaccgcaggaggtgaatcaatga

SEQ ID NO: 486092 - DNA, 213 bp, Shigella sonnei
atgtctcacaaatgtaggttagcctcttacgtgccgaaaggcaaggagaagcaggctatgaagcagcaaaaggcgatgttaatcgccctgatcgtcatctgtttaaccgtcattgtgacggcactggtaacgaggaaagacctctgcgaggtacgaatccgaatcggccagacggaggtcgctgttttcgtagactacgaatctagagagtaa

SEQ ID NO: 486093 - DNA, 240 bp, Shigella sonnei; identical to SEQ ID NO: 485662

SEQ ID NO: 486094 - DNA, 1335 bp, Shigella sonnei
atgtctggaaatataggggcaaatccagtcacgcaatggcaagttgcatctaatagtattccttatctgacgcgtaaagggcagattcgctacaccactgctatgggtaaaccgaccagcgttggtggtgattccttacaacaacccttcttctggactggtgaattctcatggggttggctgaacaatgtatccctgtatggtggttcagttttaacaaaccgtgattatcaatctctggctgccggcgttggctttaaccttaactcattgggttcattatcttttgatgtcacacgatctgatgctcagttgcataatcaggataaagaaacgggttatagctaccgcgctaactattcaaaacgttttgaatctaccggtagccagctcactttcgctggttaccgtttctctgataaaaactttgtgacaatgaatgaatatatcaatgacactaaccattacatgaattatcagaatgaaaaagagagttatattgtcacgtttaaccagtatcttgaatcattaaggttaaatacatacgtaagtttggctcgtaatacttactgggacgccagcagtaatgtgaattattcattatcacttagccgcgattttgatatcgggccattaaaaaacgtctccgcttctctaacatttagccgaataaactgggaagaagacaaccaggatcaactgtacctaaatatttcgattccctggggaaccagtagaacattgagctatggtatgcaacgaaatcaggataacaagatttcgcatactgcttcgtggtatgactcttccgatcgaaataattcctggagcgtttctgcttcaggcgacaatgatgaattcaaagatatgaaagcgtcactacgcgccagttatcagcataataccgagaacggtcgtctctatctctccgggacatcacagcgagacagttattattctctgaatgccagttggaatggttcattcacggcgactcgtcacggagccgctttccatgactatagtggtagtgctgactcgcgttttatgatcgacgcagatggtgcagaagatattccgttgaacaataaacgcgcggtaactaatcggtatggcatcggagttattccatcagtcagcagttacataacaacatcattaagcgttgatacccgaaatcttccagaaaatgtggatatcgaaaactcggttatcaccaccaccttaaccgaaggtgctattggctacgccaaacttgataccccaagggctatcaaatcatgggggttattcgcctggcagatggtagtcacccaccactggggattagcgtaa

SEQ ID NO: 486095 - DNA, 348 bp, Shigella sonnei; identical to SEQ ID NO: 485665

SEQ ID NO: 486096 - DNA, 336 bp, Shigella sonnei; identical to SEQ ID NO: 485666

SEQ ID NO: 486097 - DNA, 150 bp, Shigella sonnei; identical to SEQ ID NO: 485699

SEQ ID NO: 486098 - DNA, 246 bp, Shigella sonnei
gtggccagatgtacagtggcgcgcctcatggcggttatgggacttgtcggtgttctccggggtaaaaaggtccgcactaccgtcagccggaaaaccgttgccgcaggtgaccgcgtaaaccgtcagttcgtggcagaacgtcctgaccagctgtgggtggctgattttacttacgtcagcacatggcagggcttcgtctatgtggcgttcatcattgatgtgtttgccggatacatcgtgtggtga

SEQ ID NO: 486099 - DNA, 483 bp, Shigella sonnei
atgcgtattgaaaatgcaatggttgactcaggtaaaatgtatggctcccataaattatttaatacatcagttcctggtttgtattacacattattaatttcaaacatgtggtcagcttacggtaccgtaactaacgttagttcacctgggatatacattggtgactctgcagaacaatatttttcgtggtataatccaagcgaagacgtgttatattggagttgcaataatgcgaatagcacccgtaaatactgggctgtaggtggtatttatcagacccttacaattgaattctatacagatacaaactttgatccaacagtaactcaacagatcaaattatccagctcatcaaattatctgtattcatttaaagcctatggcgcaggccaaggttggatttgcccctatatttccagacatctgttatcacttaacccattacaagcccgctgccgcagatattcccgtggcgagcgataa

SEQ ID NO: 486100 - DNA, 471 bp, Shigella sonnei
ttggctgcggatagcacgattactatccgcggctatgtcagagataacggctgtagtgtggccgctgaatcaaccaattttactgttgatctgatggaaaacgcggcgaagcaatttaacaacattggcgcgacgactcctgtcgttccatttcgtattttgctgtcaccctgtggtaatgccgtttctgccgtaaaagttgggtttaccggtgttgcagatagccacaatgccaacctgcttgcacttgaaaatacggtgtcagcggctgcgggactgggaatacagcttctgaatgagcaacaaaatcagataccccttaatgccccatcgtccgcgctttcgtggacgaccctgacgccgggtaaaccaaatacgctgaatttttacgcccggctaatggcgacacaggtgcctgtcactgcggggcatatcaatgccacggctaccttcactcttgaatatcagtaa

SEQ ID NO: 486101 - DNA, 504 bp, Shigella sonnei
atgaaatggcgcaaacgtgggtatttattggcggcaatgttggcgctcgcaagtgcgacgatacaggcagccgatgtcaccatcacggtgaacggtaaggtcgtcgccaaaccgtgcacggtttccaccaccaatgccacggtagatctcggcgatctttattctttcagtcttatgtctgccggggcggcatcggcctggcatgatgttgcgcttgagttgactaattgtccggtgggaacgtcgagggtcactgccagcttcagcggggcagccgacagtaccggatattataaaaaccaggggaccgcgcaaaacatccagttagagctacaggatgacagtggcaacatattgaatagtggcgcaaccaaaacagttcaggtggatgattcctcacaatcagcgcacttcccgttacaggtcagagcattgacggtaaatggcggagccactcagggaaccattcaggcagtgattagcatcacctatacctacagctga

SEQ ID NO: 486102 - DNA, 621 bp, Shigella sonnei
atgaaacgagttattaccctgtttgctgtactgctgatgggctggtcggtaaatgcctggtcattcgcctgtaaaaccgccaatggcaccgctatccctattggcggtggcagcgctaatgtttatgtaaaccttgcgcctgccgtgaatgtggggcaaaacctggtcgtggatctttcgacgcaaatcttttgccataacgattatccggaaaccattacagactatgtcacactgcaacgaggctcggcttatggcggcgtgttatctaatttttccgggaccgtaaaatatagtggcagtagctatccatttcctaccaccagcgaaacgccgcgggttgtttataattcgagaacggataagccgtggccggtggcgctttatttgacgcctgtgagcagtgctggcggggtggcgattaaagctggttcattaattgccgtgcttattttgcgacagaccaacaactataacagcgatgattttcagtttgtgtggaatatttacgccaataatgatgtggtggtgcccactggcggctgcgatgtttctgctcgtgatgtcaccgttactctgccggactaccctggttcagtgccaattcctcttaccgtttag

SEQ ID NO: 486103 - DNA, 897 bp, Shigella sonnei
gtgatccacggtattgctcgtggtactgcacaggtcactattaaacaaaatgggtatgacatttataatagtacggtgccgccggggccttttaccatcaacgatatctatgccgcaggtaatagtggtgacttgcaggtaacgattaaagaggctgacggcagcacgcagatctttaccgtaccctattcgtcagtcccgcttttgcaacgtgaagggcatactcgttattccattacggcaggagaataccgtagtggaaatgcgcagcaggaaaaaacccgctttttccagagtacattactccacggccttccggctggctggacaatatatggtggaacgcaactggcggatcgttatcgtgcgtttaatttcggtatcgggaaaaacatgggggcactgggcgctctgtctgtggatatgacgcaggctaattccacacttcccgatgacagtcagcatgacggacaatcggtgcgttttctctataacaaatcgctcaatgagtcaggcacgaatattcagttagtgggttaccgttattcgagcagtggatattttaatttcgctgatacaacatacagtcgaatgaatggctacaacatcgaaacacaggatggtgttattcaggttaagccgaaattcaccgactattacaatctcgcttataacaaacgcgggaaattacaactcaccgttactcagcaactcgggcgcacatcaacactgtatttgagtggtagccatcaaacttattggggaacgagtaatgtcgatgagcaattccaggctggtttaaatactgcattcgaagatatcaactggacgctcagctatagcctgacgaaaaacgcctggcaaaaaggacgggatcagatgttagcgctgatatga

SEQ ID NO: 486104 - DNA, 825 bp, Shigella sonnei
atgcagcctccgctccgggatgtattccgcctccatctggctttccatctgctccaccgtcagcccgcactgcgcaagccatgcctcactctccgcactcaccgcacccgcacgcagttcccgctccagcctccccagcatcaccgccagctccgccggaagcgtcacccccgtgtcctcctgcaacacctccgccaggctccggtgccgcgccttcgcctgttcgccattctctgtttcgattctcaggagcggcgtgaagcttcccggctggtataccgtctggattcttgtctgttgggtctgtacagtggtcagcctgtcaccgtcccacccgtaccaggtctcctccggtttacgcgacagcgacatccaccccgtcaggtcacgctcccgccgccatacccgttttcccgtccggcggcccagcgggtcatagaggtaccggctctccacctgtggttcgccgtgctgtatccgcgtgtagaacaccaggcggtgctggctgtcgtagtgatagtggtgggtgcgctcgtcgtgcatccggataaccccttccgggatacggtccgtcttctccgccagcctgccgtattcatcgtagcgatagacatagtgcgcatcttccgcgatgcggttatccggccacgccgtgagggtgctgtccgggtgcagttccgggtccggcagccggtttcctgccgggtctgttgcatacgggatatcgatatccaggttcgctgccgtggtgtggacgcccgtcagcctccccgtgtcgctgtaacggtactcccggctctcctgcgggccactgatgcggattag

SEQ ID NO: 486105 - DNA, 153 bp, Shigella sonnei; identical to SEQ ID NO: 38791

SEQ ID NO: 486106 - DNA, 207 bp, Shigella sonnei; identical to SEQ ID NO: 485753

SEQ ID NO: 486107 - DNA, 303 bp, Shigella sonnei; identical to SEQ ID NO: 484410

SEQ ID NO: 486108 - DNA, 303 bp, Shigella sonnei
atgacggtcagatattatatcagttctgctgatttaaccgcagaaaagttcgccacagcaatccgaaaccactggcacgtggagaataagctgcactggcgtctggacgtggtaatgaatgaagacgactgcaaaataagaagaggaaacgccgcagaattattttcagggatacggcacatcgctattaatattttaacgaatgataaggtattcaaggcagggttaagacgtaagatgcgaaaagcagccatggatagaaactatctcgcgtcagtccttgcggggagcgggctttcgtaa

SEQ ID NO: 486109 - DNA, 303 bp, Shigella sonnei; identical to SEQ ID NO: 484410

SEQ ID NO: 486110 - DNA, 186 bp, Shigella sonnei
atggctcttttaagccgaacagataagaaatatgagaataaagaagaggcaagggttattacaataattgaatcgcgtgcggcgaaaactttaggtgagtgtaccagaggagctcatagtggactgcctttttatcgggtggatggaccgttgcagacgatgaaaataacgggtacgccagaatag

SEQ ID NO: 486111 - DNA, 351 bp, Shigella sonnei; identical to SEQ ID NO: 467414

SEQ ID NO: 486112 - DNA, 1110 bp, Shigella sonnei
ttgcagctggcgtgggcggtctttaaaatctttcgtattccggtgaatcagtggacgctggcgacggcggcgctgggaggcgtgtttctggtgagtggtttgattttgttgatgaactacaaccacccttacacttttaccgcgcaaaaggcagtgatagcgatccctatcacgccacaggtgacgggaattgttactgaagtcactgacaagaataatcagcttattcaaaagggcgaggtgctttttaagctcgacccggttcgttaccaggcgcgagttgacagacttcaggctgacctgatgacggcgacgcataatataaagacgctgcgtgcgcagctcactgaagcgcaggccaacaccacccaggtttcagcggagcgcgaccgtctgtttaaaaattatcaacgttacctgaaaggcagccaggcggcggtgaatccgttctcggaacgtgacatcgacgatgcgcggcaaaatttcctcgcgcaggatgcgctggtgaaaggctcggtggcggagcaggcgcagatccagagccagctcgacagtatggttaacggcgagcaatcgcagattgtgagcttaagagcgcaacttactgaagcaaaatataaccttgagcagactgtcattcgcgcgccgagcaatggctacgttactcaggtactgatccgcccaggtacatacgcagctgccttgccgctgcgtccggtgatggtcttcatccccgagcaaaaacggcaaattgtcgcccaatttcggcaaaactcgctgttacgtctgaaacctggcgatgatgcggaagtggtgtttaacgcgctacctgggcaggtgttccacggcaaattgactagtattttacctgtcgtgccaggcggttcttatcaggcgcagggggtattgcaatcattaacggtcgttcccggcacggacggcgtgctgggaaccattgaactggaccctaacgatgatatcgatgccttacccgacggcatttacgcccaggtagcagtttactccgaccatttcagccatgtttcggtgatgcggaaggtgctgctaagaatgaccagttggatgcattatttgtatttggatcattga

SEQ ID NO: 486113 - DNA, 771 bp, Shigella sonnei
atgtcacacgatctcaacggtcggatgaccaatctggccggtgtatacggtacgttgctggaagacaacaacctcagctatagcgtgcaaaccggttacgccgggggaggtgatggtaatagcggaagtacaggctacgccacgctgaattatcgcggtggttacggcaatgccaacatcggttacagccatagcgatgatattaagcagctctattacggagtcagcggtggggtactggctcatgccaatggcgtaacgctggggcagccgttaaacgatacggtggtgcttgttaaagcgcctggcgcaaaagatgcaaaagtcgaaaaccagacgggggtgcgtaccgactggcgcggttatgccgtgctgccttatgccactgaatatcgggaaaacagagtagcgctggataccaataccctggctgataacgtcgatttagataacgcggtcgctaacgttgttcccactcgtggggcgatcgtgcgagcagagtttaaagcgcgcgttgggataaaactgctcatgacgctaacccacaataataagccgctgccgtttggggcgatggtgacatcagagagtagccagagtagcggcattgttgcggataatggtcaggtttacctcagcggaatgcctttagcgggaaaagttcaggtgaaatggggagaagaggaaaatgctcactgtgtcgccaattatcaactgccaccagagagtcagcagcagttattaacccagctatcagctgaatgtcgttaa

SEQ ID NO: 486114 - DNA, 303 bp, Shigella sonnei
atgagcagaaaaacccaacgttactctaaagagttcaaagccgaagctgtcagaacggttcctgaaaatcaactttcgaacagtgaaggcgcttcccgattatctcttcctgaaggcactttaggacaatgggttaccgccgccagaaaagggctcggtactcctggttcccgcacggtggctgaactggaatctgaaattctgcaactgcgtaaggcgttaaatgaagctcgccttgagcgagatatattaaaaaaagcaacagcgtattttgcacaggagtcgctgaaaaatacgcgttaa

SEQ ID NO: 486115 - DNA, 177 bp, Shigella sonnei; identical to SEQ ID NO: 485770

SEQ ID NO: 486116 - DNA, 303 bp, Shigella sonnei; identical to SEQ ID NO: 21213

SEQ ID NO: 486117 - DNA, 1155 bp, Shigella sonnei; identical to SEQ ID NO: 485796

SEQ ID NO: 486118 - DNA, 303 bp, Shigella sonnei; identical to SEQ ID NO: 484410

SEQ ID NO: 486119 - DNA, 303 bp, Shigella sonnei; identical to SEQ ID NO: 484410

SEQ ID NO: 486120 - DNA, 270 bp, Shigella sonnei
atgtatgaattacgttttcgtgaaccaccgccagctcgccgttcagtggagcagttacgtggaattgagggatctcgcgttcgccagacgtatgcattactggcgaaacaatatggtgtgaaatggaatggtcgcaaatacgatcctaaagactgggaaaaaggcgatgttgtgaatcgctgcatcagtgctgctacatcatgtctgtacggtatatctgaagcggcagtattagccgcgggatatgcgcctgaggtgtactggcaatag

SEQ ID NO: 486121 - DNA, 303 bp, Shigella sonnei; identical to SEQ ID NO: 484410

SEQ ID NO: 486122 - DNA, 804 bp, Shigella sonnei; identical to SEQ ID NO: 485810

SEQ ID NO: 486123 - DNA, 327 bp, Shigella sonnei
gtgtggctgacgcacgacccggaatacccggagaatttacctgccgcgccgctggtgcgctatggctggacgccgcgcggcgaactggcggcagtgtatgaccgcagcaatacacaggtgcgcagctttacttacgatgataaataccggggccggatggtggcgcaccgtcacacgggccggccggaaatccgttaccgttacgacagcgacgggcgggtgacagaacagcttaacccggcaggcttaagctacacgtatcagtatgagaaggaccgcatcaccatcaccgacagcctgaaccgccgtgaagtgctgcacacgtag

SEQ ID NO: 486124 - DNA, 654 bp, Shigella sonnei
atgggacgctggcttgctggcaggctcatgaaagagctggggctggtcagctgtcagcagccgactcaccggtataaacgtggtggtcatgaacatgttgctatccctaactaccttgaaaggcagttcgccgtgaccgagccaaatcaggtgtggtgcggtgatgtgacctatatctggacgggtaagcgctgggcgtacctcgccgttgttctcgacctgttcgcaagaaaaccagtgggctgtgccatgtcgttctcgccggacagcaggctcaccatgaaagcgctggaaatggcatgggaaacccgtggtaagcccggcggggtgatgttccacagcgatcagggcagtcattatacgagcaggcagttccggcagttattgtggcgataccagatcagacagagtatgagccggcgcggaaactgctgggataacagcccaatggaacgcttcttcaggagtctgaagaacgaatggatgccggtggtgggttacgtaagcttcagcgaggcagctcacgccataacggactatatcgttggatattacagcgcactaagaccgcacgaatataacggtgggttacccccaaacgaatcggaaaatcgatactggaaaaactctaactcggtggccagtttttgttga

SEQ ID NO: 486125 - DNA, 303 bp, Shigella sonnei; identical to SEQ ID NO: 458125

SEQ ID NO: 486126 - DNA, 447 bp, Shigella sonnei
gtggcgttcatcattgatgtgtttgccggatacatcgtggggtggcgggtctcatcgtccatggaaacgacattcgtgctggatgcactggagcaggcgttatgggcccgtcgaccgtccggcacggtccatcacagtgataaaggttctcagtatgtatcgctggcctacacacagcggcttaaggaagccggattactggcatcaacaggaagtacaggcgactcgtatgacaacgcgatggcggagagcatcaatggtctttacaaagcggaggtaatacaccgtaagagctggaaaaaccgtgcagaagtggaactggccatactcacgtgggtggactggtataacaatcgacgattgctggaaaggctgggccatactcctccggcagaagcagaaaaagcttattatgcttccatcggaaacgatgatctggcagcctga

SEQ ID NO: 486127 - DNA, 303 bp, Shigella sonnei; identical to SEQ ID NO: 21213

SEQ ID NO: 486128 - DNA, 984 bp, Shigella sonnei; identical to SEQ ID NO: 485819

SEQ ID NO: 486129 - DNA, 303 bp, Shigella sonnei; identical to SEQ ID NO: 21213

SEQ ID NO: 486130 - DNA, 327 bp, Shigella sonnei
gtgtggctgacgcacgacccggaatacccggagaatttacctgccgcgccgctggtgcgctatggctggacgccacgcggcgaactggcggtggtgtatgaccgtagtggcaaacaggtgcgcagctttacttacgatgataaataccggggccggatggtggcgcaccgtcacacgggccggccggaaatccgttaccgttacgacagcgacgggcgggtgacagaacagcttaacccggcaggcttaagctacacgtatcagtatgagaaggaccgcatcaccatcaccgacagcctgaaccgccgtgaagtgctgcacacgtag

SEQ ID NO: 486131 - DNA, 303 bp, Shigella sonnei; identical to SEQ ID NO: 484410

SEQ ID NO: 486132 - DNA, 303 bp, Shigella sonnei; identical to SEQ ID NO: 21213

SEQ ID NO: 486133 - DNA, 477 bp, Shigella sonnei
atggcattaatgagctatcacaacgtcgtcctcattgtgattgcgggtattttgctgaatgtgggaacggcgcttttctgggtattacaggtcatcatggtggcagataccgttgattacggtgaatataaactgcacgtacgctgtgaaagtatcgcttactccgtgcagactatggtggtgaagggcggttcagcctttgcggcttttttcattgcggttgtgttagggatgattggctatgtaccgaatgttgaacagtctacgcaagccctattaggtatgcagtttattatgattgctctaccaactctgtttttcatggtaacgctgattctctacttccgtttctatcgcctcaatggcgacacgctgcgcaggatccagattcatctgctggataaatatcgcaaagtaccgcccgagcctgttcatgctgatattccggtcggtgcagtgagtgatgtgaaagcctga

SEQ ID NO: 486134 - DNA, 1032 bp, Shigella sonnei; identical to SEQ ID NO: 485822

SEQ ID NO: 486135 - DNA, 438 bp, Shigella sonnei
gtggccgatttatcgcgttttgaaaatgggcaagaattaccgccagggacgtatcgcgtcgatatctatttgaataatggttatatggcaacgcgtgatgtcacatttaacacgggcgacagtgaacaagggattgttccctgcctgacacgcgcgcagcttgccagtatggggctgaatacggcttctgtctccggtatgaatctgctggtggatgatgcctgcgtgccattaacctcaatgatccatgacgctactgcgcatttagatgttggtcagcagcgactcaacctgacgatccctcaggcatttatgagtaatcgcgcgcgtggatatattcctcctgagttgtgggatcccggtattaatgccggcttgctcaattataatttcagcggaaatagtgtacagaatcggattggtagtaacagccggtaa

SEQ ID NO: 486136 - DNA, 177 bp, Shigella sonnei
atgtcatatctgaatttaagactttaccagcgaaacacacaatgcttgcatattcgtaagcatcgtttggctggtctttttgtccggctctttgtcgcctgtgcttttgccgcacaggcacctttgtcatctgccgaactctattttaatccgcgctttttagcggatgatccctag

SEQ ID NO: 486137 - DNA, 543 bp, Shigella sonnei
atgaaattaaatatatttactaaatctatgattggtatggggctggtgtgttccgctctgccagcattggcaatggaagcatggaataaccaacaaggtggtaataaatatcaggttattttcgatagcaaaatttatgaaaatgcctggtggggtttttctacaaattgcccgggaaaagcgaaagcaaatgatgcaactaacccgtggcgtttaaagcgtaccgcaacagctgctgaaattagtcagtttggcaatacactttcctgcgaaaagagcggcagctcatcttcttcaaattcaaatacgcctgcatccaatacgccggctaatggcggttcggctacaccagcacagggcactgttccgtctaattcttctgtagttgcctggaataaacagcagggcggtcagacctggtatgtcgtctttaatggtgcggtatataaaaatgcttggtgggtagcctcttctaactgtccgggtgatgcgaaaggcaatgatgccagcaacccatggcgggtaatgactccaacttattga

SEQ ID NO: 486138 - DNA, 303 bp, Shigella sonnei; identical to SEQ ID NO: 485854

SEQ ID NO: 486139 - DNA, 276 bp, Shigella sonnei; identical to SEQ ID NO: 484087

SEQ ID NO: 486140 - DNA, 681 bp, Shigella sonnei
atgcaaagccagatggacccggtatacacgccggcgcgaaaaattcacctgtaccactgcgaccatcgcggcctgccgctggcccttatcagcacggaagggacaacagcgtggtgcgcagaatatgatgaatggggcaacctgctgagtgatgagaacccgcatcatctgcagcagctcattcgcctgccggggcagcagtatgatgaggagtccggcctgtattacaaccgccaccgctattatgacccgctgcaggggcggtatatcactcaggatccgattggactgaaggggggatggaatttttatcagtatccgttgaatccggttcagtatatagattcaatggggctggcatctaaatatggacacttaaataatggcggatatggagcgaaacccagcaaaccgcctacgcccgatccaagtaagttgccagacatagcgaaacaattaagactgccatatcctattgaccaggccagtagtgcgcctaatgttttcaaaacattcttcagagcattaagcccttacgattacacactgtattgcaggaagtgggtaaaacccaatctgacttgtatgccgcaggatgatccccagtatccagggatggagacaaagacagcaagtgattacctgccacagacaaattggtcaacaactcaattacggtga

SEQ ID NO: 486141 - DNA, 378 bp, Shigella sonnei
atggacgaacagtggggctatgtcggggctaaatcgcgccagcgctggctattttacgcgtatgacagtctccggaagacggttgttgcgcacgtattcggtgaacgcactatggcgacgctggggcgtcttatgagcctgctgtcaccctttgacgtggtgatatggatgacggatggctggccgctgtatgaatcccgcctgaagggaaagctgcacgtaatcagcaagcgatatacgcagcgaattgagcggcataacctgaatctgaggcagcacctggcacggctgggacggaagtcgctgtcgttctcaaaatcggtggagctgcatgacaaagtcatcgggcattatctgaacataaaacactatcaataa

SEQ ID NO: 486142 - DNA, 216 bp, Shigella sonnei; identical to SEQ ID NO: 485850

SEQ ID NO: 486143 - DNA, 303 bp, Shigella sonnei; identical to SEQ ID NO: 484410

SEQ ID NO: 486144 - DNA, 657 bp, Shigella sonnei
atgaaaacaaacacagatgatggggctaaaatttacacaccacttaccctaaagctttatgactggtgggttttgggagtatcaaatcggcttgcatggggatgtcctacaaaggaacaccttcttccacactttctggaacatttaggtaacaaccatctggatattggtgttggaactgggttttaccttactcacgtacctgagagtagtctgatatctttaatggatttgaacgaagctagcctgaacgcggcatctacaagggctggggaatcaaaaattaaacataaaattagccatgatgtttttgaaccttatcccgcggcgttacatggtcaatttgattccatttccatgttttaccttcttcactgcctgcctggaaatatatctacaaaaagctgtgtaatacgcaatgcggcgcaggccttaactgacgatggaactctatacggagccacaattcttggcgatggagttgtgcacaatagcttcggtcaaaaactgatgcgcatttacaatcagaaaggcatcttttcaaacacaaaagattccgaagaaggcttaacacatatactctcagagcatttcgagaatgttaaaaccagggttcaaggtactgtagtaatgttttccgcttcagggaaaaaatag

SEQ ID NO: 486145 - DNA, 513 bp, Shigella sonnei; identical to SEQ ID NO: 485852

SEQ ID NO: 486146 - DNA, 327 bp, Shigella sonnei
atgactaaaaatactcgtttttcccccgaagtccgtcagcgggcgattcgtatggttctggaaagtcaggatgaatatgactcacagtgggcggcaatttgttccattgccccaaagattggctgtacgccggagactctgcgtgtctgggttcgccagcatgagcgggataccgggggcggtgatggtgggctcaccaccgctgaacgtcagcgtctgaaagagctggagcgtgaaaatcgtgaactgcgccgcagtaacgatatccttcgccaggcttccgcttattttgcgaaggcggagtttgaccgcctctggaaaaaatga

SEQ ID NO: 486147 - DNA, 537 bp, Shigella sonnei
atgcagtcggtactccgtccgccgtcccgccgcatccgtctgcgccttcagcctccccgcctcatcatactcgctgcgggtgatgctcccgtcggcatgctccttcttcaccacccgcttcaggccaccctcgccttccgtgtacagcacctcccgccggttcaggctgtccgtgatgattacccggctctctccgtactcaaagcggtagtccagcccctccgggttgacctgctccgtcacccgaccggtatcatcataccggtagcagctctccggcctccccgcataatggtgcgccaccatccgcccggcgtgctccgcatcataagtaaacccgcgcacctgcatcccgctgcggtcatacaccgcccgcagttcaccaccggccgtgtacgtgtagcgcgccagcggcgcagtcggctgttcatccgggtatgccgggtcgtgtgtcagccataccgcctccagccggataccgttatcggcaccgtactctgtaccggcgggcagcgtgtcggggaaggaaggagctga

SEQ ID NO: 486148 - DNA, 303 bp, Shigella sonnei; identical to SEQ ID NO: 484410

SEQ ID NO: 486149 - DNA, 435 bp, Shigella sonnei
atggtagtgtccgctattgccagtacacctcaaactgatgtgattaatgccattgtcaaaccgttctatgaacgtcagatgagtaagtcagataatccaattgataaagttgtaaggtcaaaggtggaacccacagaccaagcattgactggtgacatgaactctttagccgctgttttatgggctatggttcagggcaaatcaaaagatgttccacagttttcacctgaagcattaaataatctgaaaggtcgagtggaaacattcacacaagatttaaaggttatcaaaccgtcagtaaatattcagcctcagacaatcaatatcacaactcagacggtacttgatggaaaggttattgatgaaagaaccacatcgcatattaatcgtatgcaggaagataccttgattagctcagcttatccagaggaataa

SEQ ID NO: 486150 - DNA, 441 bp, Shigella sonnei; identical to SEQ ID NO: 478325

SEQ ID NO: 486151 - DNA, 642 bp, Shigella sonnei
atgaacaccgaggtgctgaataaccgcaccacggatgtgataaacaaccatgccgaaaaaataggtaacaaccaggcgatcaccgttaccaataaccagatccagaacattggcgttaatcagatacagacggttggtgtcaaccaggtggaaacggtgggcagtaaccagattatcaaagtgggatcaaaccaggttgaaaaggtggggatcattcgtgcgctgacggtgggtgtggcttaccagacgacggtaggcggcattatgaatacctcggtggcgttgttgcagtcctcacaggtagggctgcataaatcactgatggtgggaatgggctacagcgtcaatgtagggaataacgtcaccttctcggtgggcaagacgatgaaggaaaacaccggacaaacagcagtttattctgccggtgagcatcttgaactctgctgtggtaaggcaaggctggtgctgacgaaggacggaagcatatttctcaacggtacgcacattcatctggaaggggagtcggatgtgaacggtgatgcgccagtgattaactggaactgtggtgccacacaacctgtaccggatgcgcctgtgccgaaagatttaccccccggaatgccggatatgcggcaattttga

SEQ ID NO: 486152 - DNA, 498 bp, Shigella sonnei
atgtcgccatcattacgcaaggctgttgcagttgctattggtggcggggctgttgctatagcatctgtgttaatcactggcccaggtggtaacgatggtctggaaggtgtcagctacatactatacaaagatatcattggtgtatggactgtatgtcacggacacaccggaaaagacatcatgcctggtaaaacgtataccgaagcagaatgcaaagctctcctgaataaagaccttgccactgtcgccagacaaattaacccgtacatcaaagtcgatataccggaaacaacgcgcggcgctctttactcgttcgtttacaacgtgggcgctggcaatttcagaacatcgacgcttcttcgcaaaataaaccagggctatatcaaaggcgcatgtgaccagctatgtcgctggacatatgctggcggtaagcaatggaaagggctgatgacccgtcgtgagattgagcgtgaagtctgtttgtgggggcagcaatga

SEQ ID NO: 486153 - DNA, 303 bp, Shigella sonnei
atgacggtcagatattatatcagttctgctgatttaactgcagaaaagttcgccacagcaatccgaaaccactggcacgtggagaataagctgcactggcgtctggacgtggtaatgaatgaagacgactgcaaaataagaagaggaaatgcagcagaattattttcagggatacggcacattgctattaatattttgacgaatgataaggtattcaaggcagggttaagacgtaagatgcgaaaagcagccatggacagaaactatctggcgtcagtccttgcggggagcgggctttcgtaa

SEQ ID NO: 486154 - DNA, 459 bp, Shigella sonnei
atgaacgacatctcttctgacgacatcttcctgctgaaacagcgccttgccgaacgtcagttgaaaacgaaaccgctgctgaaatccctggaaagctggctgcgtgaaaagatgaaaaccctgtcgcgacactcagaactggcgaaagcgttcgcatatgccctgaaccagtggccggcgctgacgtactatgcagatgatggctgggctgaggcggacaataacatcgctgaaaatgcgttgcggatggtcagtctgggccgcaaaaactacctgttcttcggttcggatcatggaggagagcggggagcgctgctgtacagcctgatcgggacgtgcaaactgaacggagtggagccagaaagctacctccgctatgtccttgacgtcatagccgactggccgataaaccgggtcggcgaactgctcccctggcgcgtagcactgccgactgaataa

SEQ ID NO: 486155 - DNA, 348 bp, Shigella sonnei; identical to SEQ ID NO: 485869

SEQ ID NO: 486156 - DNA, 366 bp, Shigella sonnei; identical to SEQ ID NO: 485870

SEQ ID NO: 486157 - DNA, 177 bp, Shigella sonnei; identical to SEQ ID NO: 485877

SEQ ID NO: 486158 - DNA, 339 bp, Shigella sonnei
atggttgtttatcacatccgtggtgcggttattcagcacctcggtgttcatgttcttctgcgcgtggatgtagacctgttctttccctgtcgcatcgtcaaacttcagttcattaaacccgctgcccttataggttttcgaacgaatggtcatctgcgtcttcgtccccggcaggctgccgggtgtgcggttttcctggtggtaggtacgccccataataatcggctggtccgggtcgccgttgaggaagtccacaatcacctcctgacccacacgcggtatcgccaggttgccaaagccggtgcctgcccacgcctgtgccacacggatccagcatga

SEQ ID NO: 486159 - DNA, 147 bp, Shigella sonnei; identical to SEQ ID NO: 465857

SEQ ID NO: 486160 - DNA, 333 bp, Shigella sonnei; identical to SEQ ID NO: 8518

SEQ ID NO: 486161 - DNA, 2700 bp, Shigella sonnei
gtgaatgcagtcattccgaaaaagagaagggacggcaagtcttcgttcgaagacctggtatcctacgtctctgtccgggatgacatgaccgatgaggaactggatttatcttcttcttcgcaggctgaacaaccgcaccgaagccgtttcagtcgccttgttgattatgcgacacgtcttcgaaatgagtcattcgtggcgctggttgatgtcatgaaggacggctgcgaatgggtcaacttttatggtgtcacctgctttcataactgtacttctcttgaaactgccgctgcagatatggagtacattgcccggcaggcacactatgcaaaagatgacactgatcctgtttttcactacatcctttcctggcagtcacatgaaagcccgcgtccggaacagatttatgacagtgtacgtcatacgctgaaatcactcggccttgccgaccatcagtatgtctctgccgtgcatactgatacagataatctgcacgtccatgtggctgttaaccgggtacaccctgaaacgggttatctgaaccggttatcatggagtcaggaaaaactcagtcgtgcctgccgtgagcttgaactgaagcatggttttgctccggataacggttgctgggtccatgcgccgggaaatcgtatcgttcgcaaaactgccgttgaacgtgatcgccagaacgcttggacacgcggaaaaaaacaaacttttcgcgagtatgttgcgcagacagcggtcgctggtttacgcagtgaacctgtacatgactggttatccctgcatcgtcgtcttgctgaagatggtctgtacctgtctcagatggacggaaaatttctggtgatggatggctgggatcgcaacagggaaggtgtacagcttgactcgtttggtccctcctggtgtgcagaaaaactcatgaaaaaaatgggtgactacacgccagtgccaaaagacattttcagccaggtggaagcaccaggacgctataatccggacttcattgcagctgatgttcgcccggaaaaaatcgctgaaacagaaagtctgcagcagtatgcctgtcgtcatcttggagaacgtctgccggaaatggcacgggaaggacggctggaaaactgccaggctattcaccgcacactggctgaagcgggattatggatgcgtgttcagcatggtcacctggttatctgtgacggttatgatcataaccagactcccgttcgtgctgacagcgtatggtcactgctgacgctcgacaatgtgaatcaactcgatggtggctggcagcctgtaccaacagatattttccgccaggttacgccaacagaacgcttccgtggtcgtcgtatggagagctgtcctgcgaccgataaagaatggcaccgtatgcgtacaggtacggggccgcagggggctatcaaacgcgaactgttttctgacaaagaaagtctgtggggatacagcatcagccattgtagccctcagattgaagaaatgatcacacagggtgagtttacctggcagcgttgtcatgagttgtttgcacaacagggactgatgctacagaaacaacatcacgggcttgttgtcgttgatgcctttaatcatgagcaaacgccggtgaaggccagcagcattcatcctgatctgactctggggcgtgcagagccacaggccggaccttttgtgagtgccccagcagatttgtttgacagggtgcaacctgaaagtcgctataacccggagctggctgtcagtgacaggtacggggtcagcagtaaacgtgacccaatgctgcgccggcagcgacgtgaagccagagctgaggcccgtgctgacctgcgtgcccgctatctggcatggcgtgaacaatggcgtaaaccagatctgcgttatggggaacgttgtcgggaaattcatcaggcatgccgtctgcggaagtcacacattcgtgcgcagtacgatgatccggcattacgtaagctgcattatcacattgcagaagttcagcgaatgcaggcattgatcaggctgaaagaagacatcagggatgagcggcagaaacttattgctgacgggaagtggtatccaccctcttaccgtcagtgggtcgaaattcaggctgctcagggagacagggctgctgtatcgcagctgagaggctgggattatcgcgatcgccgtaaagataagtcacgcacaacgacaacagaccgctgtgtcgtgctttgtgaaccgggcggaacgccggtatacggtaataccggtgatctcgaggcccgtttgcagaagaacgggagtgttcgtttccgtgaccgtcggacgggagagtttgtctgtacggattatggtgacagggttgttttccgtaatcaccatgaccgcaatgcgctggcagataaactggatttgattgcaccggtattattcgggcgtgatccacgcatgggttttgaaccagaaggaaacgacaaacaatttaaccaggtctttgctgaaatggttgcctggcataatgtgacaggccgtaccggtcacgaagactacaggattacgcgaccggacgtggatcatcaccgtgaaggaagtgaacgctactaccgcgattatatcgcggcgaacagcaacgatgacgcatcactgcctccgccggagcaggataaacgctgggaaccgccttctccaggttaa

SEQ ID NO: 486162 - DNA, 2292 bp, Shigella sonnei
atgagtgaacatcgcgttaaccccgagcttttacaccgtacagcctggggaaatcctgtctggaatgcactccagagtctcaatatctatggcttttgcctggtggcaagtcttgtggccagttttatctggccacttgcattaccggcatgtctgttgttcacactgataacaatgctggtatttagtctgcagcgatggcgctgccctcttcgtatgcccatgacgctggaatgtgctgacccgtcacaggacagaatgattaaaagaagtcttttcagcttctggccaaccctgttccagtatgaggtcattctggaatcaccggccagcggcatattctatgttggttatcaacgcgtcagggatattggcagggagttatggctgagtatggacgatctgacccgccatataatgtttttcgccaccaccggtggcggtaaaacggaaaccatctttgcctgggcgattaacccactttgctgggcaagaggattcacccttgtcgatggcaaggcacagaatgatacggcaagaacgatctggtatctggccagacgctttggacgtgaagacgatgtggaagtcattaacttcatgaacggaggaaaatcccgcagtgaaatcattctgagtggtgaaaaaacgcgtcctcagtcaaatacctggaatcccttctgttacagcactgaggcattcacagcggagacaatgcagtcaatgctgccccagaacgtccaggggggcgagtggcagtcccgggccattgccatgaataaggcactggtatttggtactaaattctggtgtgtgcgcgaaggcaaaacaatgtcgctgcagatgctccgtgaacatatgactctcgaagggatggccaaactttactgtcgtggcctcgatgatcagtggccggaagaagctatcgcaccgttacgtaactaccttcaggacgttcccggtttcgacctgtcgctggtcaggacaccatcagcctggacggaagaacccagaaaacaacatgcttatctctccgggcagttttctgaaactttcagcacattcacggaagcattcggggatatttttgctgaagattccggtgatatcgatatccgtgacagcattcacagcgacaggattctgatggtaatgatccccgctctggatacatcagcgcatacaacgtctgctcttggacgaatgtttatcacccagaaaagtatgattctcgcccgtgatttgggctaccgcctcgaaggaactgattccgatgcactggaagtcaaaaaatataaggggcgtttcccttatctgtgtttccttgatgaagtgggggcatactatacggaccgtattgctgtggaagccactcaggtgcgttcactggattttgctctgattttgatggcacaggaccaggaacgtatagaaggacagacaacagccacgaatacggcaacactgatgcagaacacggggacaaaatttgccggcaggattgtcagcgagggcagtacggccagaacgctgaaaagcgccgccggtgaagaagccagggcgaggatgaacaacctgcagcgtcaggacggcatatttggtgaatcatggattgacagcccacaaatcagcatcctgatggaaagtaagatagatgttcaggagttgattgaacttcatcctggcgagttcttttctattttccggggagaaaccgtaccatcagcatcattcttcatccctgacaatgagaaaagctgcagtagcgatcccgttgttataaacaggtatatcagcgtggatgcacctcgcctggaccgtctccgccgtctggttccccgtacagctcaacgtcgaataccgtcaccggaaaatgtcagtgccatcattggcgtcctgactgcaaaaccctccagaaaaagacgaaaaattcgcacagagccgcacacgatcgtggatacattccagcaacgcattgcaggacgtcaggcggctatggcaatgctggaagagtacgacacagatatcaacgcacgtgaaagtgccttgtgggaaacagcggtgaatacgcttaaaacgaccacacgggaagagcgacgaattcgctatatcacgctgaacagaccagaactacctgaaacaaaagaggaaaatcagatatcagtgagagcagaaagagcaggtataaacctgttaacgcttccacaggacaataaccacctgacagggcgtcctgtaaacgggtttcatcataaaaaaaccaaccgtccggactgggacggaatgtactga

SEQ ID NO: 486163 - DNA, 1071 bp, Shigella sonnei
atgacaatcgagtactttgcaacacgcattgcaaaacatatttccgtgcaggcaatctggccggatggcaggacagaaattattgccgtccttccacgggatgccctgtcagggctggtaacacgaaataatcaactgattcatatagcctttgacgccatgggcacccgtaacagagaaaccgtcctgattgataaacaggagcataacgctgaccagatacttacagctattgattcctgcctgcgccttgaatatctgatggaacgccgcttcagcagaacacctttgttccgtggcataatcgccagcgttgtgctgttcgtaatggcaacgattggcttctctctgttccgctatgttgatcgtgtattctgggatgatacaacgcctgaagcagtacagacagcaggtgagccacgactgctaccccctcacctgaatcacactgtgccattaaatgaaggcattcaactcccggttcccccgaaaaaagacgtccaggtcctggagaaaacaatcacaagcaaaaatccggaagccgcagctgcgcgacataatctggctactgttctgaagcggaacgccgatcggggcatgtttaccatcaacctgtcatccggtcatgaacgaaccctgttcgcatttctcgatcctgcctgtcctaactgcagacttctggagccggccttaaaacgcctggccagcgacttcaatgtcgttatctacccggtttcagttattggtggagaggaatccaccgaccgtgtggcaccactgctgtgtgaaaaagatgctcagaaacgtgctgccggctggcaccgactgtattccgcagataacggaatgatgacgccatcagaagaaacaacgcctgcagatgaaacatgcctgaaagcagccagagctgcgattgatgttaacaatgtcgccttccgtaagttcggatttgccggtaccccatgggtgctgtccgacaccggctggcatctgcctacaggaattctgcaggaaactggcacgcttaatttattcctgaaaaccaccgacagcgagtctggccatgagtga

SEQ ID NO: 486164 - DNA, 1209 bp, Shigella sonnei
atgtcttacaatcgacagcctgtcgcagaagatcctatgcagatatggggcgctgttggtgtccttcttatcctgctgctattcgttatatggttattcttgccggaagtggtttacgccagctgcctgattcttcataccttatggggactggttgactggggaccatttcataactatgcagcaccacgatacaacctgcttgccatgaccggtaacaacgccgccaacataagctatagccagtgggttaacgtcatggagcagaccataggtattctgtggatgtacctcttacctgtgacactctggtgtttgtgggagtggtatcaacatccgggacaaagtcgtttcacccgcagaccagtagatattacccgcctgccacacatctttgcttcgttgtcccctgctatcgcccctgtactggcagatggtgatccggaaaaactctttcatggtggcaaacgacctgaacggcgggttgctctcaccccggaagcatttgtcgagcagcatactctcatcaccaatatgcagctcgatgttgcagctgcaagacgatgtttcatggcccagttgggtaaacctttaacgtcctggaaagacatggcaccacatgaaaaagcgctctttgccatatttggccttcagtatttcctggatgatcggaaggcagcattaaagctcatggatacactgaacctctcatgcagaattaaaagcaaacgggacagcgggaaattctgtacccctgtttattcactggccaaatcagctttccagagagtgattaaaagcaacggagcacagcaatggctgaaacaacatcgctacgtccgcagtgggctggtctggctgtatgcacatgacctgcggcttacgccacccaactggatttggctgaaaggcgtggacagaacgctgttttatgcattacaccgcgccaataccacgaaaggatttattgaaggcgctggcgtggtggccgttgcacgtgcagaggccgaagccatgcgttttggtcttccctgccctgaaccctgtgttgatgaagcggtggaaggcttacggcgggatatgctcagtctcggtcttatctgggatgaaccacaaccagatcgcgaccggaaacgccgcatcctgaccaactggtccctcaccgacgacatcctgccccgcacacctgctacagacaacgaattctga

SEQ ID NO: 486165 - DNA, 1086 bp, Shigella sonnei
atgtcgcaattaaaacaacctattttcctgaaaaagataaaaaaagtcatcaacacaatccctgggcttgaagagcaaatctttgcatgccgaaataaaaaacgcagcgacaatccattattatttatcgacagaaaagatgaagaacgcatactaatgagtcgtctccagagccaacaaaaaaatgaagaactggcttctaaactagaatctttatttcatggaaacgaattatcgtcaccacacagtattttgtgttttatatactggcgctatacaaagaaaatttatcgcctaagcgaggacatcatcagtgatgtggctaacacctatgttgataacattcctgcacagatccttaaggaactcccttcatggagtatctatgtttcagccgaaaatctgcatactatacttcctacgtcctatccgatacatggatttttcttttatccatttttggacaataatggaaatattatccggcttttcattattgatgatctgaaacaaagccaaggaactacagggctaaaagaaaaggatgttgacgtcgtcaataatatcatcagaataaaggactctcgtgaaggacttcttgactccagaaagatggagtgtatcgatggtgaagtcgtcgtaacagttaacgaaaagctcaaagatttcagagacagggagtttaatcttcttaacgcacagatatcaatggtgctttatatctgttcacagatcaatgatataaaagaaaaaaatcaatttaaacggtcagaaaagcacaaaaagcatgttcacactcaccatgaactaccagcacaaaacattcgggagtgggacgttggtattcgaatggggcaagccatacggcaatatcgccaagcagaacccacagggaaagagcggacaacaataggtagcaaacgtcctcatatacgccggggacactggcatacatactggacaggaagtaagaaaccagaactagcccatgagcgtaaacctagattaatatggttacctccggtaccagttaatttagaagacgtaaacaaactaccggtggtaataacgcccattgataaatga

SEQ ID NO: 486166 - DNA, 156 bp, Shigella sonnei; identical to SEQ ID NO: 109579

SEQ ID NO: 486167 - DNA, 252 bp, Shigella sonnei
atgtcagaaaagtggagtaaagaattcgactcttgctttcaggtggggagcatagaagaaattgccgatgctctcgagaaacgcagcggaagcgaggaaaatgcgttagccatgctggcaatgacagccttcacactcatgacccgacgtggtatctgcgaaatgcagaacgtggccccggatggcaaaggcattcggctggagctaatcggcttcaggggaaatgaaacaataccggatacgcttcattga

SEQ ID NO: 486168 - DNA, 297 bp, Shigella sonnei; identical to SEQ ID NO: 10662

SEQ ID NO: 486169 - DNA, 177 bp, Shigella sonnei; identical to SEQ ID NO: 109581

SEQ ID NO: 486170 - DNA, 210 bp, Shigella sonnei
atgagcatgcctcctgcgatagctaatactttcttgtttgaaatgatgaagagtaaatcaaaagacgttacacttgctgcgatctatgcattaggtgaaggccggtgtcaggaggagaacattactcgtgaattacatagattgagtcaaagtgatgatatggaaataaaaattgctgcgattaaagcacttggtcgaatttatcggtaa

SEQ ID NO: 486171 - DNA, 615 bp, Shigella sonnei; identical to SEQ ID NO: 10663

SEQ ID NO: 486172 - DNA, 2169 bp, Shigella sonnei; identical to SEQ ID NO: 10664

SEQ ID NO: 486173 - DNA, 585 bp, Shigella sonnei
atgaataagttaccggaaaattcagaccagacgaaaaacgtcaaaaaatcactatccataacccgcatagccacccggggaattattaacatttttgttcctctgatggagactcgcctgataacgaattctgtacagcatatgctggaacaacaaaaacgcaggctggacagatttcgtcaggtaaataataaaaaggcgcaactccaactcacgtgggaagaagctctgcaggccagccatatgtcagtagacgatctggatcgtcgtttccgccggcgcagaacagtatggcgattctgttgctggagtctgctggccatcgctttgtttctcagtggtatgctctttgccgcctcttcattacctcttacgactctggtacgcgccatcagcactcttgtgctgatactgtcaggcgtcgctctttgtgcttccagagcactgattgttacataccgcctctggcagttgcatgaacgaaaagtcagcgaacccgagcaggggacttttcgtgattttctgaacacccgcaatggctggcgcaatgccacgttaattgccgtaaccagtaaacaatactga

SEQ ID NO: 486174 - DNA, 1203 bp, Shigella sonnei
atgcaaagaaaaacattactcgcagcccttatagccaccctgagtggaacggcatgccaggctcatgcttattcagtcaccgtcgtcgccagccggcctgttgaagagcaggtcacccccagaatggaagccatcaaagatgtccttggcaacatactgagtacccagacagccacgggtaccgctatcaatcagaactctgaaaagctggcaagtgtcattgcccagaacggacaggcgacacgtcagcagatgattttcagtaatgaaactcagcgcctcgaggaggctcggaaaagcttcaccgtgccagactccatctgcagtgaatccgcatcagggattgcaacagaaagcaaaagtgcctcagcatccgcagcctcaaaactcagtaaaggtggcggtgtgagcaaccgtagcatccgcgaccgtctggccagcgcagcaaactctcccgtgcgggaagcttatgatggcgcggccatacacgccagttactgtacagaagcagaatatgcacgttttggaggaaccgccgtttgtccttctgtgggcgaaataccaggtggagacagtcaggtacgctcgatttaccacggcgcaggtacagcggacacacctgcggcactgacatgggatcagaagcaaatagatgcagcgactgcttacatgaaaaacacttcccgcccctctgccggtcgtgctctgggtaaaggagaagtgaatacccagagtgggcgaacctacgtcggactccagaacgaatacaacggcatcattgattctgcgtcgaatccccaactgacgctgattgctgacagcacgcctaatgaaagcacacgtaaagcactggctgaaacactgcagtcagactcagcggccgcttacttcgaccaggtggcttcaccagaagcaaaagcacggggatatatgagtacccgtgagtttgaagcttttgaggctggccggcgctacgccaacacagcatacctggtggatttacaggaaatgcagggggataacctgctccgtgaactggtaagaatcactgcgcaaatgaactggcagctgaacgatctgaaagaacagatccgccagggtaatgttatctctggccagcaactggctctgactgcccgccagtattatgaaaaacaactcggtagccttgagaaaacaatcaatcaggcaaacgcacgttga

SEQ ID NO: 486175 - DNA, 615 bp, Shigella sonnei
atgtgtacaattcatatcaccccacgctgccggagacctgccagagggcaggtatttcttaaaaaacttgaggtaaaaggtgacagtttctcattcactctgccgtcacgtgtcttcaggttacatccggcccccaatcccagagtgatatacgcctcggatgccagaacacagggaaaggtcacaggcatgcggctgttgttgccgtccagcacagatgagctgataacaacggcaatatggcaggtttctgtcccggatgaagcaccattcgacgttcagcatgtcatccagtggatactcccttcaccgctggcttcgctgatgtccgatgatacctggttatggccatccgttcccggaacgccggcactgagtgccggtgactggcctgttatggatactgacccttccaccttacggcgcgtcagacgtcgttctttcagcatcatcgataaccggaacaggaaaggttatatcaccaggcgatatcagtgtttcccactggccccactacctgaagacagaaaatacgacagccttcctgaccttgtgctccatcccgagcaggagacaataaaatgcaaagaaaaacattactcgcagcccttatag

SEQ ID NO: 486176 - DNA, 3045 bp, Shigella sonnei
atgaacataaaccgtttaatcttcactatcgaagactgtctgaacacgctatcccgtttctctgtcgcaagcagttttgttgagtattgcgatttacgtactgtaattggtctggacagacaggatcgtgaacgtcgcccatggctgaattcgccctatattgcagccacaaagcgtggagaatatctctctgtctttgaagtcagcggtgctttcagggaaatggatgaagcatccgaccagactggctcaggttcactggaatcgctgatcaccagcatgagtgacagcctgaatacggcatataaaaacagcggtcataaaatcagctgcgttttcgagcgtgaccctgacatggggaaagaggaaatcgaagacatggtcgccccacaaaaacgctcactggctaatacaggtatccagttacaggatgtggtcgatgagaaagtcacaacactgtccccatggctggtccgggagcgttgctggctggcgatctggagtggacccgaccttatcagcaacagcgatcgcactgcccatgatgagcttgtcagaagactggctgaacgggtaccgaaagcacgctttgcccagtccccctggcagtggaccttatctgcactgaaaatccgccacgaagcttttcttgataatgtggaacaggcactgagacattcatctgatggcctgattctccggcttctggatatacacgaagtcgggcgtgaaatacgtcgtcaaacagaacggtacagcacaccgcgtaactggcaaccccacctgcctgaagatgcccagccagcaggatatcgctggactgacgatgaatccgtactacatgctccttcattgcatttgcagttattcaacacgcaggtgaccacacagggcaacctggttcaggcgggcggactctggcacggaatggtatcgattactttacctccgcaaaatctgcagacgtttaacgaactggtccgtgccgtcccccgcgcagtcccctggcgcatcagaatggatctgatgcccggcgggatgaaggctcttaatctgaagaaaacgcttctgacttacagcagcttcatttctgccgttcgtccaatgtatgaatccgttatgaccctggcggcaacggatgaaaaagaacctgtctgcataatgaccatcatggcctccacgtggggaaaaacacgtgaaatatgcgcacgaaaccaggccattctgaaatcagccattgaaggctggggcgtatgtggcaccacgacaacatttggcgatccccgacgcgcctgggtgaataccattctcgcggcatccggaggctccggcccggttcccctgtatcccccgttgtcacatgccatctcgcttttcccgcttaacagggcaggctctgtctggcgaggcaaagggaatctgatgttacatacagaagacggttccgcatttgaggttggtctggcgtcatcccaacaaaataaacatacagaactggcaccaggcgatccgggactgggtaaatcagttctgattaatacgttgtcggaaatacagatatcatctgctcagaaaaacctgcccttcattgcctatatcgataagggatacagtgctcagggactggttcagcttattcgcgacagtcttcctcaggaaagaaaagacgaagctgtcggtattattctgagcaatgatccggactacacccgtaacctttttgacgtgatgtacggcgctaaaaagcctattacgccggaaaagaatttcatgtcatcggtgctgtgtgctctctgtgtcgataccggtaccggtcaaccctgtaaccccggagacacccgacaaattatcaaccagcttatcgagctggcttttaaagagtacggtgaaaataatccgcgactttatcgcgcctcaacggaagaactggtggattcagcactgcaggactcgggactgtatgaaaaacatgatgcagcctggtgggccagatcaacctggtttgaagtccgggatatgctccacaatgccgggtatatcatggcggctcagcgggcacattatcaggcaatgccccagcttcccgaagtgtcctcgatgctgggccataccagtctcagggatgttttcggtactgttcagcgtgatggttcaaacgagcttctgctggactacatccgccgcgccctggagcagggacataacgactaccccatgatatccgggtatacccggtttatgatcaacccggaaacccgggttatcgctgtcgatctgaataatgttgccggtgacaaaacgcctgcaggcaggcttaaaaccggcatcatgtacctgcttgcaggtcagatcgccggtggtgacttcaccctgccacaatacagggatgaagtgttaaagcagcttccacgggaataccatgaaatcgctcttaaacgtattaaccaacttgatcaggaggttaagacaaaagtttatgatgaactgcataacgcccggggcattgacttcatctgggaaaatctggatacccaggagcgtgagcaacgcaagtttgctatccgcacggttctgagtacgcagtatctgagggactacccggaaagcgttcttaagtcagcaaatactctctggttactgcgctacaaacccgaagatatccccgtactgagggataacttcaacgttcctgaatttatgctgaaacgcttcctgaaaatgccggaaggcccggcaccagatggtagtggtgttcctgttctgggagtattcagggtaaaaagtggcacgcttgcgagaatactcaaatttaccgtcggtccactggagctatgggcgctgaactcatcgccaaaagacagtgccctgcgtaaaacactgacaaataagttaggttcagttcgggcacgtaagattctggccgaaaacttccccagaggttctgcaacgtcattaattgagcaccgggcgggccaacataacagtgacaatgttattgaagaactggcctcggagctcatccgaaaacagggatacaatctctga

SEQ ID NO: 486177 - DNA, 801 bp, Shigella sonnei
atgcaacacagcattaaagacttgtggttgtatccctttccagaaattgatgtggttcatacacaggagccactgttaccggaaccggaattaacaacgcccggtcgatgtatctgctgccggcaaaacgtcaggcaccgtttcagactggatgactcatggccactcagacagcttaccgacacaatcagtgacacacgagttcgtcttaataaggccacagaacatctggataagttaaaaaagcgtggtgaaccagtcgcaaccggcgaaaaggaaaagtacaacacggcagtaaaagccgctgaacgggcgcttgagcaggcccgtctgtctgccagacgtctttcactccgccatgtacagaaagctgaaatcaccagtacagagtcgttgtcagagaaagagcaggaactgtttcatgaagacggcccgccttacagcttatgtgctttctgccacgcctggcattcactgaatggttatgccgcagcacagggcgttatggtgtggctacccgaccttcatccatccacggtcgtggcccttaaccgtcgttcattacaggaagttttcagtaatgataagttccgggtccggcggggacgagaagcgctctctgcactgatgcaaaacagactggcggttgaggataaattccgcagtttccgcccagccgatttcgctgacgtttttcgtcgctatccaccttccggtcgttcgcccctgcgtgaaaaaatgaacgggattgccctgattctgacaccagattcattcatcaaaaaagaatacgttgattga

SEQ ID NO: 486178 - DNA, 189 bp, Shigella sonnei; identical to SEQ ID NO: 8502

SEQ ID NO: 486179 - DNA, 405 bp, Shigella sonnei
atgtcacgtattcgtgtcgtggcggcccgtctgtacgccgcatttatccatgcacaactgtttgtaatgtcatgccggagcaaactgactaagtacctgctgctcattcccatgatgttgctgcccaaagccgttcttgccgatggagatcttgccgatatggttcgcaatgttggtgaaggtgctaaaacagcacagtcatcatcaatcactattgcgcagttcatcggcgtaattctgtttctcgggggcctgattggcctgaaaaaagttgggaaacaaggggggatgggactggctggttgcattgtatctatcgtcattggggcgctacttgtcgccggacctgaaatgatgaatcgcagccagaaacagttggggatttccacaatttccattggctaa

SEQ ID NO: 486180 - DNA, 528 bp, Shigella sonnei
atgaacatggatgccctgaccgccattgagaactttgccagcagtattttcagtgccggaatggatttcctgtttacctggggagaattcatcggggtgatcagcatgattaccctgtttgcccgcgcccgttcagccggtccggtaaaaatgtctcccggaaaatttattgcggggatgttaaccagctgcatgctcgtatcactcccggcaatgattaacgccggaggcgtacaaatgggattcagggctgactcatttggcccgattgcatatgtacaacctcagacgtttggcgctgctgctggcgcagcaaatgcagttctgtcgctggccaagctggccggtgtgggatttgtcatgaacgggatatccatctggcgcaaggccggactcgatggacataccgcactgagtgccagtgaatccgtcagtaaaggaaacgtcaaatttattgccggcgtcctgctggtctttatcgatcgtgtcctcaatgccctgctggcaagcattggaatcgtcttctga

SEQ ID NO: 486181 - DNA, 705 bp, Shigella sonnei
atgaaacctgaaacagaaatagatgaaaccggcagcttcggtgaacccgaagagaaacccgcccccttctggaaacgttccgtctgggggatatctgtagcaacatgggggctatgtgcagtcgtgttgctcgcagccatatggtatctgttcctgagagcgccatcggaaacaggcatgtctccgtttaatgatgcggatgctggcgtacagacctggcaaaccacacaagaatcatcaccttccgttcagtccactgagactatgactgtccggacaggagaagatatgagccagcttgcccgggatgtaaaaacagagctggataaccgcgatgaaaaaattcaggcaacactgaatatgcttcacgacagcattaacaagctgggcgaagctataaaaaaggatgaagaatacgcacaggaaacacgccgtcagctggatgatatccggagccgcctgaacggaataatgacacagaaaagcgtcactgaatcctcttccacaccgcatccagcaaagaaaaaaacgtcgtctgtacttaacggaatgaaaatcatgtcgatggaaactggtatggcctggattcgctggcagggtagtacctgggctgtcagagaaggtcagacgctgggcaatgtggtgatccagcggattgatccgactacccggaccatcatcaccagtgcagggacgttacgctga

SEQ ID NO: 486182 - DNA, 1290 bp, Shigella sonnei
atgagtgctgaacaggatgccggtaaatccggaaagaaactggctgccctgcttgggctgagcagcatcatcttatttggcggcagctatatcgcgttttccaaactatcagggagtaacagcgatatgcagtcagccgtgaacataaacagtgcagcaagcggcggaacgcgcagcgttaccgaaacgcctcactatcgtgaactgttaagagcggataatgaacgaggggccgcagctgcagcccgcaataatcagacgttcattgccagtcttccgcaggggcttgatattccggacactccggaaaagcaacaacagcctgcagcaaaaccggaaaactatgctcatcgccaggcttccggcacaccacaggaggatcgagcagccagtgaaaaacgtatggagcggctgcaaaagctgattgtaagaataaaagatcagcatcctgccggtagtacaccaaccatagcaacgactatgtggaataaatctccggcagaaacaacagggcagaatggtacgcagcaattcgcattacagaatgccagcctgtccacgcctgtagcagaaaaagggatacaactgatacctgctctgacccgtataccggcatatattgatactgcagtggattctgataacccgtcatccaaggttatcgcaaccattcccgctggcccctgggcaggggcaacgctgttcagtccgggagtcaaactggtgggtaacggcgtggagatccatttcgaccggatgagctggaacggcatggaccttaaggtcaatgcatatgctcaacgggaagacaacctgatgtcatccgtggccagcaatgtgaatacacgctggtttaaacatatcattctgccgtcagtgttaggaggtgtgggcagtattggcacactttataaagatgccaacacgcaggttattcagggtaactatggcacggttaccggacgcgtgggaatgcccagtggtgaagctgttgcgggcgttattgccggtggtatggcggaaagaggaagtcagatattaacccgccaggcagaaagtgagccctataaacaggtagaagtgtatcagcatgaagtcgtatcaattctgtttgttgacccggtaatgacaaacgacgccaggtcatcttccctttccagtggcatttccccttcagttaatcgtacatcacaggcggaacaacgctcgcaggcacgaatgcagacagccatggagcaaagaaaagctgtgatgcaacgtcggtatgatgaacaaccggagacaccataa

SEQ ID NO: 486183 - DNA, 984 bp, Shigella sonnei
atgcaatcacgttatttactgagcacactgctcctggtgtgcagcgccgccacgtctgcagataacgcaggatggcagaacgcacgcacaccacaaacgacaaattctgccagcgatcacgttcagaacgcctcccaaaacaccggaggtgttccggcaacactggtcaaaggtgagctgcctgcccccgggcaggccagcccgctggtacaggatgcggcaaggcttgattctgagctctccgccgatgagattcgctcactacgcagtctcatggcggataacgagcgggccatcaatgcgcccatcaccagtgttgtaccccgtatcagctctctgacagttaatctgtcccccggtgccagccttcctcttgttcgcacagccatgaacaacctgagcgtggtgacatttaccgatatcaacggttcaccatggccacaatccgatcctccttataacgcggcaccaaaactctttgatgtgcagtacaacgagaacatggtgacaatcacaccattgcggccatgggcatccggaaacatttctgtctacctgaaaggtctgtcggtaccggtcatcctgaacgtaaccagtggcgaaacagatacgccgtcatccagtcaggaaatggacagtcgtctggatctgcgaataccacggcagggaccaaccagcccggttgtctccatcccgacggataagatcgccctgcatgatgcaacattacaggcatttctggatggtattcctccccgggacccttcagttaagaggctgaaattcacaggtaatgtcccggatacaacgatctggcaacacggcgatgacctactggttcgttcccgggcgatgttgcgcgatgaatttgaacagaccttgtcctctgccgacggaactcatctctggaaacttcccgtcaccccactactgactttctctgtgaatggccagtccgttcacgtgacaccagaactggagtaa

SEQ ID NO: 486184 - DNA, 693 bp, Shigella sonnei
atgaccgaaaataccgagccatcctcgccatcacatccggcacctgacccggaaatactgaagagcacaatcagggctatgaagcagtcagaacagcgggcaaataatgtccctgcgctgataaaagcgcttttatgtacgggcacatgtcttcttatcagtattactggtaacgccattcagtactggcactcaacgaatgtggagcgcgaatatttcgctacagacaatggtcgtctggtcaggctggcaccaacaagtcagccagcatggagtcagaatgatgcaatggcctttggcagccaggcactggcgaccgcattcaacctggattttgtgcactatcgttcacaggtctcctccctgtctccgcgtttttctgacgaaggttttgccggatatgtgaatgcattacaggcatctaacattctggagacgatcaagaaagagaagatgaatctgaccgccacgacaggtgcaggcgttctggtacgacagggacaaatgtccgacggcgtatggttctggacattccagtatcctgtccgtatgcgtctggtcggccagacaaccagcaagccagaacagtcttttgttttcgaaatcaccatccagcgtgttgaccccagactgaaaccatccggtatggaaatccggcagatgatctcccgtaacgccggaccgaactcctga

SEQ ID NO: 486185 - DNA, 348 bp, Shigella sonnei; identical to SEQ ID NO: 8495

SEQ ID NO: 486186 - DNA, 3765 bp, Shigella sonnei
atgccgtctgtatcccgataccgcacctggcttgccgtgcctgcagatgaaatcgaagatctcaaaaaagcacatcccccgatgaacgggcacacgcccgttctctgggacaaggagcacaaactctggtttgcccgcccgggggcggacctgtccatgctggaccgctggctgccccggccgcaggaagtctccatgaacggcagtgacccggtcaccgagtttgcccaggtactggaaaatgccgggctggttctgaaagaactgccggtcatggacgggaaaatccaccgtgtcccgaccgccggtgacaaaaaaggacaaaaaagtggcgcatatcgcggcttcctggacggcagacctgccggctggtacagggattaccgcagcgcagacgattcgccggtcacctggactttctccggcggagagcagacagatccccgcgcaagacttcacctgaaagcgcattcgatgcaacgcagggaagacgcggagcgggaactgaaagcacagtacaaccgacaggctgcctatgcccgccgctatgtcagcaaatggccgcaggccacggcacatgaatacctgacccggaaaggcattcaggctgcgccgggggtgcgaataaacgacaaaaatgagcttgttattcctttcagcaaccgtaacggcgcaatacgctcctaccagcgcattccggtcaccggcgggaaggatgcccgcatcctgaaagattccgagaaaaccggtaactggtttgcgctgggcacgccgcgcaacggccagccggtactgtttgccgagggctacgccactgccgcctccctgcacgaagccacaggccttccggtactgatgacagtggatgcgggcaacatgattattgtggccgaagaggcccggcaaaaatggaagcaaagcccctttatcttctgtgccgacaacgatcatgcacgccaggttaacaaaggtatcgtcagtgcaacaaaagccgcagaactgacaggaggatcggtcatctttcctgcgttcaccgatgccgaaaaagcgcaggggctgaccgatttcaatgacctggatgccagccggggacgggccgcttttctgcatgtcatcaacgcccagttagaacatatcggggtttccacccccaacagtaacaccccggaaatccgggaggcactggtgatcggcaacctcgtttttacaccggtccacactgaggaaaaaaccatgactccgacagaatatcctgaaacatcacccgatacagggcacagccatgaccagggaccttctctgccgtccgccacgcagcaggaacaacctgctgcttccagcggtaacattgctgatgaaacacagccatttaccagtcacgccactgaaaataacggcaaagatgagcggcaccctgataacgttcaggcgcaaacggaaagctctgtagttcaggacgcccctgcagaatcaccggcatccccggaaagtacaacggcgtctgcccctgatgaactcgctcatccggcggaacctccggaaaaagttgtctctgtggccacagataaagactggcgtgaatttgaagccgaactgtcacaaccggaaaaaaacgagttacaacaggagtccggcacttcaccagaaataccggcccctgctgcccccgccgcccctgaagacagcccctcatctgaaaccatgaatgaatcaaccgaaccatcaccttcccctgatgcagtcaaagaggaaatgaccgtgatgacggagcctgatgacaaacaaagcaccggaatatctccggatactccccgggaagaggcggtcagccatgtaactgaagacattccccttcagccagaaccgttccttcctgagtcagatggccctgaagaatacgaagactacagcgcatatcaggagctgatgaacaatgaaaatcctgagcatctgcaggaaaacagtgatatgccgtcgcaaccggacacaggccacgttcaggcagatgagtcagaacttcaggccacaacagccactatagaaccggctgtccgggatgaacccactccgcagcaacctgttcagagcacatcaccttctgataatacttcatcgtttctcgacaaagcgcgtggcctttttacgcgtaaaaaaacggattcacaggcgcatgagaacagtgatcccacgccctcagcggaaaccacgacgactccaccgatacctgacagtattgtctacgccccggaacgttctgatgcaccgatatcgctcaacatggacgaaattcttaaagagcttgactgggaaaaacgagcagacagaaccgtcctgtacaaactggatggcaaacctgccttcattgaccgggtaaaccggctggaaatggtcaacggtgccagcaatgacgatcgcagcgttctggccgcacttgctgtggccaccaaattttatgggggcgtcatagagctgacgggcagtgatgcctttaagcaaaaagcaatgcagttgattatcgagcacaacatcgatgtccggatgaaattgccagatcaacgggctgaactagaaaaattacgcaaggaaatggctgtcagtaaggatgctgttgtcacccatcagccaacaccggaacttaaccggaatatccctgaacaaccagctgtccctgaccccgttcaggaaaaagaagccacacaatccccggcgtcccctgctgccactgaatcatcaaccgtcagcaccgctcctgcatcatcaccgactgaaccaggcaaaacggcagatgcagcaccaggtgaagaaccaccaggaaaacttcgcccgggagagagcgtgactgccgtactgcacaattttggtcgtgctgaatatgcacccggcaaaggagaaagtttctttgttgagcttaaaaaccgcagtggcagcaaactctactggggggaacaactggaaagtctggtcaaaaaccatcagaaaggtgacgtggtgacactgacacttcagaaccgcgaacaattcatcctcccgggagagcaaaaagcacgtttccggaataagtggtccatggagtcagttaccaacgggatctcggtatcacatgataatccggataaaggtcagcgtattcaggcgattccggtcgaaacctttatgaaagtggctgcgcaaatcagccaggggtggcccgaagagatgaaagcgttacgtatgccagaaaacgtcggctcacatctgtttatcggtgaagaccgacatccggtctccgcgccacagaacgcaaatcaggtaacagaaataaccagcgcagcccctgacaagctgacacctgttctgggatcagtggataaggatacgcgtgaactcaacctgctacttgtccagagtgccgatgaacatctgcagggtgtggtccggctgaacggcacattgtatccggcactggccaccccatcggccgacaacagtcagctggttatcaatgcgctgaccgacaaaggtttacgctttgcaggttatggtgaagcggtaaaccacgatgctgacagcacgaatcgccccgcaccggagcttatgcagtttcatctgaaaacccgggaagaaccgctttttgctgctgtctacacgccggaaaaacaacctgatgcgttgtaccggaacctgggcttcgagcagtcatggcagcagtggtccaacagccaaaagccggaggacaggcaggaaaaaaatctgcatcaggatctctcccacagccccggccgatga

SEQ ID NO: 486187 - DNA, 552 bp, Shigella sonnei
atgtcaggtaaaaaaactatcgttactctgctccgggtatcactactggcatgcccgttactgttcacgacaccatcgtttgcaatgatcgacacgccatccgtgaaggtcggcttttctcctgaaggaagtgcatccgctctggtgcttgacacaatcaacagtgcggaaagctccatcaggatgatggcatattctttcaccgacccggatgtaatgcatgcgctggcaaaagcgaaaaaacgcggagttgacgtccgtattgttgttgatgacaaggggaatacgaacagggcaagtcgggaagcgatgaaatatatcaacctgctggaaattcctctgcggactgtagatgtcttccccatccatcacgacaaagtcatcattgttgacggaaacacggttgaaaccggctcctataacttctctcgtgctgctgcacgcaagaattcagagaatgtcgttgtgcttaagaatatgccggatgtagccgcacaatatcttgaacactggcaggatcgctggaataagggtacagactggagaccctga

SEQ ID NO: 486188 - DNA, 291 bp, Shigella sonnei
atgaaaagagaaggtttctggcgatatgcaacacctccagtcaacatccagggcgtacctctgccgttcaccatgatttatctgtttatatgcccttttccctccgaaacaaccttctggatttgcaccggcatcattttatttttcgtcattctcgaccgttcaggctggactgtcaggactatctgtacacgtattttcagcattctgagaggggccatcgcctccggtcgcccatggtggtatcgccaccatacggaatcaccacgagactggactggcctcgattaa

SEQ ID NO: 486189 - DNA, 1149 bp, Shigella sonnei
atgaatattcctgatgagtttggtctttttccgtttcagcgtttcactgcagatgaactacggcatttctttgtctggtgtgccgcacataaagtcagtgatgtggatctgaccggtgggtcacctgtatctgtcagtcgctttggccgacgggtgcgttgttccagtgcaacgttaccaaccacactcatgtcctccctgattgatgaactgttcggtcgggaagtcattccccgcgttctggcaggcaatccggttgacaggacgatacagattaacggggatgcatccggtcgctatggtcttaaacgcggagaacgcatccggttacgctctcacctcattcagggcacatctggtgcggaggagaaagcaatatcaataaccatgcgtgtcatcccgacagaaataccggacatcctctccatgaacattgaaccagacctgcttgaagcaatggtctgcaaaagcggtctgggatttgtatgtggtgaaaccgggtcaggaaaatcaacgctgtgttcagcactgtaccgttacattatggacaatttccccgacgccaaaatcgtgacatatgaagacccggtggaatatatcctgggaaatgaaaacgatctgctcccaccgcatcaggcagaaatcgggcgtgatgtggtcagttttgctgccggactgcgttctgctgtacgacgtaatcccgaaattatcggtgttggtgagatcagggataacgaaaccgccgacgcagcggtacaggcaggcaacaccggacattactgcctgagcaccatgcatacgaaatctcctggtgaaacgctggcacgtcttcttgggctgtttccccctgtcatcagggattcgatggcctgggctgtcctgtcactgttgcagttcattctggttcaggttctggtcagaacaaatgacggtggccgtaaagccgtccgggaatatatcgtcattaacgatgagcttcgcgacaatctttccggaatgccacatgcagagtgggggcatcacattgatgccataatccggcaggaaaaacgtcgtatccgggatcagattctggaaatgtatatccggaatgaagttgaccgaagagaagcgattctttttatcccgccaggggagttacggtcatga

SEQ ID NO: 486190 - DNA, 819 bp, Shigella sonnei; identical to SEQ ID NO: 8490

SEQ ID NO: 486191 - DNA, 459 bp, Shigella sonnei; identical to SEQ ID NO: 244267

SEQ ID NO: 486192 - DNA, 585 bp, Shigella sonnei; identical to SEQ ID NO: 477151

SEQ ID NO: 486193 - DNA, 1200 bp, Shigella sonnei; identical to SEQ ID NO: 244322

SEQ ID NO: 486194 - DNA, 825 bp, Shigella sonnei
atgagactgaatacgaccggtattgcggcccgaatgatgctctcgctggacaaaaaagcaatcggcgaaaaactcatcaacggtcgtcagataaacccgacacctctgcaggtccgttacccccaaggggtaagagaagttctggggataatgagcgaacaattagccatatccaccgctgatttaacccgaatcctgcttgaggatgctcttcataatatgtttatgcctgcggataacaccacagggaacataataagcagaattgaatacatcatgctgtcgcatgatataaatgcgccattactggcaacattgctgtcgccatggaatatccgctccacggttatacaggacccggccagacttgcagactatctttcagctgacgctctcgaacatcttgctgaatgttttaatctcaatccggactggctgaatggccatgaaaactatccgatagcgttgtccggtgaatggccagatactgctgataatttcagaatgcttattaatgatagcagcaacactgaagttattttctggcatagtttccccttcgcaggaaacacgaaaagagaatattacggggtaatattgagacagaaaaaagaaataaatggttctgtaatatatccggcactatcattatcaccaacaattctgaacgatgaaaaaagaaaatggttaactgaatatacaaccaggcagaatacaacaatgtctttgcgacgcgtcacgttgagacctggccttgccgggaaccttattacagggcaaatactacctgttagcttatttaatacgtctttattaccctggtaa

SEQ ID NO: 486195 - DNA, 1155 bp, Shigella sonnei
atgccgtctccacgcatccgtaaaatgtccctgtcacgcgcactggataagtacctgaaaacagtttctgttcacaagaaagggcatcaacaggagttttaccggagcaatgttatcaagcgatatcccattgcccttcggaatatggacgaaataacaaccgttgatattgctacatacagagacgttcgtttagcagaaatcaacccccgaacgggtaaacccattacaggtaatactgtacgtcttgaactcgcccttctgtcatctctgttcaatattgctcgtgttgaatggggaacctgtcgtactaacccggttgaactggttcgcaagccgaaagtatcctccggacgagatcgccggctaacgtcttcagaagaacgtcgcctttctcgctatttccgcgaaaaaaatctgatgttgtatgtcattttccatcttgcccttgagacagccatgcggcagggcgaaatactggccttacgttgggagcacattgatttgcgccacggtgtggctcatttacctgaaaccaaaaacggtcactcacgggatgttcctctgtccagacgtgcccgtaactttcttcagatgatgcccgttaatctccacggcaatgtttttgattacaccgcatccggctttaaaaatgcctggagaatagccacacaacgacttcgcatcgaggacctgcattttcacgatctacggcatgaagcaataagccgcttcttcgaactgggtagcctgaatgtaatggagattgctgcaatatcaggacatcgttccatgaatatgctgaaacggtatactcatcttcgtgcatggcaactggtcagtaaacttgatgcccgccggcggcagacacaaaaagtggcagcatggtttgtgccgtatcctgcccatatcacgaccatcaatgaagaaaatgggcagaaagcgcatcgtattgagatcggtgattttgataaccttcacgtcactgccacaacgaaagaggaagcagttcaccgcgccagtgaggttttgttgcgtacactggccattgcagcacagaaaggcgaacgtgtcccatcacccggagcgttacctgttaacgaccctgactacattatgatttgccctctgaacccgggcagcaccccgctgtaa

SEQ ID NO: 486196 - DNA, 135 bp, Shigella sonnei; identical to SEQ ID NO: 10665

SEQ ID NO: 486197 - DNA, 1293 bp, Shigella sonnei
atgaaaaaatatgaccgaggctgggcatcgctggaaattggcgcggctttattgattgttatgatcatagttgcctggggagcaggcatatggcaggactatttaaaaaccaaaggttggcaggctgaagctcgtcttgtcagcaactgggccagtgcagcccgctcttatatagggaaaaactacacaactctccaggcaagtagtaccacatcaacccctgccgttatcacgacaaccatgctgaaaaataccggctttttgtccagcggctttattgagacaaacagcgaggggcagcggttacaggcatatgtagttcgaaacgcccaaaacccggaattactacaggcaatggttgtatccagtggtggcaccccttatccagtgaaagcacttatccagatggctaaggatattaccactggtcttggtggatatatccaggacggcaaaacagccacaggtgcattacgttcctggtcagtagctttaagtaattatggtgccaaaagcggtaacgggcatattgccgtactgttatcgacagatgaacttagtggtgcagcagaggacactgatcgtctttacagattccaggtcaatggtcgccctgacttaaacaaaatgcacacggccattgatatgggatcaaataacctgaataacattggggcagtaaatgcccagactggtaatttcagcggcaatgtgaatggtgtaaatggcactttcagcggtcaggtaaaaggcaatagcggaaactttgacgtaaatgtcaccgctggcggtgatatcagaagtaataatggttggttaattactcgtaacagcaaaggctggctcaatgaaactcacggtggcggattttatatgtccgacggatcatgggttcgaagtgtaaacaacaagggcatctataccggcggtcaggtgaaaggcggtactgttcgggctgatggtcgcctttatactggtgaatacttacaactggaaagaactgccgttgctggcgcatcatgttcgcctaacggccttgtaggccgcgataatacaggggcaatactttcgtgccaatccggtacgtgggggacaataggtggaaaactcaaagttactcagctttccaccacaggttatctggggcaattcgacttctgtgccattgccagaatgggcaacgcagaggatgcccactactgccaggtagttgagagcccagcaggttcacgcaaatggtacaaatacgagcataagacaggttgtattgcgtcgtgtgtaacgctcaattaa

SEQ ID NO: 486198 - DNA, 657 bp, Shigella sonnei; identical to SEQ ID NO: 467947

SEQ ID NO: 486199 - DNA, 561 bp, Shigella sonnei
atgtccgggggtaaagtgcccctcagacttatttcattaatcctgctttgttctcttatttatcccgcccgagcttcatacatcgcccccaaacaaatctggactaacaagtgggacaattgctttgccgccgccggcgcacgctatcaaattgaaccattattgttgaaggccatttctgcaggggaatcttcattgaagccgggcgcaattaacataaataaggacagaaaaacaggcaaagccagtagtacggattatgggttgatgcaaataaactcaacccatattccaaagcttataaagatgggcgtaatcaaaaagtctgaggatttaattaccaaaccatgtcttaatatccatataggaagctggatactggcaagacattttcagatatgtggcgtcagctggaattgccttggatcatacaatgccggattccgtaaggacagacatgaaacaagagagcaatatgctaataaagtatggagaatttatcgtgacatgaaagggatatgccttcccgggcagggaggcagacaatgcagacaatcgtag

SEQ ID NO: 486200 - DNA, 615 bp, Shigella sonnei; identical to SEQ ID NO: 10667

SEQ ID NO: 486201 - DNA, 1086 bp, Shigella sonnei; identical to SEQ ID NO: 467950

SEQ ID NO: 486202 - DNA, 1554 bp, Shigella sonnei
atggacaaatataatctgaaggatgctctcctttttatatcccggggagacacccatgaaattctcatcgaaacaaatcagcgaacaagacctgacgtacagagtaatctccaggaactgctaaacttataccctgacatcaccccaaaagtagtctcgctgtctgagttacaggaagccggtcaggatgatgaaaataaaggtccgaaagaacggattattcatctgaaagatcttgcagatgttagtgaaagtgagaagaaagttctctcctattttgaaacagccagaaaacttggtgcttcagatattcattttttaatttcagagtctattttcaaagttcgcatgagaatattcggtgaactgcaaactgtagatgaagatcaacctgcgttgggttattcactttgcgcaacagccattctgtcaatggctgatgtgactgaaaccagtttcttccctcaaagggaacaggatgcgcgcctgtccccacaattaatgcgaaaaataggaatatttggtgcacgatacagtcacagacctacgggagatggtctgattgcagttatgcgcctgatacccgatgacggagacaaagttcccacgtttaagcaactgggctttataccggagcaaatccggttgctgaacgtcatgctgcgccgcccggaagggaaaatagttctgtctggtccaacaggttcaggtaaatcaacaacgttacgcagtgcctgccgtgtatatcttgacgataatcaggggcgacacctgctgacgatcgaagatccgctggaaggacagattctgggggcaacacaaaccccgattatctgtgacaaatccgacgaagaggccgtcaaactggcatggagtcgtgctatttcatcggcaatgcgacttgaccccgatgccatcatggaaggggaaatgcgcgatcttgtctcgatgatgtcaacaacctacgcggctcagaccggtcacatcgttctgacgacattacatacaaactcagctctgggtataccggagcggatgattacgatgggtatgaatgccgatcttatttgcgatgcgcaattactgattgggatgatcagccagcgtcttgtaccaactctgtgtccctcctgccgtattccatgggaaaagcgagtacctgaacttagcgaagacgaccgcgcttaccttgagcggcactgcaataaagattcactctgcagtacagataatatctggttccgaaatcctcacggatgctccgactgtaatcacgacgtaattattaacggcagaaagcgcggtgaaataggtaaaggcctcaccggcaggaccgtaattgctgaagtgatagaacctgataatcgcttatttcagattctgaaaacacgcggcaaagttgcagcacgtaaatactggcttgaaaacatgcatggcatcagtcgtgtagagcatcttcttcgccgtatcaatgaaggcctggtggaccctcttgaagccgacagaatcatccctctggacgaagacgaacgcctcagcatcgatgatgcctaa

SEQ ID NO: 486203 - DNA, 453 bp, Shigella sonnei
atgcgtccaggtaaattactcattattccatccatatttttcttctctggtttttcatttgcaacaacacaacctcttgtcacaataggagaacttgaagcacaacaaaaccggaatattcttttacaggcaaaagttcagggcgcacagctacagaaacaactcgaagaatcagatgttaatctgtcatctgaaactgtttcaggtttctctggtgtgactgcctccttgccatcagtttcagagcagccgacatctaaaaacagaaaggaattgcccgttattatggaaataaacggcaaagataaacgtcttcatgccgttcttcgcatggctgatggacgtcagacaagcgtcaccactggtagccagcttccgggtacatccgtcacggtgaagtcgatctcattgtctggcgtcacgttgagtgatggcaccacccttactttctga

SEQ ID NO: 486204 - DNA, 1296 bp, Shigella sonnei
atggctgatgaagatatcaacccggtagtgcttctcgcagatcctaaagtaaatcatcgcgtgtgggctgcctgtcttaaatggactcctgtcgtaaaaaaacagcgcgtcccctcacatcataaacacaagtctcatgtaaaacccagacggcttacctccctgaaagtgactgtaggcagcagaaattcccgtggaaagatcagccgccttaccggcacaggaatactgaccaggccagaacgcaatcattatttttccctggcactggctttctgctcatgggtcagaaatggatacggtgtcttccggtacagcgataaggagctcttattccttgcttccattaatggccagcctgccgttatggctgacttatcaggaaatgatgccgacgttgcccaaaaggtcagcctttttctggcgatgaacgaagagccccccgaaaaatggcaggttgtatcgtctctggaacatcctgataactgggaaagtattattacccggttatcatcagcagacctccgccgttgcaaacttactgtcggcaatcgcagcaaattcacacttcctgccgtactgtttttagtagcagccggcgcaggcacagtattctggatgactcagccagagcctgatgtcggaccgaccgccgaggagatagctgcacgggcaagattacagtttaaaaagctcgaaccaccaccggagctcccgcatccatgggcgtcacaacctgtaatcagtgattttctgaaagcctgcgcggaccttcgaaaaccatcaccggtcgcgctagaaggctggaaacttaccggtggaacatgtactcccgagacattcacactgatttacgaacgacagccaggaggaactattgaaggctttctggcaagaagcaaagaaatctttaatgttattcctgactttaaccttaaagatggtgcacgcctggcttctgtaacccgaccactgccttccctgccccgcagggatgaggcagtccctgccccctcagaacaactgatgcgggtgttcacgtggtttcagaaaaaacagttaacgccggccattaatgaaatagccataccggaaccattaccaggtaacgatggtgaaccagcccctgttcagaaatggaaagaatatcagttcagtttatcaacgcctgtaaatcctgatgagttgttccctttatttcaggataccggcgttcgtctgagcaatatccattttgaattaaacggcggtactttcagttattcctcagaaggtcatatatatgcgtccaggtaa

SEQ ID NO: 486205 - DNA, 1683 bp, Shigella sonnei
atgaaaaaatcacaccagcgttcaatgaagctggcggtgctcccctgcatgatcgccgtcgctctttctatctccggatgtactttcagcgaaatcaataaaatgcagaaaaaagcacaggaagactcagcacatgcacgggaaaaggtatcagccctttctgcccgtaaatcgcaggctcttacctggctcgataatcaatggataaaccctgttccggtcgctcaggtatcaagagagaaaaaacaaacagctccggcctgctacatcacgcaggcaagaaaaggagagatcactctgcaggaactggggcaacgtattactgccgtatgcggcatccctgtgatcatcacgcctgacgcagccaattcaactcttgaaggaggcgctacccgccagatgacaggaacattaccagcaccagatgaaaatggacgtctaccgttaagcagcctgggcagcacaacaatgactacctccactcagccattaacgctgaataacctcatgtggcagggagatatcaatggtcttctggatctgatggccagccggagtggtctgtactggcgcatggataatggtcggattgtattctatctgactgaaaccagaacgtatccacttcatatgctgaacaccaaaaccagcagcagttccagtgtcagctctggctcaacaagcacaatgggggcaacaggaggccaggataactcagcatccggtgatgctacgtcctctcagagcacaaccgtcggtcaggaatacgacctgtatgaagacatccggaaaactattgaagcgatgctgacaccagaaaaaggccgttactggttatctgcatcgagctcaacgctaacagtcactgatactcctgctgtccaggaagccgtcgcacgatatgtggacgaacaaaacagtattatgaaccgccaggtagccctgaacgtacaggttctgagcgtcagcaataccagaaacgagcagttcggtctggactggaatcttgtttacaaatcgctacattccgccggagcaacgttgaacaatgcaagcggagattttacaggcgctacatctgcaggcgtatcaattctggatacggcaacagggaatgccgccaaattcagcggttccagccttctgattaaagcactgagtgaacaaggcgatgtcagcgttgtaacttcacaagaaagcactgtcacaaacctgacgccggtacctatccagatggcagatcagacagtttacgtcgcccagtcagcaacaactacgactacggatgtaggagcaacaacaacattaacaccgggcatgatcaccactggattcaatatgaccctgctgcctttaattcagaaaacaggcaatctccagttgcagatgaactttaatctgtctgatcccccaactatccgtagctttacgtcaaaagacggaaacagttacatcgaaatgccatataccaaactgcgttcactgagccagaaggtcaatctgaaagaagggcaatcacttgtcgttactggtttcgatcagaacaatacgacgacaagtaaagccggtacgtttacgccagcaaatccattatttggtggttcacaaaccgggaaaaatgaacgcagcacgcttgtgatcatcattaccccgactttcccgtcaggaggcaataatggctga

SEQ ID NO: 486206 - DNA, 438 bp, Shigella sonnei
atgggatggctggtcatggccgtcggcctgaccattctgattatcactggaagctaccagaatcagcagatgtctgaaaccacgaacgcccagcaatatgcaagtgcatctgtatgggcaagtcagatactaatgattgctaacagaatcaatgatatcagatacgtatcaggccagcaggacggagtaatttcttcagataaactggctctccctgtcactccggactcccgaattaaacatcagttacaacagggacgtctgtgggtatggatgcctgaacaaccaggacttgttgaaactttgcgttcaaaaagtcgtggttctgcactaatagggatcttccaaaacgggcaactcacctggctatcaggaactgtaaccggtctgacacccccagcaggcattactgctggttctgtcgtctacgttaactaa

SEQ ID NO: 486207 - DNA, 1068 bp, Shigella sonnei
atgaaaaaaaactatctgacacttatactgccgtcattattgtccggctgtgccggaatttccggcagcaataacgtggcaccatcagatacgcctgctctggtttttgttgacggacaaatcagtgaaagtgctggcgttctggcacttacgcaacaacgtctttctccacctaaaataactccccccccgagagtcagcgtgccagagacagtaaaaacagcacagccagtaagcgaatcccgaccgttaccttcacctacaataagtcagaatttctcccggttaatcattacaggcaagcctggtagcgcccctgtaacactatcgccgacggcccgtaaccggaccgtcagtcagtggataaaaacattactaccggaaggatggaaattcagacaagagaatgcagccacgcccaaactgaataccaaactggtttcatggtctgccaatgatcagtggacccgttctctgaaccggttgctggaagaacaacacctctggggccatctggactgggataataaaacgttgaccgtcacaacatcggctgctgcaccggcacaggacacggcaaccactatctcgccagcagccatggtaaccacatccacttccccggagtcaccaacgacagcaaatagccagaacaaaccacgaaacccattcaggggaaacagcgtatctccgtctacgcccgcagcaatcccgactccgaccggctctacagtcaagtctatcccactcatgaccgggacccctgtcaaaccggtatctcagggtaaagagtggcgtgcgccggcaggcactacattaagggaaaacattattaagtgggcagaagaaacaaaatgcgaaagcatggcatcaacgcactggatggtcatatggccactttctgtaaccgattaccgtctggatgcacctttgatgttccggggatcatttgaatcagccatggagcaggtatttgagttatatcggaccgcgcaaaaacctttatacgcacaggcctcccgcatgcagtgcatcattacagtttctgatacaagggatggtcgctaa

SEQ ID NO: 486208 - DNA, 594 bp, Shigella sonnei
atgaaaaataataacgcaccattatatctctggttgctttggtgtacgctttgtctgtacatcactaccccatggcaatacttacgttatccattcactgacaacatatcattgccttatatgttatatttctttgtggtggttgtgatttgcattttcccactacttttcagatgtgtacttcttattgtaaggtctgcatctaaatacgacttcacattctttgtgaagaagaaaaagggcagcaataaatcaactatacatcttagcccctatgctgacacacattgcccggagtcaatgaggaaacactgggatgtgttgctttctctgatatcaaaagcaattaataatgacgaaatcattgtcatgcattcacatctctttactccggcaagaataagaaaacttataaagagactggaatcttatggtttgaatttctccgttattacatacccacggaaaacaagcctgtacgaaagattatcaattccttttgtatatctcttatttcagtggtctctcccacatttgcattcggacggaatgacagtcgtcattcgacctcaccagacccactacaccaattaa

SEQ ID NO: 486209 - DNA, 267 bp, Shigella sonnei; identical to SEQ ID NO: 10668

SEQ ID NO: 486210 - DNA, 261 bp, Shigella sonnei; identical to SEQ ID NO: 10669

SEQ ID NO: 486211 - DNA, 255 bp, Shigella sonnei
atgccacagcaacatcccggacgactgcaaatactggtcgtcgacgcacactgcaaacgcaggctgttttcaacgaaaacaccgacagaccccgatgagcttgcccgacgtttctgcacgccggataactgtctcgtggtggtactacgcgacaaccgatttctgttccgactggaacgtgctcccggcagccactgccgctggcacaagggcagcagctcccgccatcagcatctacaggactggctatcatga

SEQ ID NO: 486212 - DNA, 684 bp, Shigella sonnei
atgaccacgacagaacatcccgtgcgccagttgctctggtgtgcactgaatgccctgaaaacggcacaggaaaaccacaatataaccagtgaaaccggattacggcattacctgcttgaatggctttctggtgccagcagacatcctgagttccgtagtctccctggcgaaatcatggcgttaaaagcattgaccgaaaaagatcgcaatattcccatcatcggaacgctgaatacgctctttctcagctctgccactgtcggggaatgtccgttgtttcgttttcgggctgcgctgggtaaattacagaaagcaggctggcgcacttatgtctgcccatggcctgagagggtgttcaatgaatccattgaacgggcctgttccgggaaacgccatctgctacaactaagtcgcaccgaagagtgttttctaccgacaggcgatatgagggcaccagttacgttgcagctgatcactccactacaccgcaaaactatgcagcttctggaaacggcagagttaatattctccgacgaaagatttcaggtggtgagaggatacgaacatcaattcgggatcgaacgcagagaaaccctctttcacaccctatttatcgggctgcccagcttgccagaagatgtctggggtgcaacacaggaacagacgactatcacattacactga

SEQ ID NO: 486213 - DNA, 534 bp, Shigella sonnei; identical to SEQ ID NO: 8468

SEQ ID NO: 486214 - DNA, 288 bp, Shigella sonnei
atgtcacctcaaatgatacagaaactcccggccatcactctgttggaaggcatgtttcccgagctatcaacaaaccagcttaaagtctgcgttttttacgcaatgggtgttccttacgacgccattgctcagaactgtcgactttctcccgaaacggtacgaacctacctgaagcgaagcctgaagaatttaaatctggaaggatatgatgcacttcgctctgccgtgctgatgcgaacgttcgttttcatgattagcaatacagctaaagaaaacgaaaaaatgtga

SEQ ID NO: 486215 - DNA, 1077 bp, Shigella sonnei
gtgtataaatacacggcacaatcgctccgccataagcgacagcttgtggcaggtctgaagaatactccatataacgcagtacactggagtcagttagcacccgaagagcagatccgtttctgggaagactatgaagcgggaagggcgaccactttcctggttgaaccggaaaggaagcgcacgaagcgtcgtcgcggtgagcactccaccaaacccaaatgcgaaaatccgtcctggtatcgtcctgagcgctataaggcgctgagcgggcagctcgggcacgcctacaaccgtctggtgaaaaaggacccggtgaccggcgagcagagcctgcgcatgcacatgtctctgcatcctttttacgtgcagaaacgaatgtatgccggtcgcaaatatgctttccgtccggaaaaacaacgcctcctcgatgccatctggccggttctggtcagcttcagtgatgcgggcacacataccgtaggcatgagtgtttcccgtctggccagagaaatcagcccgaaagacagcaaggggaaggttattccggaactggaagtgacggtctcccgcctttcccgtttgctggccgaacaggtacgttttggtgtgctgggtgtttcagaggaaaccctgtgggaccgtgaaacccgccagcgtctgccacgttacgtctggataacaccggctggctggcagatgctgggcgtcgacatggtaaaacttcacgaacagcagcagaaacgactgcgtgaaagtgaaatccgccagcagctcattcgggaaggtgttctgcgtgaggatgaagatatctccgtacatgcggccagaaaacgctggtatctgcagcgcagccaggatgcactgaaacaccgtcgtgcaaaagcggcagccagtaagcgcgccagacgcctgaagaaactgcctgccgaccagcagattcatgagatggcagagtatctcaggaagcgtctgccgccggatgaagcctatttttgttccgatgaccatctgaagcgactggccatcagggagttgcgtcagcttgaactgacgctggctgccccgccaccgcactag

SEQ ID NO: 486216 - DNA, 510 bp, Shigella sonnei
atgagtaaatcaggtgcagaaaaaattcaattcatcctgaataatcatgaacaggcatacagacgcctgaagcctgtatatacttttttagaactggcatcttggatttcggttgttctgctgattatatacctatcaggcaagaatcacgtgcttacagcagcttttctctgctttgcatggacagcattctgggttcttttccttttacattatttcccaaaagttttctttattctcgatcgtcagagtctgctcaacctcatggaggccaccaaagactcaccagatgtaaagcaggagctgcttaaccgccttttttccggaaaaagaatgaccgggcgggatgaaatggatatctgccgtcttctgagaaaaaatgaagaagaaaaaatccgtcagagtgaactgaatatcatcaggaattttattgatgaacagcagttaacgaatagtgatattccgaagaaaagtacggtcccaaatgaagataaaaaaggcataagatga

SEQ ID NO: 486217 - DNA, 603 bp, Shigella sonnei; identical to SEQ ID NO: 109552

SEQ ID NO: 486218 - DNA, 1347 bp, Shigella sonnei
atgccaatgatacttgtaaagaagaatccccggggcaaagtgattcgggagcttagcagtgaggaagagactgcagtaaagacggtctgtggactgaaaaagccagcaaccatggcacaacataacctggccaatgatcttctccgggaaatgcgtgagtatgatgcatggttacagtgtgactgtattccgggagattcgccggccatgaattttgctgctcttaaaaacaatacgggtactctttatctgtccagttttaatcatgagcatgcacctgaatgccccatgtatcgtcagttatcaggaaatgaagaggaaacatccttcggagcaagccggcatcccgttagcacccgtataaattacagaaactttttaccacctgatgacagtaattctgttatcagactgcagacccgctctgcttaccataatggtgagcgctcctccgttcgcaaaaaacgtccgcgccttggccgtttactcctgtcgcttattgaagatgcagggctgaataaactggattccctggctaatccccgtatccggactaattatcgtgagtgtcttgatgccatacggcaggttacactacagcaggagtatattcggggaagatccttatctgaaattatccatttccggccaggaatgtctgaaaggtctcaggagcggttaatggaaacgctggagaattcagaacgacactggcctgccagaagaaaacatatgttctttcagatttttatggcgcagcacatctgtcgtgatgctgtggaaattcactgggcgaacggtaatattcaggtcttcagacctgtgcgggggatcagtattaatggtgaagcgcagggcggaatacgtcccccttactgggttattcttgctttttgccggagtgccgatggcagaatcatctgcagtgaagggtatgctcatgctctttatcaactgacatgtccggttcctgtggacagcaaactggaacgaaacacgctcactgctcttctgaatgtggccagctggcttaaaagaaagccaggtacgccggaattaagtctggaaaggcccctgtttgatacagaagtttatgttaatggtgaaaagaaatatgtactgccggatttcattgtcacagcaagggctcctgacggaaagacggccagagtggtcatcgaaacgatgggatatgaagacagtgattactgcgcgagaaaatccaggcagcataccggcatgaagcagattggtgttctgcataccgatccaccgaaatggctggataacgatcatcccccttttgagaaacatatgtacggtgtttttatgcatctcaggtactga

SEQ ID NO: 486219 - DNA, 303 bp, Shigella sonnei; identical to SEQ ID NO: 9358

SEQ ID NO: 486220 - DNA, 627 bp, Shigella sonnei; identical to SEQ ID NO: 9357

SEQ ID NO: 486221 - DNA, 927 bp, Shigella sonnei
atgccaaactggtgctcgaatcgtatgcatttttctggtgaaccggcacagattgctgagattaaacgactggccagcggtgccgtcacaccgctttatcgccgcgccacaaatgaaggtattcagctgtttctggccggaagtgccggacttctgcagaccactgaagatgtgcagtttgaaccgtgccccggactgacggatgccggacgtggtgttgtatcgccggagaatatcgcgttcacccgctggctgacacacctgcagaacggtgtactgctggatgagcaaaactgcctgatgctgcatgaactctggctgcagagtggtactggccagcgtcgctgggaaggattaccggatgaggtcagggaaaccatcaccgtgcatttcaccgcaaaaagaggtgactggtgtggcttctggagtaacgaggatgtatcggtgtggtggaaccgtctgtgtgacaacgtactgccggaaaaaaccatgccgtttgacctgctgacggttttgccgacccgcctggatattgaagtgaatggctttaacggcggtgttctgaacggtgttccttctgcatatcactggtatacagaacggtatggcgtgaagtggccttgtgggtatgacctgaatatcagtagtcagggagacaacttcattcaggttgatttcgacacgccgtggtgtcagccggaaagcgacgttattgcagaattaagccgccgtttcagctgcacgctggagcactggtatgccgaacagggctgtgatttctgtggctggcagttgtatgagcgcggagagcttgttgatgtgctgtggggggagctggaatggtcttccccgacagatgatgatgagctgccggaagtcaccggacctgcgtggatagtcgacaaggtggcgcattacggtggatga

SEQ ID NO: 486222 - DNA, 1434 bp, Shigella sonnei; identical to SEQ ID NO: 482881

SEQ ID NO: 486223 - DNA, 636 bp, Shigella sonnei
atgctaaacagcatatttaatacggcgatactttgctgtgcaaatatcgtctgtcaatgctacgcctacaatgaagttaaattccgcttaaataaacttaatgtatcttataaaaccggaacagagaaatattactgtctgatactgacaacgcttgccgttctgtatctttcattaaatcagctatccctgattcaatccataatagtgattgttttctatgccttccttacattaatggcctgtatagaccttctttcatttctactaccacgcctttataccgtgacatttatcttctccggcctgttatatcagacatggaataacaatatattgtctggtttgttttgtgcaatgctgatgttcttcattatgctgtttgtaagactttactttgcatataaaaacggaacggaaagtttcggcatgggagatgtgctacttattgcaggaactggcgtatggtttccaacgcctgagattgcctgttcaattgtatttattgccgttatcggcggaattattttcttcactcttggcggattaaacaagcaaaaaaaatatatcccattcggtccgttcctttgtggcggaatgtttgtttactcactcgtaccgggaatattattctga

SEQ ID NO: 486224 - DNA, 483 bp, Shigella sonnei
gtgcgttctgttctttatatcctgctatcatgtatttcatcattaatcttttcattgcaacccgcatattcagcgacaacgacccgatttgatgcctgctttgcacaagccgggcaacgttacctgattgaccccctgcttctgaaaagcattgccactgtagaaagttcactcataccagaccgaataaatcacaacaaagaaaaagggaaaatattaagcaccgattacggactaatgcaaattaattcatcacacatccctaacctgaaaaaacttggcgtaataaaagacaaatcagagcttattgataacccctgtctcaatatacaaattggcgcgtggattctggcaacacattttcagaagtgtggcataaactggagttgtcttggcagttataacgctggttttaaagaaagtaacgaacagaaaagaatcaaatacgcacgctatgtctacaataaatacatggtaaggtaa

SEQ ID NO: 486225 - DNA, 558 bp, Shigella sonnei; identical to SEQ ID NO: 221184

SEQ ID NO: 486226 - DNA, 1110 bp, Shigella sonnei
atggcgataaaagatatatttgagaaactcaattcgatagaaattgatttctctggaatatcccactggctggcaaaatacacattcaggtattccagaataagtttatatgaagatttatctggaatgttaaatgatggcataaatgtaaagcgtgctcttacacacctgattgatgtagaaacagactacggaaagaaaacgggggcttctgcaacctactatatttgttgtgagtgccttaatgcactgaataacacaggggcaatatcttcagcattaaaaaaatatataaaggaggatgaatatcaattaatatccagcggtgaaattcgcggcgaccttgccgggggattagttcaggccataaaaattgtcagaagtcgttctgaaatgacaatgactcttgttatgtcgatgatttatccatccgtcctgttttttggttgtctggtaaacatgtatatggtccacgataccataacacctgttttcctttctctcgcaccgaaagaacgctggacaacttctatgcgattactgacagatacgtctggtttcctgatagaaaacgggacgtatattctctgcttctgcatcgtactgtttttcctgatcagatattcgcttgcgcgttatacaggaccgggccgtcagtatcttgattacattcccccctggtcactttataaaacatttaatggtgtaagttttctcttcaacatggcctccatgttaagtattgatattcccgttgcaaaagcactggaaaggctggagaaaaacagcactcaaaacagatggctactcgaacgaataaaagaaataaggagatatgttttacttggacagtcacttgcaatggcaatgaaaagttgcggttatgacttcccatcgaaattatgcattaacaaactattacttcattctgaaaatgctgacaatgcattgatgatgtctaactatgctgataaatggctggaggaagcaaaaggaaaagtcaaatcaacaggagtctggataactgtagtatccgcattaattgttttcgcatttattgtaatgatgattactgctctctacgatgtcagtaacgtcctgcaacactaa

SEQ ID NO: 486227 - DNA, 1539 bp, Shigella sonnei
atgtttttttctgacgcagactatcccggaaaagatatttctgatgttgtatacgtcagtatatctgaaaaagacgataaacctgttcatgtttatatcgctgataacagtaaaggacagcgtgctgttcaggcttatattggcactctgaatgttaaatatcccgaaaaggtaaatataacctggaccactcttgatgttatcgcatcccgctaccaggacagcgaaagaaggtctgattcaaactcatcacaacacttaaacagcaaccaggaaaaggtcattagctacctggcgaaagcaaacaacctgggaagttccgatttgcacatcacacctggtcgggacggttccgagttcacttatgtcgaagcacgcgtgcatggggaactggaaattctggatgtcatcccgcgtaaagaagggctggaattgctgggtgctgcctattctggaatgagcgatgttatcaaaggtacgcagtttgacccggcaataccgcaggatgcacgtatcgcagagaattttctgaagcctgtaaatctttttggggcgcgctattcgcattatccgtgcgtgggtggtgtgtacgcggtcttccgcctgattaaagatgacagcgaggatattcccactttcgaagaacttggctacatgccacaacaaatccagacaatcaggcgaatgttacaacgcccggaaggaattatcgttttatccggccctacagggtccggtaagtcaacgactctgagaacggcttcagaagcctatctgagcacgtttggtttcaaccataacgataatatgcgtctcccccgaaaacgccttttcaccattgaatcaccgccggagggccgcattcccggcgcaatacagacggcagtcagggattccgtcgatggctgggttgacgcgattaaatccgctatgcgacttgatccagacgcgatactgaacggcgaaattcgtgatcacgcatcggcattagcagcaatcaaagcctcgatgacaggccaccttctgctgacgaccttacacgccaacgatgcactgaatattattgagcgccttgaaatggagaatattcaggccaggctgattgcagatcctcttctgtttatcggtctgctgagtcaacggctggtacaaaaactctgtccttactgtaagcgcacttatgctgaaatggcagacaaactgagtacagaagaacggaaactcattgaggaaaattgcctgccggaacaggtccggctgcgcaatcttgacggttgcgagcactgttataaaggcgtaacgggaaggacggttatagcagaagtcgtctcacccgacgcacgtttttttcagttatatcgtcagtccgggcgtctggaagcaaaatcatactggcactatgaacttggaggaattacccgtaatcagcacttattacacctgattaatcatggcctggtagatccgctgtccgcacacttcatatcccccattgacgaagataaatactcaatgctcccggaggggacatggcgataa

SEQ ID NO: 486228 - DNA, 516 bp, Shigella sonnei; identical to SEQ ID NO: 221181

SEQ ID NO: 486229 - DNA, 1311 bp, Shigella sonnei; identical to SEQ ID NO: 221180

SEQ ID NO: 486230 - DNA, 1644 bp, Shigella sonnei
atgaataaaaaattgctttgtttattaatatcctcttttttattatcaggctgtgcaaacttcaaaaaaatcaatgctaatgaacttgcagccgaaaaagacgcacaaaaagcgactgaatacgcgaaaaaaattcgtaataacccggttatccaggactcaacaaaacaatggattaatacaacgccaattattgaaaagcaggtaaagcaatcagcgccgccctgcccgattgtgattaatactcgttcagatattgagctacgccagatcgcacaacgcatcacacaaacctgtcatatcccggtacgaatcagcgccgatgtctggacctatctgaacggtacaggcactggctcaacacaacaaatgacaggatcaattccagcaccggatgcaaatggaatggttcctctggcgtcagtaggcagtcagccagtaaaagtctcttctggcggtacatcactcccggaactgaatatctccgggcttcctgccctactgcaaaccgtatcctcacggctgggaatatcctggaaatacgataaaggtcgtatcacattcttctatctggaaacgcgctcattcccgatcacatatatggacagcaatgtggcatacaactcaaaagttgtgagcggcacaatgtcttccagcggcagtaccggctctaccagctctggcggtatgactggcgacgcatcaaatacgcaaactacaaccgtggaaatgaaatcatcgctgtacaacgacctgaaaagcgaagtttcctcaatgctgacaccaggcacagggcgcatgtatctgtccactggttcactgacagtaacagataccccggatgtactggacagcgttcaggagattgtgaacaagcgcaataatgaaatgagtcgtcaggttgtgctgaacgttgaaatcctgagtatcaagaaatcaagccaggaacaggcgggaatcgactggaacgcagtatttaatgatggtcatcttggtctgagtcttggtggctcatttggtaatgccgccgagaatgttattaccagtggtgtatccatcgtggacggtaagctggctggctcaaaagcatttctgaaagccctgtcgtcacaaggcagcgtcagtgtcgtaacgcaaaactccgctgtgactaaaaacctgacgcccgtccctatgcaaattgccaatcagcagggcttcattgaaagtgtcacaaccgattccaccgccaatgtgggatcatccacgtcactgaatgcggcaacaataacgaccggattcaatatgactctgcttccatacattcagccggattcacaaaacctgcaattgctgttctcaatgagtctgtctgacaaacctacttttgaggtgttcgaaagtggcggcagtaaagcacaaacaccgaatgtggatttgaaaacaattaatcagactattgacctgaaatcaggccagacagttattctgagtggattccagcaatcaaaccggaaaaccagtaagcaaggtgtaataaccccctccttctttggacttgggggtggcattaacagcgaagacggcgacacgattctggtcgttttgattacaccaaatgtgcttaattccggctccagtgcagtaataaaaaatgtgaactaa

SEQ ID NO: 486231 - DNA, 486 bp, Shigella sonnei; identical to SEQ ID NO: 31577

SEQ ID NO: 486232 - DNA, 1959 bp, Shigella sonnei
atggatgcaaaaaagacgggagggttaattctcttcctgttactgcttcttgtgggtgtccttatagcctcaaactatctcggtggatacacagcattaagatattcatccgttgatatgtctttgctcaagtgggatacattccattctgtaatctcaacattttctggcaacccacaatataaaaaactcgtttttatggcatggtttggattcagcgttccattaatattctttgccatattcatgttgattgtcgtgattgggattatgcctaaaaaagtcatctacggtgacgcccggctcgcaactgatatggacctgagtaaatcaggttttttcccggataaaaaatcaccttacaaacatccaccaatactcatcggtaaaatgttcaaggggagatacaaaaaacaatttatttatttcgccggacaacaatttttaattctttatgccccgacacgttctggtaaaggggtggggattgttatccccaactgcgtaaactatccaggaagtatggtcatactggatatcaaacttgaaaactggtttttatcagccggattcaggcaaaaagaattagggcaagaatgctttctctttgcgcccgccggatacgcggaaactatcgaccaggccattaaaggacagatacgctctcaccgctggaatcctcttgattgcgtcagtcgcagtgatttacttcgtgaaacggacctggcaaaaattgccgcaatccttatcccggcaagtgatgatcctatatggtctgattctgcacgaaacctttttgtcgggttaggactttacctgctggacaaggagcgttttcacctggaacagaaagccaaaggtcataatgtaccggacgttcttgtttccatcagcgccatactgaaaacgtcggttcccgatggcggcaaggatctcgccgcatggatgggacaggaaattgaaaaccgtagctggattagcgataaaacaaaatcattcttctttaagttcatgtcagcaccagatcgcacaaggggaagtatagaaacaaacttttcatcaccgctgagcatcttcagcaaccctattactgctgaggcgacgaatttcagtgattttgatatccgggatattcgtaaaaagcccatgtcaatttatcttggtctgacaccggatgctttaatcactcatgagaaaattgtaaaccttttcttctcattactggttaatgaaaactgtcgtgaactaccggaacacaacccggacctgaaataccagtgtcttattctcctggatgaatttacatcaatgggtaaatcggaggtcattgaacgcgctgttggttttacagcaggttataaccttcgctttatgttcattcttcagaatgaaggacaagggcaaaaaagcgatatgtacggtcaggaaggatggaccacattcactgaaaacagtgctgttgtgctttactatccgccgaaatcaaaaaatgctctggctaaaaagatttcagaagagattggggtgcgtgatatgaaaatatccaaacgctcaatatccagtggtggtggtaagggaggaagttcacgtacacggaatgatgatgtaatagagcgcccggttcttcttcctgaagaaattgtgtctctccgggataagaagaataaagccagaaatattgcaatccgtgaaattataaccagtgaatttagccgaccatttattgccaacaaaataatctggtttgaagaaccagagtttaaacgccgtgtggatatcgcccgtaacaatcatgttgacattccaaacctgtttacacaagaagtcatggatgaaatagcaaaaattgcagaaatttatctccctaaagctggaggaaaaaaagtcatggttgccggaggcaatgtgattactaatccagaccttgataatcacgataaaacagacgtatctgaataa

SEQ ID NO: 486233 - DNA, 1056 bp, Shigella sonnei
atgaataacatcagagataccagtaatacatcacaaccacgagataacagtaaaaccgcaagacgatatctggatatgacgggtatccagtctgttcttaatattgaacatgtcacagaaatatctgtgaataaaccaggaacaatatggtttgaagggaaaaatggctgggaatctaaagatgcgccagacgcgacttttgataatttaatgacacttgccaaaactctgacgaacttatcaaagataaaaataccacttagccatgataatcccattgcatcggtagttcttcccggtggggaacgtggacaaatcatcattccacctgcaacagaaaataacagcgttgtgatatctatccgtaagccatcattaacgcgctttactatagatgattatgtccgaacagggcgttttgataatgtcaggattgcgacgaaacacgaagccatcctgactgaacggcaacgctacctgtatgaattatcccggcgtccagatggtcaatctaaagctcaatttttaagagaggcagttaaagaccgtcttaattttttaatcgtcggtgggactggctccggtaagacaactatagcaaaggcaattgcagatatctttccacctgaacgacgttatataaccgttgaagatgtaccggaaatgtctctgccgctgcatccaaaccatatccggcttttctacaaaaaaaataccgttgaagcgaaggaaatcattgaagcgtgtatgcgattaaagccagatcacatctttcttgctgaacttaggggtaacgaagcatggagttatctggaggcgcttaatacagggcatgaaggctcaatcagtaccattcatgctaataatacttatgcctcattttcacgactggcaagtattgtaaaacaatctgatgttggtatgactgttgatatggacctcatcatgcgcacgataaaaacatcaattgatgtcattctttttttcaaccataccaggatgactgaactgtattacgaacccgaagaaaaaaatcgctttttgagcacaatgtaa

SEQ ID NO: 486234 - DNA, 1140 bp, Shigella sonnei
atgaaaaataaagatgatgaaaaaaataatgacgcgggaaatcgcggaattatcgaagtaaaaggtaaagcagcgccaaaaaaaatattaattctcatcatattactgattgccgcgttatttgtgatcattatcttgtttaaagttctttcacgagaacaggtcgttcagcaaacacctcttgagaagtctgacgagacactggtcacaaataccaacaatggcgtatcactgacaacaatgatgaaaaacatcgaagaaaaggaaaaactcgatgccactaaccgcaggaaagcacaggaggagcaagaacagaaacaggcagacaatgccccgtcagcgtcagcatcacaaaaggccgatcaaacagccgtcaatgtgatagccaacggcactccccaaaccgccagtggagatccaaaccaaccacaaccattgccaaaatccatccgacaactgatgggcgacacaatggtgaagatcgacaatcaggaaccaggcgaaaaaaaccaggaaagagatgatttacaaggcagtcagtacgcagacggaaaggtatcccctgtgctgaaccgccgatatctgttatctgcgggaacagcattatcctgtgtgctcaaaacgaaaatcgtaacctcttatcccggtatcacaatgtgtcagttaacacgagacgtctggtcggataacggcgaagtgcttcttgcccgtaaaggagcattactgatcggggagcagaataaagtcatgacacagggagtagcccgtgtgttcgttaactggacaacgctcaaagatgaaaatgtcaatgtgcgcattggcgcacttggcactgacagtctgggcgcttccggccttccagcatgggtcgataatcattttggtcagcgttttggtggtgcattgctgctgtcattacttggtgatggtttagatattctgaaaaacagcactcaacaaacaggctcaaacagcaatatcacctacgaaaatacatctgacgcaacaaaagaaatggcaaaaacaacgctggacaatacgataaatattccacccacggcatatattaatcaggggactgtattgtctgttattgttccgcgaaatatcgacttttcatccgtatatgaacttcagtaa

SEQ ID NO: 486235 - DNA, 771 bp, Shigella sonnei
atgatgcttaaacgcactactgcgatagttcttttgtcgatgctacaagtacctggtgctttagcagctatgtacggcacaccatcggaacgagacgggcgtattcagaccgtagattataacgagcaggatgtatttaatgtgcgcgtaaaagcaggcgcacaaacaacaattaagttcggacaagacgaaacaataaaagatgtcggaattggtgatccagaagcctggtcagtatcggtcagggacaacactctgtttctgcgtccaaaagcagaagaaccggatacaaacgttaccgttcagacaaataaacatatttatcctctctacctgatatcgaccacaaaacaacccacgtatattctgcgttttaattatccgaaaccaccgtcagctaccgtaatgactgaaaggccatttccatgcactgatggtggaataattaatggtcattatcaactcaagggggacaaatcaattttcccttatcaggtatgggataatggcgaatttacatgcatgagatggactaataaacaggaaattccggtcctttatcgtgttgatgccgatggaaatgaacatctggttaacggagacagaaataaaaacacaatggtttactatgacgtggctgaaaatctccgtttgcgcctgggtgatcaggttgcagatatcagaacatcatcaatcgttaatcgtccgtggaataaaaaaggtacgtcaaacggaaaaacacgagtagagaagttcagctatgaaaaataa

SEQ ID NO: 486236 - DNA, 735 bp, Shigella sonnei
atggaaaacacaaactattatgaacattcaaaaaaagaagcctccaaaaagaaatttgaagaaaagaacgaaaaaaaggattatttcaaggccatacgtgactttgagcgcagtgaaattgaaatcataaagaaaaaggcaaaaacatttaccattctcgccattggcgaatttgttgtaatttgcattcttggtttcgcaatagcctcccttgctccattaaaaaccgctgtaccgttccttgtgcgagtggataacagcactggatatactgatattgcccctcaattatctgatgctaaggaaagttatcaggatgttgagactaaatatttcctgtcgaaatatctcattaactatgaagcatacgactggcagactatccaggaacaggccgatacagtaaaaacaatgtcttcccaaaaggtgttttcagcttatgacaccatgattcgtgctgattcctcaccactgaacattctgaaaaacaactacaaaattaaggtccagattaattcagtaatccttctaaggaaggatatggcgcaggtgcgtttcaaaaaaatggtactggacttatctggtaaacccgcccccggatacagagcaacagagtggatttcgacgatttcttttgactgggataaagatatcaaaacagaaaaagagcgccttgtgaatccgctgggactgcaagttctgagctaccaacctgatccagaggttataaaatga

SEQ ID NO: 486237 - DNA, 135 bp, Shigella sonnei
atgaaaacccccctcataattgcctccgcgctattaattagtgcatgttctcacacccccaatcctgtgcagaaaaaagggggatggtttgagttaaacacagcaattgaacagatcaaagcaggtgattattaa

SEQ ID NO: 486238 - DNA, 2358 bp, Shigella sonnei
atgcacaaaatcaaattaaaaaacagtgacaatatggatgttgctcgtgaatatcccgattatcgcttccatgtaacagacagtattatctttacttctgacagaaaaatgctggcttcacttgttgtagcaggcattccatttgagacggagaacgataatgttcttacaaatttatttaacagcgttaaaaacttcctgattgggttaggaaaggaaggcgacctgtatttatggactcatcttatcaagaaaagagcaaccatcaatggagaatggaattttgacaatgattttttaagcaggttttcaaaaaaataccttgctctgttcacatccagcgcattctataaatcaacatggtatctgacatttgggattccctacgatgatgttgataccggaatcgagcgcatgaatgaaatgacacaacaggcgcaaaaagcacttctaccatttaacgcttctttattatccgtatacaatacttatattagtgaggtggcagactatctatcactattgctaaatgcagaacataacatgattcctttatcatccacccccttatcatccagtatttgtgattctgaatggtattttggtgctgatgttcttgaactgcgtaacaacgaatcggatagtaaaaaattcgcaacgaattatattttgaaggatttcccgatagaaacaacccccggacaatgggatttccttctcaaacaaccctatgaatttattcttactcaatcctttatttttgagtcaccaacaaaaaccctgaagaatatcgattcacagttaaacaaactacaatcagctaatgatgcagccaaaatacagcaggaagaactcgaagctggtaaagaagcggtcgcagccggaattacgttgtttggttcactacactgcgcattaacggtattcggtgatacaccagatcaggccagaagcaatggtataaagctctctgctgagtttattacttcgggtaagggattccgcttcagtcgcgcctcactcgcatcaccttttgtttttttcagtcatatgccgctgaataagaggcgtccactggatacccgaagaacaattaccaacctggcctgtctgatgtcttttcacaattattcctccgggaaaaaatcaggcaatcctattggtgatggctccgccataatgcctttaaaaacggattcaggcagcgtttactggttcaatacacattacagcccaccggaaaaaaatgttaccgggcaaaaaattgccggacacgcaatgtttcttggcgcaacaggcacagggaaaacaacatttgaagcaacagccagcggctttcttcaacgctttgaccctttaatgtttgttgtggattacaaccgttctaccgaactttttgtccgcgcatacggagggagctatttcacattgcaggaaggtatctataccggctgcaatccgtggcaactggcagaaggcccggaatctcccgtctggcacagacttctcgcatttctgaaacgctggacacaggttctggcacgagacaaccagggcaacccctgttctgatgaacatggcattgaattaaacgctgccgtggaaagcattatgcgaatgcctgtcgaagaacgccggacagcccttcttctcgatatagtcagtcctgaacttcagacgcgtctcgccaaatggtgcgacaacggcgaatatgcctgggcggtggattccccccggaataccttcaatccactgcatcataaaaaagtgggatttgatacaaccgttgtcctggacacaaaaaacggtattcatcctgcctgtgaacctttactcgcggtcctgtttttctacaaagaaatcatgcaacgcggcggcaatctgatgctctccattattgaagagttctggatgccagcaaactttcccatgacgcaaagcatgattaaaagcgcactgaaagcggggcgcatgaaaggtgaaatgatgtggttaacatcacagtccccggaagacgccataaactgcgcaatttttgcggcgctggtacaacaaaccgcaacgaaaattctcctgcccaatcccgatgcaaaatgggaaggatataaagaaattgggcttactgaaaaagagtttgaaaaactcaaagagctgacgaaggagtcaaggaccatgctcatcaagcaatctggctcttctgttttcgccaaaatggatttgtttggattcgatgagtttatccccgtgctttctggatctgaaactggcctgtctatttttgatgagattattgctgaaaaaggagatgtagctcctgatatctggataccagaactcctgaaacgcctgaacggttaa

SEQ ID NO: 486239 - DNA, 285 bp, Shigella sonnei
atgacttataacgggtttaaccgtcctgcgttaattgctggtatacccttaatgttgttattgttcacggcttttttcgctgttctgacaggcttccccgctattttcctttggggtataaaagggataattattcctgtgatatgtgcgctgtttctttttatagtaaaactggcctgtgaaaatgactcaaacgcactaagagtcatccgtttaaaccttatggggcttttgttaaaaatccgccacagagatttaattattggttattcatctgtcaggtaa

SEQ ID NO: 486240 - DNA, 291 bp, Shigella sonnei; identical to SEQ ID NO: 469829

SEQ ID NO: 486241 - DNA, 585 bp, Shigella sonnei
atgcagttatcagcggctgttctggcagcactgataagtcagtgtgcccctgatgtatcacccgatacgatgaatgccctgattatgactgaatcaggggctaatccatatgtaatagcgaatgtttctgacggaacaagtaagtattttaaagatgaaaaaggagctatcgaatatgcagaaaaattaaccacagaaaataaaaggtttagtgcaggtctgacacagatatacagcaaaaatttcccatcactcaatctgactaataaaacagtttttgacccgtgtacaaatataaaagcaggagcggcagtcctgacggacaattatctgaaacaaaaggagggtagtagcaatcaaaaaattctccgcgctttatctttgtattattcgggtaacgaatcaacaggatttattaaagaaaagaaatttaacaacacttcttatctggaacgggttattcgtaacgcgaataactatatcgtgccatcaatccgtgaaaaaactgatgaatcagaaataacccccccgaacgatgaagagaaaacatcaccggactgggatgtttttggagattttagttaa

SEQ ID NO: 486242 - DNA, 399 bp, Shigella sonnei; identical to SEQ ID NO: 221169

SEQ ID NO: 486243 - DNA, 438 bp, Shigella sonnei
atgggttggttcttcagcttgctcctgatattcctgtcaataggcagttactatctgacagataacaataaccaaaccatacagcgaatgaagttgcttcctgcaaaacaggaagcaattgaatttgtccatttcgcaaatgttatcaatgactatctttataaatatccagacaaacgtaattcaggaggaacgttaacatctgagcaaatcggtataacacccgtttatgatattcatcatattatttacggtaagcgagtttatatctggtctgccgatacagaaggtctgatgtctgctttgcagcagcaaacaaaacattcagcaatgttaggaagagtaaaaaataagaagattgtcgataatcaggggaatgatatgggcgttcccgttccttcctccattccagaagaggctattgtactcattaactaa

SEQ ID NO: 486244 - DNA, 1236 bp, Shigella sonnei
atgaaaaagatcattattattcccaccacattattgctgaatgcgtgttcccatgcccctgaacccgcacaggcaaaaggaggttggtatgaactgaataccacaattgagcaggtaagagcagacacataccataacgggatggtccttcagcagcccgtgtcacagccaaacagcactgttcaatacagcaatgataattatctcaaaaaggaagccataaacgtaactcccgcgcctcgtattgcagaaaccgtaaaaccacgttctgagcaatcagcgacagcgccaaaaaaccagggcagcaataatagttttctgaagccaacaacaaacagcataacttcatctggtgagataaaaacagcagccaaaggagcaactaaacagcattctgaacaaccagcactccctcccgcaaagccaatcagtagcaacaaccatcaggcacaaacggcacaaaagactgatcagcagacaaaaccgcgtcctgaacaaccaccgctaatgtcaaaaagcggttttctgaaaaaaaacgctaacaacgctgttccggccaccacgcttacaggcccatcaacacctgaaaagcaaatttactttgttcgccatgatggtaaaggctcgctgcaaaaagcagtaaaagaaattgtcccatcggactggacggctgaaatatccccggaggtaacgaaaactttccgtcgcacgatatcctggcagggcaacgatcaatggccttatgtcctggataaaatgcttcgcaactacggtctgacggtaattaagaacaccgaaaaaagacatcttctgattgattttcaacaacagaaagggaaaacatcacaaaaagcacctgtatctcctgacaaaacccctgcatctcctgtcaggacaccagtttcctctgacaagttacctcaaaaaccgctaacgcctgtcaccgttccgcaaaaacagacagaaaaactcacctggaatcttaaaaaaggttcgacgctgcgggatggcctcaccgaatgggcgtcaagttcgccgtgtggtacttcaacctggaatcttgtatgggatactcctgtgaactacagaatagatgctcctcttattttccggggaaactttgaatctgcattaaaagatacgctgatgctttatctttcagcagataaaccgttatacgcattcaggaatattgcacaatgcgtaatcacaattaaagacacacaacaggagtaa

SEQ ID NO: 486245 - DNA, 300 bp, Shigella sonnei
atgaaatccatcattttatcgatggttgccgcaagtgctatcgcactctctgcccccgtatatgcgtctgatccgtgtgcttccgttctttgtctgtacggtaaagctatcggtagcggcggcgggagcgaatgcaaaagcgccgaaaaggacttctttaatatcataaaaaagaaaaagggatctattcgctggagcaaaacctttgatgcccgaaaagcgtttctcaatcaatgcacgaccgcagacccggcggcgatctcaaaaatcatgagtaagttcggacgttcctggggttaa

SEQ ID NO: 486246 - DNA, 636 bp, Shigella sonnei
atgaaatccatcattttatcgatggttgccgccaccgcattactgtcaggctgcgcggatagcaaaacacaaccagtacctgagtcaccgttaacctcaaatgaccaccagataacgttgaaaattgataccgtgcgaacagacctgccggacagttctcctgtctgtttgaatggtatgaatatatacgaaagtctgagcgagcggcatccaggcttgtttgccaaaaatcagaacgtgattttccgtagtgcattctttgatgacggtcaggcgatatcctccgaaacaatccgcaaaataatgcagagtaccccgtgcgttgaatcacaaacaacatctgccggaagctgggaacctgccacggaactgatcccccgtcaggcaatatccggtgacactacactggctgaaaaagatcggactgctggcttcacaatgcggatagcaccggagattgagcgtggaaatttccacctgctactcacaaccactgacccgatacggaaacagactgtcgagcagaatattttactcaaaccggaccagccccttatcgtgagtggttttactggagttaatactgatagccaaagtgagaaccggattgtcatcattacgccacacgtgcgttga

SEQ ID NO: 486247 - DNA, 810 bp, Shigella sonnei
atgaatgagccattagaggcggaattgcactctttgtttagttttgatatctatccaggtgcatcatcagaacagaatactggagttaagttggctatggcgcggttttatttaaatgttccgtttgaagaaaaggatttggctaaacaaaaaggggcgcaatgggaccaagagcaacggaaatggtttgttccacagggaaaaaatccaatttattttattcggtggataaaagaattaaatgaacatgattacaatgttttttcgcaacgtttttatattgcggaaagttaccagtcttgttggcgctgtaagaaaacaactcctgtgtttggtatttttttacctcgttggtataagtatagagacgttatttggggagttgatcctgccgaatgggaagattgtatattagatgaatggtatgaaacatcctcccctaagggtatggagtattttgattcaaagaaaaatatgatttatcggtggttaaccagtagagtatggtggactgatttaacgaaaattgaaataatttcaacctctgctctctcaagaattaatgagtattcaaaattatattatccatcccatagcaaaacagcaaaaatgaactattacgcgaatcattgttgtcattgtaacgcaatgcaaggtgattttatgatgtttaatgagccagggggcgtgttcttccctgtaacatatgaacaggcggagaaaataagattccatgaagtcaatgaaacaatatttgccaaagcaagttatagtttaatacccgaagccggaggtttcatagatctttaa

SEQ ID NO: 486248 - DNA, 225 bp, Shigella sonnei
atgaaaaaattcataagcactttaactatcttgtcatgcttccttttagctgcttgtgaagacaaagtttatgatgtcagttactacgctgaacatcttgaacaagcccaagatgttgtcgaaaaatgcagcaaaggggatatgtctggtcaaaactgcgaaaatgcgcgtgaagccattcaaaaagagcaatcgggtaaagcatttaaaaatatgatgcaataa

SEQ ID NO: 486249 - DNA, 645 bp, Shigella sonnei
atgaaagataaagtattatcatttctctttgctggaataattaccgtaacatcaccatcaatctttgcatctggtattccagtagtagacgttacagcgatagctaaaacagttgaagaagggctaaatcgtgccgctgaagcggcaagacagcttgagcaactcaagcaacaatatgaacagaccataagatacgctgaagaacagaagaaaagactcgaaggcttcactgatttcagcaatggctttgatagcgcatccagctatatgaaggattctctatcaacaataacaaatagtgcaaaatcagatcttagctctttgcgatcgcaatatgacttatcaagcaacattgcagagacgcaacaaaaatatgatgcaatcctggctaagatcaaattctatgaaaatttcaacaatgaaatgcaggaaagggctaagagattaaccacgttacagaaggagttcgcgtcagcagatactccgcaaaaaaaagctgacttatctaaccaattgaatacagaaaaattgacaatggagctacaattgaagcaatatgatattgcagagagacagctaatcgcgtctgaaaatgcaagacaagaggctgttagtcgagaaaagtttaaattaatgatgcaatag

SEQ ID NO: 486250 - DNA, 996 bp, Shigella sonnei
atgaacattgtttcagaatttcttgataaagtaaccaccattgttgaatccacagcggcgacgaacgccgctaaggtcgcacaggcaatatctcctacattttttgcggctatagccttatacgttatttatctaatatatgaaatcacgtatgcccaacgtgacatccttatgaacgaggtgacgaagaatatcggtgcattcgccctggttggtgcattcacttattcagcgccttattacagccagtttgttattccttttgtcatgcacgctggctccgacctttctgctgctgttactggaggttcaggaactgcaaccagtgttgataatttgtggaacgctctatctacgaatttaaacaacttccttaatacaagtatgagtatttatggaaagttccaaattgctgagaaaatgggggtttatctagtatgggggattggctatatcggcggaatgcttctcatctattacactactgttttcttgacactatcaactttcatggttggaattcttctttccgctggcattttattcatttgtttcgctctattttcatcgaccagaaatatgtttactgcatgggtcggcagttgtctcaactatatactgttaaatttattctatagcatatcatttagtttcttaattagtttcgttgaatcagttgtccctgttaatggagatataaaactatctattgtagtttactttttccttattactattatttccatattccttatagaacaagttggcacactctgttctacattaacaggtggggtaggtataaatggccttacatcagccgctaatggctttggaggtaaggttgcatctggttttatgcgagcatcaggactccgatctttcactaatggatttgccagcaaaatgccaaatccaatctttaatgcaggaagtcgttctgcatcagcattagttcagggattaaaccgtggaagtaaacttaaagcggggtga

SEQ ID NO: 486251 - DNA, 258 bp, Shigella sonnei; identical to SEQ ID NO: 221160

SEQ ID NO: 486252 - DNA, 303 bp, Shigella sonnei; identical to SEQ ID NO: 476947

SEQ ID NO: 486253 - DNA, 216 bp, Shigella sonnei
atgagtgcttttattaagctggcatctgttctggcgttatttattagcccggttgtggttgcaatagcaggagaacaatctcactgtacaaaaatcaacgaataccctttcatcgtcactcaatgcgacgacggaactgtgacagtggtgaatgtgataaataaccgtgtagctgtgtgccgtaaaggggaatcatgcaaagaaataaaattataa

SEQ ID NO: 486254 - DNA, 663 bp, Shigella sonnei
atgcgaaacgcaaatgaaggaatttctcttgcagctattgtagctaaagaaacaacaacaggtaaatggaatggtactggtgggggtattggtttaggtactggtggtattggcttattcatcggaggtgtttctggttctaaacaagagcagacacaaagggcaaaaaactttgaatcgcctaaagaggaagaatacagtctattaaatgtatacggttcgataataaaagttctcgtttttggcgtgctatttggtttatctgcccgtttatttacatctttatcaaacactggttctgattttgctgaaccagtaacaaccaccacagccacaggaaagattcaatctattatgggtggcatggcagaaatggtaagcattttaggcaccgttgtcccttttttagtaattatcacagcaatgatctggtttctatttttcagcagcaaacgagaaaaagaagagttaactcgagttgaacgtgaagctgctaaaacaaaactccgtatagatgtctatcaccgtttacgttacgttgaaagcgatcatgtcgtttttgacccgattacaggccgggaggttccggcagaacggacgtgtattaataaactgattgaggcacttgttgatgaaagcaacgacatctcaaaaagaaattga

SEQ ID NO: 486255 - DNA, 171 bp, Shigella sonnei
atgcatctttcgttgttaattccgcttacaggagcagcgatgaatgcactatgtatttttattatcagacttctggataaggattttattgaagtctacaaaaaaacgctaaaaaaaattactgcattacatattttattgatggtgttaagtgtcacaggaatagtatga

SEQ ID NO: 486256 - DNA, 444 bp, Shigella sonnei
atgttatggtatacactatttcttctgtgtattgcacttgaacttataaccggaacaggatggttactcttaatcagtcttggtgcattatcaagcgccattgtgggtttttttcttccgatatcacaagaagccaatatatgcttctttgcgtcaatcagcatactggcgtcgataattaagttcttctatgacaaaaaacataagaaattagacactctcctggtgaacccagggcattcacgttttaaaggaaaagaatttacgctcagtgacgatattgttaacggcaaggggcaattactcattggtgatacattctggcctgttgagacgttacacaatgaaaactaccttgcgggaacaagagttattgttacagacatgcaaggaataactcttaaagtaatgaccatcgaagacaagagtgaaaacaaggaataa

SEQ ID NO: 486257 - DNA, 300 bp, Shigella sonnei
atgaaaacttatgggttcatccttcttattttacatataatccctatgggggcatggttctttcttctttttattacaaacgatgagaacaaagtagaaaaaatacaaaaccacatcgtatcaatatttccattatggctgaactggggaggggtgatgatagcgatggctctgctgcccctgttaatatggagttttaatggcatattcttcggcttctttctgctaatttatgcatttggcgtttataactaccttcatcttctttattcaatttctcccttttatcatggagattag

SEQ ID NO: 486258 - DNA, 978 bp, Shigella sonnei
atgattgacgctataattacgccaatagttacatctattccgttactcttattaattttagttgcgctgatattcgttaaatctgccgtcaaaatcgtgccacaaggtaatgcctggacagtggaacgctttggtaaatatacccatacgctttcccccggtcttcacttcctgatcccggttatggaccgcataggtcaacggatcaacatgatggaaaccgtcctggatattcctaaacaggaagttatttcgaaagacaatgcaaacgtaactatcgatgctgtttgttttgtccaggtcattgatgcagcgaaggcagcttatgaagtcgataatcttgcatcagctatttcaaatcttgttatgaccaatatccgaactgtcgttggtggaatgaatctcgacgatatgctttctcaacgtgacagcatcaattctaaactgttaacggttgtcgattatgcgactgacccgtggggaattaaggtcacacgtattgaaattcgggatgttaaaccaccaaaagaactgactgaagcgatgaacgcgcaaatgaaagcggaacgaactaagcgtgcccggattcttgaagcggaaggtatccgccagtcagaaattctgaaggcagaaggggaaaaacagtctcaaatactgaaagcggaaggggaacggcaatcagcatttcttcagtccgaagcacgcgaacgtcaggcagaagcggaagctcgcgcaacaaaactggtgtcggatgcaatcgctgaaggtgatgttcagtctgttaattactttattgcgcagaaatacactgaagcactccaggcaattggcacagcatcaaacagtaaactggtgatgatgccgcttgattcaagtagcctggtgagttcggttgcaggtatcagtgaactgctaaaaaacgtatcacaggatactcccaaagttgatatgaaacaggctcaacaatatttgtcttaa

SEQ ID NO: 486259 - DNA, 177 bp, Shigella sonnei; identical to SEQ ID NO: 403812

SEQ ID NO: 486260 - DNA, 216 bp, Shigella sonnei
atgtctaagtaccaaataaacgcaaccatcaaaaaaccaggtggtggccccgtgaaatggactcattacagcgacttccctatgaccgctgaagaatgcagaaaaaacttctcaaaagaaaaagaagcaggaaagtgtttttctgttgatgttcatatttcagatttcatttgcaaagagatacctccacaaaatgcaggaaatacatatggctga

SEQ ID NO: 486261 - DNA, 453 bp, Shigella sonnei
atggcgcgtaagttaaaaattaatcctgtcattcctgaatgtgtggcagatttgaaaggatatccactctatatcatcgttgcttattggggattaagaaataataaaacgctcacaacaacggatgttagccgtaatttccttattacacagcaacaatcttatgatgtgcttacctacatttaccaggaagcacagaagcagataacagcaactaaacgaacactatttaacgagcacaaaagaagaattagtgcgttcaggattcttgatattgacaaaggcatattgcgcaccccaaaaaaagagattgcatatgccagctacgacaatataccaactgtaacaatgaaaagtacccgttgtgagatccaggatagttttacagaactgcgccgctggatgtgttcaagaaagacaggtgatcgagtggaggtatttttgaatgtctaa

SEQ ID NO: 486262 - DNA, 1029 bp, Shigella sonnei; identical to SEQ ID NO: 403809

SEQ ID NO: 486263 - DNA, 162 bp, Shigella sonnei; identical to SEQ ID NO: 22640

SEQ ID NO: 486264 - DNA, 216 bp, Shigella sonnei; identical to SEQ ID NO: 403807

SEQ ID NO: 486265 - DNA, 573 bp, Shigella sonnei; identical to SEQ ID NO: 221149

SEQ ID NO: 486266 - DNA, 285 bp, Shigella sonnei; identical to SEQ ID NO: 403805

SEQ ID NO: 486267 - DNA, 666 bp, Shigella sonnei
atggggagagcattacttgtcgcatcagataaaggcggtgtaggaaaaagcaccacagcaacaaacctggcttcttatctggtaaataattcacgaacggtcatcattctgaagaccgataaaaacaatgatattcttagctggaacgaaaaaagaaagcagaatggcttattaccggttcctgtttatgaagagtatggcgatgtatcagaagtcattaagcgcctgaaaaaaatatgtgaagtgctgatcattgactgtccagggcatgacagcaaggaatttcgcagcgccttaactgtagctgacactctgcttactctcgttaagccgtcttcagatttcgaagcagaaacgctgactcatgtaacagaaaaagttcgcacagctcaacagatcaatccagacctgcaaccctgggtacttttcacgagaattaacacgacaaaaccacgccacagaaaagcagcgattgatctcgacaagttactccgggagaacccggtgtggatacagccacttcgtacacgtatttcagatttagatatttttgaagcggcctgtaatgaaggcgctggcgttcatgatgtacgtcgcgcatccagcctttctacagctaaagcacaaatagagcttttggcgcaagagttaggcatcaatccctaa

SEQ ID NO: 486268 - DNA, 330 bp, Shigella sonnei; identical to SEQ ID NO: 221147

SEQ ID NO: 486269 - DNA, 483 bp, Shigella sonnei; identical to SEQ ID NO: 483872

SEQ ID NO: 486270 - DNA, 210 bp, Shigella sonnei
atgatgaaatatgtgtacccggtaaccccggtgtgcatcgtttttgattattcccgcacactcgcgcagaaggagttccccgtcgggctacggtctctgttaatacgggaatacggcgacgattggatttgcccctatatttccagacatctgttatcacttaacccattacaagcccgctgccgcagatattcccgtggcgagcgataa

SEQ ID NO: 486271 - DNA, 459 bp, Shigella sonnei
atgaaatatattccactggtattatttatcttttcatggccggtattgtctgcagatattcatggacgggttgttcgtgtactggacggtgataccatcgaggtcatggactcacggaaggcggtgcggatcaggctggtaaatattgatgcgccggaaaagaaacaggattatggccggtggtcaacagacatgatgaaatcactggtcgcaggaaaaacggttaccgtcacatattttcagcgagatcgttatggtcgtattctcgggcaggtttatgcgccagacggaatgaatattaatcagtttatggtccgggccggggctgcctgggtatatgagcagtacaacacagatcccgtgctgcctgtccttcagaacgaagccagacaacaaaaacgtgggctctggtcagatgctgatccggttcccccctggatatggaggcaccgtaaataa

SEQ ID NO: 486272 - DNA, 213 bp, Shigella sonnei
atgaatggattcagaaacagttcacggaacggtcaggtctggcgttaccagcgtgccggcgggcgggccgttattctggaggtcagtggacgctggatggaagcggcagaagcatggcgacgggctgcctgcatagctccccggacagactggcaacagtttgcccggaaaagggctgaacactgccaccggcgctgccggggaagggtgtaa

SEQ ID NO: 486273 - DNA, 747 bp, Shigella sonnei
atgacaacggataacacgaacacgacacgtaacgattcactggctgcccggaccgatacctggttgcagtcgttgctggtctggtcacccggacagcgggatatcatcaaaacggtggcactggtgctgatggtactggaccacgcaaaccgcattctgcatctggaccagacgtggatgtttctggccgggcgtggagcctttccgttgtttgccctggtgtgggggctgaatctgtcccgccatgcgcatatcaggcagtcggccattaaccggctgtggggatggggaattattgcccagttcgcgtattatctggcaggctttccgtggtatgaggggaatatcctgtttgcctttgcagtggcggcacaggtgctgacgtggtgtgaaacgcgcagtgggtggcgtacagcagcggccattctcctgatggcactgtgggggcctttgtccggcaccagttacggcattgccgggctgctgatgctggcagtcagccaccggctgtaccgggcggaagacagaacggaacgtctggcgctggttgcatgcctgatggctgttattccggcgcttaaccttgccaccagtgatgccgcggcggtggccggccttgtgatgacggtgctgaccgttggtctggtgtcctgtgcagggaaatcattaccccgtttctggcccggagattttttcccgacgttctatgcctgtcatctggctgtgctgggcgttctggcgctgtaa

SEQ ID NO: 486274 - DNA, 5271 bp, Shigella sonnei
atgatgagtatcgcgcaggtcagatcggccggaagtgccggtaactattataccgacaaggataattactatgtgctgggcagcatgggagaacgctgggccggcaggggggctgaacagctgggactgcagggcagtgtcgataaggatgtttttacccgtcttctggagggaaggctgccggacggagcggatctaagccgcatgcaggatggcagtaacaggcatcgtcccggctacgacctgaccttctccgcccccaaaagtgtctccatgatggccatgttaggtggcgataagcgcctgattgatgcacataaccaggccgtggactttgctgttcgtcaggtggaggcgctggcctccacacgggtgatgacggacggacagtcagaaacggtactgaccggtaatctggtgatggcactgtttaaccacgacaccagtcgcgatcaggaaccacagttacacacgcatgcggtggtggctaatgtcacgcagcataacggtgagtggaagacactgagcagtgacaaagtggggaaaacggggttcattgagaatgtgtacgctaatcagattgcctttggcaggctctaccgggaaaaactgaaagagcaggttgaggcgctgggctatgaaaccgaagtggtgggtaagcacggtatgtgggagatgccgggcgtaccggtggaggccttttccggacgctcacaggcaatccgggaggccgtcggggaagatgcctcgctgaaatcccgggatgtggcggcactggatacgcgaaaatccaaacagcacgtcgatcctgaagtcagaatggctgaatggatgcagacgctgaaggaaaccgggttcgacatccgggcatatcgtgacgcggcggatcagcgtgcggagacccgcacgcaggcgcccggggctgtttcacaggaggggccggatgtgcagcaggcggtgacacaggccattgccggattaagtgaacgaaaagtgcagtttacgtacacggacgtgctggccagaacggtcggcatactgccgccggaaaatggtgtgattgaacgggcacgcgccggtatcgatgaggccatcagccgtgagcagcttatccccctcgatcgtgagaaggggctgttcacgtccgggattcatgtgctcgatgagctgtcagtccgggcactcagtcgtgacatcatgaaacagaaccgggtgaccgtacatccggagaaaagtgtcccccggacggccggttacagcgatgccgtcagtgttctggcacaggatcgcccgtcgctggccattgtgtccgggcagggcggtgcagccgggcagcgtgagcgggtggctgaactggtcatgatggcccgggagcaggggcgggaggtgcagattatcgctgctgaccgtcgctcgcagatgaacctgaagcaggatgaacggctgtccggtgagctgataaccggacgtcgtcagctgctggaaggcatggccttcacgccgggcaatactgttatcgttgaccagggcgaaaaactctccctgaaagagacgttaaccctgctggatggtgccgcacgtcataacgtacaggtcctgataaccgacagcgggcagcgaaccggtacaggcagtgcacttatggccatgaaggatgccggggtgaacacatatcgctggcaggggggagaacagcgaccggccaccatcatcagtgaaccggaccgcaatgtccgttatgcccggctggcgggagattttgcggccagcgtgaaagccggagaagagagcgtggcacaggtcagcggggtacgggaacaggtcatactgacacaggccattcgcagtgagctgaaaacacagggcgtgctcggacacccggaggtgaccatgaccgccctgtcaccggtctggctggacagccggagccgttatctgcgggatatgtaccgcccggggatggtgatggagcagtggaacccggagacacgcagtcatgaccgctatgtgatagaccgggtgacggcgcagagtcacagcctgaccctgcgggatgcgcagggtgaaacgcaggtggtgcgtatttcttctctggacagcagctggtcgctgttccggccggaaaaaatgccggtggcagacggcgagcgtctgagggtgaccgggaaaattcccggactccgcgtctccggcggtgaccgcttgcaggtggcatccgtcagcgaggacgcgatgacggttgttgtgccgggacgggctgaaccggcctccctgcctgtggctgattcaccgttcacggcactgaagctggagagcggctgggtggaaacacccgggcattccgtcagtgacagtgcgaaggtttttgcctccgtcacacagatggcaatggacaatgccaccctgaacggtctggcccgcagtggtcgtgatgtccggctgtattcctcactggatgaaacccgtactgcggaaaaacttgcccgccatccctcctttacggtggtttctgagcagataaaggcgcgtgccggtgagacattgctggaaaccgctatcagtctgcagaaagcagggcttcacacgccggcacagcaggccattcatctggcccttcctgtgctggaaagtaaaaacctggccttcagcatggtggacctgctgacagaggcgaagtcgtttgctgcagaaggaaccagttttactgacctgggaggggaaatcaatgcgcagataaaacgcggtgatttactgtatgtggatgtggcaaaaggctatggcacaggcctgctggtttcccgtgcgtcgtatgaggctgaaaaaagcattcttcgccatattctcgaaggtaaggaggcggtcacgccgctgatggagagagtacctggcgaactcatggagaaactgacatcaggacagcgcgccgccacccgcatgatactggaaacgtccgaccgtttcacggtggtgcagggctatgccggtgtggggaagaccacacagttccgggcggtgatgtcagccgtgaacatgctgccggagagtgggcgtccccgtgtcgtggggctggggcccacgcaccgcgcggtcggggagatgcgcagcgccggcgtggatgcacagacactggcgtcatttctgcatgacacgcagctgcagcagcgcagcggagaaacaccggatttcagcaacacgctgttcctgctcgatgagagctcaatggtgggcaataccgacatggcacgggcatacgccctgattgcggccggtggtggtcgtgcagtggccagcggtgacacggaccagttgcaggccatcgcgcccggtcagcctttccgtctccagcagatgcgcagtgccgccgatgtggccatcatgaaggagattgtgcgtcagacgccggaactgcgggaggcggtatacagcctgattaaccgggatgtggaaagggcactgtccgggcttgagagtgtgaaaccgtctcaggtgccacgtctggagggcgcatgggcaccggagcactccgtgacggagttcagtcacagccaggaagcgaaactggcagaagcgcagcagaaggcgatgctgaaaggcgaggctttcccggatgtccccatgacactgtatgaagccattgtccgcgactataccggcaggacaccggaagcacgggagcagacgctgattgtcacacacctgaatgaggaccggcgcgtactgaacagcatgattcatgatgcacgggaaaaggccggtgagctgggcaaagagcaggtcatggtgcctgtcctgaacacagcgaatatacgtgacggagaactgcgtcgtctctccacctgggagaataacccggatgcccttgccctggtggatagtgtgtatcaccggattgccggtatcagcaaggatgacgggctgataaccctggaggatgcggaaggtaacacgcggctgatttcgccccgggaggcggtggctgaaggcgtcacactgtacaccccggacaccatccgggtgggaaccggtgaccggatgcgcttcacgaagagtgaccgggagcgcggttatgtggccaacagtgtctggacggtgacagcagtttccggtgacagtgtcacgctgtcggacggacagcagacccgggtgattcgccccggccaggagcgggcagagcaacatattgacctggcctatgccatcaccgcccacggtgcgcagggggcaagtgaaacctttgccatcgcgcttgaaggcacggaaggtaaccggaaactgatggccggctttgagtcagcctacgtggccctgtcgcgtatgaagcagcatgtgcaggtgtacaccgataaccgtcagggctggacggatgccattaacaatgccgtacagaaaggaactgcccacgatgtgtttgagccgaaaccggaccgggaggtcatgaatgcagagcggctgttcagtacggcgcgggagctgcgggacgtggcggcaggccgtgccattcttcgtcaggcggggcttgccgggggagacagtcctgcacggtttattgctccgggacgtaaatatccacagccgtatgtggcactgccggcgtttgaccgtaacggcaagtctgccggtatctggctgaacccgctgaccacggatgacggaaacgggctgcggggattcagtggtgaaggccgtgtgaaaggcagcggggatgcgcagttcgtggccctgcagggcagccgtaacggcgagagcctgctggctgataatatgcaggatggtgtccggattgcccgtgataaccccgacagcggtgtggtggtgagaatcgccggtgaaggtcgtccgtggaatcccggtgccatcaccggtggccgcgtgtggggggatatcccggacaacaacgtccagccgggagccggaaatggcgagccggtcacggcagaggtactggcacagcggcaggctgaagaggccatccgccgtgaaacggaacgccgcgcagatgaaattgtccgtaaaatggcagagaacaaacctgacctgccggacagcaaaacagagcaggctgccagggagattgccgggcaggagcgtgaccggtctgccatatctgaacgggaagccgcgctgccggagagtgtgctgcgtgaatcacaacgggagcgggaagcggtccgggaggttgcccgggaaaatctgctgcaggaacgacttcagcagatggagcgggatatggttcgtgacctgcagaaagagaaaaccctgggcggagactga

SEQ ID NO: 486275 - DNA, 2199 bp, Shigella sonnei
atgagttttaacgcaaaggatatgacccagggcggtcagattgcgtccatgcgtatccgcatgttcagccagatcgccaatatcatgctttactgcctgtttatttttttctggatactcgttggtctggttttatgggtaaaaataagctggcagacgtttgtgaacggctgtatttactggtggtgtaccacgctggaaggcatgcgggatttaatcaagtcccagccggtctatgagatccagtattacggcaaaaccttccggatgaatgctgctcaggtactgcatgataaatatatgatctggtgcggagagcagctatggtccgcattcgttctggccacagttgtggcactggttatttgcctgattaccttctttgttgtctcctggattctggggcgtcagggtaaacaacagagcgaaaatgaagtcacaggtggtcgtcagctgacagacaatccgaaagacgttgcccggatgctgaaaaaagacggcaaggactccgatatccggattggcgacctgccgattatccgggattctgaaatccagaacttctgtctgcacggcacggtcggggccggtaagtcggaagttatccgtcgtctggccaactacgcccgtcagcgcggtgatatggtggtgatttatgaccgttcaggggaatttgttaaaagttactatgatccctccatcgataagatcctgaatccgctggatgcccgctgtgccgcctgggatttatggaaggagtgtctgacacagccggattttgataatacggcaaataccctgatcccgatgggcacaaaagaggacccgttctggcagggttcaggacgtaccatttttgcggaagcggcgtacctgatgcgtaatgaccccaaccgcagctacagcaaactggtggacacactgctttccatcaaaatcgaaaaactgcgtaccttcctgcgtaattcaccggcggccaacctggtggaagagaaaattgagaaaacggcgatttccatccgtgctgtgctgaccaactacgtgaaagccatccgttacctgcaggggattgagcataacggtgagtcttttaccatccgtgactggatgcgtggtgtccgggaagatcagaaaaacggctggctgtttatctcgtcgaatgccgacacccatgcctccctgaagccggtgatctccatgtggctgtccattgccattcgtggtctgctggcaatgggagaaaaccgtaaccgtcgtgtgtggtttttctgtgatgagctacccacgttacacaaactgccggacctggtggagatcctgccggaagcccgtaagttcggtggctgttatgtgtttggtatccagtcctatgcccagctggaagatatctacggtgagaaagcggctgccacgctgtttgacgtcatgaacacccgtgcctttttccgttctcccagccataagattgcagagtttgctgccggtgagattggtgagaaagagcacctgaaagccagcgagcagtactcctacggtgctgatccggtacgtgacggggtatcgaccggtaaggatatggagcgccagacgctggtcagttattccgacattcagtctctgccggatttgacctgttatgtcaccctgcccggaccgtatccggcagtaaaactctcactgaaatatcaggcacgtccgaaggttgcccctgagtttattccgcgtgacatcaacccggaaatggagaaccgcctgagtgccgtacttgccgcaagggaagcagaaggtcgtcagatggccagcctcttcgaaccggatgtgccggaggttgtttccggagaagacgtgactcaggctgaacagccgcaacagccgcaacagccgcaacagccgcaacagccgcaacagccgcaacagccggtgtctcctgccatcaacgataagaagtcagattcaggtgtgaatgttccggcaggggggatcgagcaggagctgaaaatgaaaccggaagaagagatggaacagcaactgccacccgggatcagtgaatccggtgaagtggtggatatggccgcttatgaggcatggcaacaggaaaatcatccggacatccagcagcagatgcagcgtcgtgaagaggtgaacattaatgtgcaccgggagcgcggggaggatgttgagccgggagatgatttctga

SEQ ID NO: 486276 - DNA, 732 bp, Shigella sonnei
atgaaaacaaaaaaattgatgatggttgcactggtcagttccactctggccctttcagggtgtggtgcgatgagcacagcaatcaagaagcgtaaccttgaggtgaagactcagatgagtgagaccatctggcttgaacccgccagcgaacgcacggtatttctgcagatcaaaaacacgtctgataaagacatgagtgggctgcagggcaaaattgctgatgctgtgaaagcaaaaggatatcaggtggtgacttctccggataaagcctactactggattcaggcgaatgtgctgaaggccgataagatggatctgcgggagtctcagggatggctgaaccgtggttatgaaggcgcagcagttggtgcagcgttaggtgccggtatcaccggatataattccagttctgccggtgccacactcggtgtgggccttgctgccggtctggtgggtatggctgcagatgcgatggtggaagatgtgaactataccatgatcacggatgtgcagattgcagagcgtactaaggcaacggtgacaacggataatgttgccgccctgcgtcagggcacatcaggtgcgaaaattcagaccagtactgaaacaggtaaccagcataaataccagacccgtgtggtctcaaatgcgaacaaggttaacctgaaatttgaagaggcgaagcctgttctcgaagaccagctggccaaatcaatcgcaaatattctctga

SEQ ID NO: 486277 - DNA, 510 bp, Shigella sonnei
atgatcactcactatgatataaaaatggagatgcaaaaactaaaggaggtactctctgtagagggtgttaatatcccatcattattacaagtcataaaaccgggaacttatgtgtttttatgggttttattatggccaacttttctgcgtttagtatcggttaaaagtgatgtcagggatgttggctttgatatatgtgctagtggaatgatggggttcctgctttttgtggctattacaaatggaatgatgttataccttgcgattcctgatagtttcagaaaggattcaaaaataataaattttatgtattctaagagtaagacatatattttgttgtttttgattgttttttctatggtttcatttatgcattctatcttatatgtttttgcactaatgattacattcatattatttttcttggtgtataccatagatataaatcgttataatctctcagctatagcctcagtaataggactgttcaaaaaagagtctgttagttaa

SEQ ID NO: 486278 - DNA, 2826 bp, Shigella sonnei
gtgaatgaagtttatgtgattgccggtggtgagtggttgcggaataacctgaacgccattgccgcctttatgggaaccaggacgtgggattccattgaaaaaattgcgctcacattgtctgttctcgcggtggccgtgatgtgggtacagcggcacaacgtgatggatttgctgggctgggtggccgtgtttgtgcttatcagcctgctggttaatgtccgcacatcggtgcagattattgataacagtgacctggtcaaagttcaccgggtggataatgtaccggtcggactggcgatgccactttcactgacgacccgtatcgggcatgcaatggtggccagttacgagatgatcttcacgcaaccggacagtgtcacctacagcaaaacggggatgctgtttggcgcagaactggtatcaaaaagcaccgactttttgtcccgcaatccggaaatcgccaatcttttccaggattatgtgcagaactgcgtgatgggggatatttacctgaaccacaaatacacgctggaggagcttatggcctccgctgatccctacacgctgattttttcccgccccagtccgctacggggcgtttatgacagcaataataatttcgtgacctgtaaggacgcgtcggtttcgctgaaagacaagctgaatctggatacacagagtggcggaaaaacctggcattattatgcccagcagctatttggtggacgccctgatccgaacctgttgttcagtacgctgattggcgacagttacagttacttctatggctcaagtaaatcagccagccagatcatccgccagaatgtcaccatcaatgcgctgaaggaggggatcaccagttatgccgcgcgtaatggtgattcagccagcctggtgaatctggccaccacgtcatcgatggagaagcaacgtctggcacatgtctccatcggtcatgtggcgatgcggacactgcccatgacgcagaccatcctgacggggatcgccatcggtattttcccgcttctggtactggcggctgtcttcaacaaactgacgctgtccgtcctgaaaggctatgtgtttgccctgatgtggttgcagtcatggccaatgttgtacgccattctgaacagcgccatgacattttatgcgaagcagaatggtgcaccggtggtgctctcggaaatttcacagatacagctgaaatactccgatctggcttccactgccgggtatctttccatgatgatcccgccattatcctggatgatggtcagggggctcggggcaggattttccagtgtgtacagccatttcgcttcctctgctatcagcccgaccgccagtgcagcaggcagtgtggttgacggtaattactcctacggcaacatgcagacggagaacgttaacggcttcagctggagcaccaacagcaccacgtcgtttggtcagatgatgtaccagaccggcagtggcgcaaccgccacacagacccgtgacggtaatatggtgatggatgcaagcggagcgatgtcccggttaccggtcggcatcaatgcaacgcgtcagattgcggcggcacaacaggaaatggcccgggaagcatcgaacagagcagaaagtgccctgcatgggttcagcagcagtattgccagtgcctggaacacgctcagtcagtttggttctaaccgggggagcagtgattctgtcaccggtggtgctgacagcacgatgagtgctcaggactccatgatggccagccgtatgcgcagtgcagtggaaagctatgcgaaggcgcataatatcagtaatgagcaggcgactcaggaactggcatcaacaagtaccaggctatctggtggaatgtatgctgatgctcatgctgaatggggggttaaacctaaaattcttggtgttggtggtggggtaggcatcagaggtggatttaaggggagcctggatgcaacggatgatgactcacattcagcaagtagtggcagcagggctacccatgatgctcgccatgatatcgatgctaaagccagtaaggactttaaagaggccagcgattactttaccagtcgcaaggtcagtgaatccggcagccatacggacaataatgccgattcccgtgtggaccagctgtctgcagccctgaactcagcaaaacagagttacgaccagtacacgacgaatatgacccgcagccatgaatatgctgaaatggcatcccgtactgaaagcatgagtgggcagatgagtgaagacctgtcgcaacagtttgcacagtatgtgatgaaacacgcgccgcaggatgccgaagctattctgacaaacaccagttcaccggagattgcagaacgccgtcgggcgatggcatggtcttttgttcaggaacaggtgcagcctggtgttgataatgcctggcgtgaatcccgtggggatattggtaaaggaatggagagcgtaccttcgggtggtggcagccaggatattattgctgaccatcaggggcatcaggccattattgatcaaagaacgcaggacagtaatatccgtaatgatgtaaaacatcaggttgataatatggtcacagaatataaagggaatatcggagatactcagaatagtattcatggcgaagaaaatattgtagacagacaatattcagagttaaaaaataatcacaaacaggaagaaattcaacaaaacaacagatataatgaagaaaataaacgacagaaattaatgccaacaccgtctgaagatgcgttaaaacagatggtggatgataagaaagaacgattgaaggggccattatga

SEQ ID NO: 486279 - DNA, 303 bp, Shigella sonnei
gtgcgaaataagcaggtggtgttactcattgccggaatatccggcatcgcgacgggaataatcgtcagcctgaatatcccctttatccatcaggggcttttttatcccgccagccctgtagaaattgtcgtttcgctgtgccttaccttttctgtttctgttgtgttttttgtgggggcaattgtgggatggatttcggtgtctgaaatatattacagccgcaggactggacggaaatatcgggatattcctgctgaaatgtcgtatgcgccgggagaacaaattaagggagggcaagaatga

SEQ ID NO: 486280 - DNA, 546 bp, Shigella sonnei
atgtctctcattaaatcactgttgttcaccctgttgctggcagccgctgccgtgcaggcctccacccgggatgaaattgaacgactctggaatccgcagggcatggccgcgcagcctgcacaaccggcagcaggcacgtcagccaggacagaaaagccagccccccgctggttccgcctcagcaacggcaggcaggttaacctggccgactggaaggtggtgctgtttatgcaggggcattgcccttactgtcaccagtttgacccggtactgaaacagctggcacagcagtacggcttttccgtttttccctacaccctggatggtcagggggataccgcctttccggaggcattgccggtgccaccggacgtgatgcagaccttcttcccgaatatcccggtggccacaccgaccaccttcctggtcaacgtcaacacgcttgaggcattaccgcttttacagggggcaacggatgctgccggttttatggcgcggatggataccgttctgcagatgtacggagggaaaaaaggtgcgaaataa

SEQ ID NO: 486281 - DNA, 285 bp, Shigella sonnei
atgataagtaaacgcagattctctttaccccggcttgatattacgggaatgtgggtattttccctgggtgtctggtttcatatcgtcgcccgtcttgtttacagcaaaccctggatggctttttttctggcggagttgattgcggccatccttgtgctgttcggcgcataccaggtgctggatgcatggattgcccgtgtcagccgggaagagcgtgaggcactggaagccaggcaacaggccatgatggcagagcagcaggagggcggacatgtctctcattaa

SEQ ID NO: 486282 - DNA, 348 bp, Shigella sonnei
atgagtgaagattgtttgaaaatgtttacaggtgttgttctgttaatatttgtcattattgccggttatttcttttctgagcgtaatgacaggaaaatgtttctcctgagctcactggttttccttgttattaatatcgcatgtttatatgtgctgactgccagtctctggtttctgtgtggtgcaattatgaatcagggcgcagcaatggttgttccaatggttattggctcattaccgaacgttacgagcttcgacgggttcagaagaatatttatctgtattatgttgtcatcagtatggtccggagtgatgtggttttttataagggggcttatgacaggctaa

SEQ ID NO: 486283 - DNA, 744 bp, Shigella sonnei
atgaataaagcattactgccactgttactctgctgctttatttttccggcgtcagggaaagatgcaggctggcagtggtataacgagaaaataaatccaaaggaaaaagaaaataaacctgtacctgcagtcccacgtcaggagccggatattatgcagaaactggccgcactgcagacggcaacaaagcgggcgctgtacgaagctattctgtatcccggcgtggataattttgtgaaatatttccggctgcagaattactggactcagcaggccgggcttttcaccatgagcgccagaaaggccatgctggcgcatcccgaactggactataacctgcagtacagccattacaacggcacggtacggaaccagctggcagcagaccaggcgcagcagcgacaggccattgcgaaactggctgaacactacggcatcatgtttttttaccgggggcaggaccccatcgacgggcagctggcgcaggtcattaatggcttcagggatacctatggtctgagtgttattcccgtttccgtggatggtgtgattaatccgctgttgccggattcccggactgaccaggggcaggcgcagcgcctcggcgtgaaatatttcccggccatgatgctggttgacccgaaacagggcagtgttcgtccgttatcatacggttttatttcgcaggacgacctggcaaaacaattcctgaacgtttctgaagattttaaacccaatttttaa

SEQ ID NO: 486284 - DNA, 258 bp, Shigella sonnei
atgaaagtcatattcacgtcgaaccgttttattgattttcttatccggcttttgattacagcgattgtcatttccccggtaattatctggtcgtgggatacggtaaaagaaaccactgcaggtgagatgcttgctgcctgttttgttattttttactccggtgtgctcctgtttattctgtatttttgtttttctgccctgactgacctgcagaaatctgatgaaagaaaaagtgatgaaaggaatgaagatgaataa

SEQ ID NO: 486285 - DNA, 1809 bp, Shigella sonnei
atgaaacgtattttacctctgatactggctctggttgccggcatggcactggctgacagcaacagtgattaccgggccggctctgattttgctcaccagatcaaaggacagggaagcagcagtattcagggctttaagccacaggagagtatccccggctataacgcgaatccggacgagacaaaatactacggtggcgtgactgccggcggggatggcggcctgaaaaatgacggcaccacggaatgggcgaccggtgaaaccggaaaaaccatcacagagtcattcatgaacaagccgaaagacattctttcaccggatgcaccgtttatccaggccggcagggatgtggtgaaccgggctgacagcattgtgggaaacaccgggcagcagtgcagtgcgcaggagattagccggagtgaatacacgaattacacctgtgagcgggatttacaggtggagcagtactgcacacgaactgcccgtatggagctgcaggggagtaccacatgggaaacccggacgctggagtatgaaatgagtcagctacctgcacgtgaagtgaatggtcagtatgttgtctccattacctctcccgttaccggtgaaattgtcgatgcgcattacagctggagtcgtacttacctgcagaagagtgtacctatgacaattacagtactgggaaccccactgagctggaatgccaaatactcagcagatgcctcatttacaccagtacagaaaacactgactgccggtgttgcttttacgtcatctcaccccgtccgggtcgggaatacaaaattcaaacgtcatacggcaatgaagctgcgtctggttgtcagggtaaaaaaagcctcgtacaccccgtatgttgtctggtctgaaagctgcccgttcagcaaggagctggggaaactgacaaaaacagaatgtacggaggctggcgggaacaggacgctggtgaaagacggtcagtcatacagcatgtaccagaactgctgggcataccgggacacgtatgtcacacagtcagcagacaagggaacctgtcagacctacaccgacaatcctgcctgtaccctggtgtcacaccagtgcgccttttactccgaagaaggtgcctgtctgcatgaatatgccacgtactcctgtgagtcaaaaacatccgggaaagtgatggtctgtgggggagacgtcttctgtctcgatggcgaatgcgataaggctcagagcgggaagagtaatgattttgccgaagctgtttctcagctggcggcactggccgcagcaggtaaggatgttgcggcgctgaacggggtggatgtccgtgctttcaccggtcaggcgaaattttgtaagaaggctgcagccggatacagcaactgctgtaaggacagcggctggggacaggatatcgggctggccaaatgcagcagtgatgaaaaagccctggctaaagcaaaatcaaacaaactgaccgtcagtgtcggagagttctgttcgaagaaagtgctgggtgtctgcctggagaaaaaacgcagttactgtcagtttgattcgaagctggcgcagatagtccagcagcaggggcgcaacggacagctgcgtatcagttttggcagtgcgaagcatcctgactgtcgggggattacggttgatgagctgcagaaaattcagttcgacagactggatttcactaacttctacgaagacctgatgaataaccagaaaatcccggacagtggtgttctgacgcagaaagtgaaagagcagattgctgaccagctgaaacaggcaggacagtaa

SEQ ID NO: 486286 - DNA, 639 bp, Shigella sonnei
atgaactggaaaacatttgcgctttttgccctgactgcaggaatgcatatcactgttcatgcctcagacaatgtgaacactcctgaaaaccgccagttcctgaagcagcaggaaaatttaagcagacaactgcgtgaaaaacctgaccatcagctgaaggcctgggcggagaaacaggtgctggagaacccccttcagcgttcagataaccatttcctggatgagctggttcgtaaacagcaggcttcgcaggacgggaaaccccggcagggggccctgtattttgtgtcgttttccattcccgaagaggggctgaaacggatgctgggcgaaacccggcactacggtatacccgccacactgcggggcatggtgaacaatgacctgaagaccaccgctgaagccgtgctgtccctggtgaaagacggcgcgactgatggtgttcagatcgacccgacgctgttttcacagtacggcattcgcagtgtaccggcactggtggtgttctgcagtcagggatacgacatcatccggggaaacctgcgggtcggccaggcgctggagaaagtggccgccacgggtgactgccggcaggtggctcatgatttactggcagggaaaggagattccgggaaatga

SEQ ID NO: 486287 - DNA, 453 bp, Shigella sonnei
atgagtaataatataaaatatggctccagaatacttgatatgggtgttctgctggagatgaaagcgcttgtgaatgcaaatggtggtgtgtcacggtgcattatggagtgtcggcagcttgcctgtgaggtccgtcattcgcaacaattactggataagctgtcatgtattgacgactggttgtgccggttttcctcaataatgtatcaccgttttgataaagaacagattcagtggcgggaggatgtggacagggattatcccagagaaaaagtttatattttcagtcccgataatgtctccgtccataataatgatattaaagactctgccaataacacatcaggaataaccgtgtcggttacagccagtaaaatatgcgcaggtcagaaagagtttgatgcttttttaaaactggcagaaaaattgagagaaaaccctacgggtaattaa

SEQ ID NO: 486288 - DNA, 462 bp, Shigella sonnei
atgtataaacaggcaacagaattaatgctgaactttaaagaccgcattctgattaagggggaagaagataccggcaagtcaactctcctgactgaaataagaatcagtgatagtgattcccggtattacaactttaaaactcttaactctgcggggtacaaccggctttgtgatgaaaatattgataattttgattttctgaatacacctgaaaagacgttaatccttgatggagtcaggctgtgtgaaaagaaaatgacatcaaaagttatcaggttaattaaacaggccagaaaatatcataaacgcctggttgtggttgcagactcatgtgagtctgagtttatcgaactgttgtttgatggtgttattgcattgtccttcaattctgacagagaaaggagttgcaatgtttatacgccatcaaggcatcgtaatacagataatatttatgctaggtaa

SEQ ID NO: 486289 - DNA, 993 bp, Shigella sonnei
atgaagcgaagcctgtggctgctgatgttattccttctcgccggtcatgtccctgcagcgtctgcggattctgcctgtgaggggcgttttgtaaacccgatcacggatatctgctggagctgtattttcccgctctcgctgggcagtatcaaagtcagtcagggtaaggtccccgacacggcgaacccgtcgatgcccattcagatttgtccggcaccgccgccgctgttcaggcgtatcgggctggccattggttactgggagccgatggcgctgacggacgtcacccgatcaccgggatgcatggttaacctgggcttcagcctgccggcttttggtaaaacggcacagggaacggcgaaaaaggatgagaagcaggtgaacggggcgttctatcacgttcactggtacaaatacccgctgacgtactggcttaacatcatcacatcgctgggctgtctggaaggtggtgacctggatatcgcttatctttctgaaatcgaccccacctggacggacagcagcctgaccaccattctcaatccggaagctgtcatctttgccaatccgatagcacagggggcctgtgcagcagatgccattgccagcgcctttaatatgcctctcgatgttctgttctggtgtgccggttcgcagggcagtatgtacccgttcaatggctgggtgagtaatgagtccagtccgttgcagtcctccctgctggtcagtgaacgcatggcgttcaagctgcaccgtcagggcatgattatggaaaccatcgggaaaaataacgccgtctgtaatgaatatccgtccccaatcctgcccaaagaacgctggcgttaccagatggtgaatatgtacccggacagcggacagtgccatccgttcgggcgcagtgtgacccgctgggaaaccgggaaaaatccgcccaatacaaagaaaaacttcggctacctgatgtggcgtaaacgtaactgtgtcttcctgtaa

SEQ ID NO: 486290 - DNA, 300 bp, Shigella sonnei
atgaatccgctgcagtatgtgccttttaaccagacgctgtatttcatcaatggcgatgatccggcgcaggtggcctggatgaaacgccagacgccgcccacactggagagcaaaattatcctcgtgcagggcagtatcccggagatgcagaagtctctggacagccgtgtttactttgaccagaacggtgtgctctgccagcgcctcggcattgatcaggtcccggcacgggtgagcgccgttcccggcgatcgcttcctgaaggtggaatttattccggcagaggagggcagaaaatga

SEQ ID NO: 486291 - DNA, 1902 bp, Shigella sonnei
atgtcaaccggattacgtttcacactggaagtggacggcctgccgccggacgcttttgcggtggtttcctttcatctgaaccagtcactctcttcgctcttttccctcgatctctccctggtcagccagcagtttctctcccttgaatttgcgcaggtgctggacaaaatggcctacctgacgatatggcagggcgatgaagtacagcgccgggtgaaaggcgtggtgacctggtttgaactcggggagaacgacaaaaaccagatgctgtacagcatgaaggtgcacccgccgctgtggcgtgccggtctgcgccagaacttccgtatcttccagaacgaggacatcaaaagcatcctcggcacgatgttgcaggaaaacggggtgaccgaatggagtccgctgttcagcgagccgcatccttcccgtgagttttgtgtccagtacggtgagactgattacgatttcctgtgccggatggcggcggaggaaggcatcttcttttatgaggagcatgcttacaaaagtaccgaccagagcctggtgctgtgcgacacagtccgccatctgcccgaatcttttgaaatcccatggaacccgaacacccgtaccgaggtgagcaccctctgcatcagccagttccgctacagcgcacaaatccgcccttcttccgtggtgaccaaagactacacctttaaacgccccggctgggccggacgttttgaacaggaaggccagcaccaggactaccagcgcacgcagtatgaagtgtatgactaccccggacgtttcaagggtgctcacgggcagaactttgcccgctggcagatggacggctggcgaaacaatgcagaaaccgcgcggggaatgagtcgctcgccggagatatggccgggacgacgaattgtgctgacggggcatccgcaggcgaacctgaaccgggaatggcaggtggtggcaagtgaactgcacggcgaacagccacaggcggtgccaggacggcagggagcggggacggcgctggagaaccattttgcggtgatcccggcagacagaacatggcgaccacagccgttgctgaaaccgctggtcgacggcccgcagagcgctgtcgtgacaggaccggcaggcgaggaaatcttctgcgacgaacatggtcgcgtgcgggtgaagttcaactgggaccgttataacccggcagaccaagacagttcgtgctggatccgtgtggcacaggcgtgggcaggcaccggttttggccacctggcgataccgcgtgtgggtcaggaagtgattgtagacttcctcaacggcgatccggaccagccgatcattatggggcgcacctaccaccaggaaaaccgcccccccggcagcctgccgggaacaaagacgcagatgaccatccgctccaaaacgtacatgggcagcggatttaatgagctgaagtttgatgatgcgacagggagagaacaggtctacatccacgcgcagaagaacatggataccgaagtgctcaacgaccgtaccaccaccgtaaaacacgatcaccgcgaaaccgtaaaaaatgaccagacggtcacgatccaggaaggtaaccgccttcttacggtggaaaaaggccacaagatcaccggagtactgaaagggtctttatctgaggatgtctttcaggacagaggcacgattgccggttcggtgcatgttgacgctgtaaacaatggtggcgaaggcgacggtatacaggcttatacggcgattaaggaaattttgctggccgtggaggaaagcaaaattgcgctgacgccggatagcattcagctacaggtcggggaatcgacggtaatcaggctgtcgaaggatggcatcaccatcgtgggcggttctgttttcatcaactga

SEQ ID NO: 486292 - DNA, 1383 bp, Shigella sonnei; identical to SEQ ID NO: 484367

SEQ ID NO: 486293 - DNA, 1125 bp, Shigella sonnei
atgtttcagaaaatcaaaattcgcaaaatgacaatcagccgggcgctggacaaatacctgaagacagtatccatccacaaaaaaggtcatctacaggagttttatcgcgtaaatgtgattaaacgtcaccctattgctgaacgctatatggatgacattaccactgttgatattgccaattatcgggatcaacggttggcgcaaattaacccccgaacggggcgtcaaataaccggaaacaccgtccgtcttgaacttgccctgttgtcatcattattcaatatcgcctgtgtggaatggggaacatgccgcatgaatcctgtcgaactggtcagaaaacccaaaatcagtagcgggcgcgatcgtcgcctgacttcaggagaagaacgccgactttcgcggtatttcaaagaaaaaaaccaggctctttacgtcatttttcatctggcgctggaaacagcaatgcgacaaggtgaaatcttgtcattgcgttgggaacacgtcgatctgcaacatggggtagctcatcttccaacaaccaaaaatggtgctccacgcgatgttccgctatccaggaaagcccgtagttacctgcaaatgctgccaatacagcttaacggtaatattttttcttatacatcttcgggattcaaaagtgcctggcgaacagcacttcaggaactgaagatagaaaacttgcattttcatgacctccgtcatgaggctatcagccgatttttcgaacttggtacattgaatgtcattgaagttgccgctatttcaggccatcgctccctgaacatgttgaaacgatacacacaccttcgggcttatcaacttgtcagtaaactcgatgcccgacgcaagcaaaccagcaaaatcgctccctattttgttccctacccggcaacggtcgagaacagaaacgggcaagtcgttgtgactctgagtgatttcgacctggaaacaagcgcagccacaaaagaacaggccatatttcatgccagcgtgttgctgctacgaacactggcacaagccgcccagcgaggagaacgcgtccctactcctggcgaacttcctacaaacattgatgaacgggtaatgatttgtccattaacaaattag

SEQ ID NO: 486294 - DNA, 654 bp, Shigella sonnei
atgatagaacaactacagagtgattttttattctggatatttatttacttcctgatagtaggtttgcttatcagaaacattcatcttaccagaaaaattaaatccatcgaaaaaaacaaaatgttcccagcggaggaatatgctgtcctggacattgaacagcatatgtccaataaatatattgggcggctagtaacccgttttatgaagagaactaatggtgcacctttgttaattgtgtttccagaatacgataaaggagacaacaatgaagacaaaaattctccaccattccaacttgtaaaactaacatccaacatcaacaatattaaagaaatttattccaatgatgacttaaactgttttctgaataatatttcggcacaaaaaaaattatatacaacgcactctggacctagccaggcatggattgaacatgcatatcctttgcaacaagtaactattctcttacaaggcactcgtcatagtgaaagggaagatataatcagtcaacttgagattattctttccagactaaaaaatggagaaaatacaggttttgagcatgacgatgattttggatattcatttcagtatgatgccgcagcagtaggaaaatcatcatttttcgatgaagcggcaggaaaaaaataa

SEQ ID NO: 486295 - DNA, 516 bp, Shigella sonnei
atgaaaatcttattaacaatatttatttatctgcttaccgcttttcagtctgcaaatgcaggtggaataccttatacatttaaccagaaaattcttcaggggaaagttattcgcgttctcgatggcgacaccatagaaattaaaacactacccgcaaaaattgttgtgtatgaagttccgatccgagtccgattgataaacatcgatgcccctgaaaagaaacaaccttttggacgctggtcaactagtcagcttaaaactctggttgcaggtaaacaggtgacagtctcttattcacataaagaccgctacggacgcattatcggtcatgtgttcacgacgaacggcacggatgccagccgctttatggttcagtctggcgctgcatgggtatatgaacgttacaacgtggatgagtcattaccggctctgcaacgggaagcgcaggaacaaaaacgcggtttgtgggccgatgcaaatccggttccaccgtgggagtggcgtattagaaattaa

SEQ ID NO: 486296 - DNA, 1677 bp, Shigella sonnei
atgtatgtaattaatcaacagacaagggacaataatattcttacgttgcatgatgtttttaaaatctatcaaaatacaggggggcttcgtcttgtaaaaacagaggagaatgaaaagtatatctccattatcatttgtggcgtttttcgtattagaaaaaacaaaaagaataacaaaatcactttgtggggatacaagctaagagataagcacactggggtatggaccagaagaaattcatttcctggtaagatttttttattctggtctaaaaaatctgcatacgacatggacgactggttaaaatatgcgattagctacatcatcaaatcattgattgaggctggatattcaattgaagacaaactctatttgttacgcattggagaggaagaggaaaacagtgagagtcgttatatttccacactatatccatccaatgtatattactcatatgagtatggaatacatgacattgttcattgccttggtaaaatagcatcattcaactacccctataatatacgatatatcagcagacatattttactcgcagagataaaaaacaaaatttatcagagagcattaaaaattataggggtggataatgaatttaatgcttcaaaagcattgagtaaagctatatggataatggtagataaaaagatatttgcacaatatgccagagcttcacattgttcgatagcttacaattcaattcgtcaggcattatttgaggactatctggatttttcaaagcgaatccatattgtgaatgatatggattttttcggattgtggcctatggttggtcgtctaagacaacaacataaaaatggtcagtttatactatctggaaagacaaaagagttatatgaaaaaatcagttttccctgcaaacttagttatggtgagttcagaagtttacgacatgttagtttgtcattagtatatgctttaaatgataaacatgataatgcatcattcagatttacagtcagattattacgccatccacttatcaagaactatcctgtgagagcaatttactggattatcgattatattagcattcgagcttacccagaaaaagaaaatgatatttatcgtatatgctcaaaatggctagaatatcatcgtgatttatttaaaaacattggcttttatgaccgtaatactgaatccaggcaaacatcacgctgggaaatggaaacgaatcagttgtgtcatgcaattgactggttgttagcagaagaacggttaattcataaaaaccaggagtggccttctttctggagactatctgatgaatggacgcgacaagtgaagaataacgttattcccgtaatcccaaaatggaaaggaactgggataaactggcagaaagttgataacggtgtaaatgaattaattacatttgatgctctgtgtcaggaaggtcaggagatggaacattgcgttgccagttatgcagactggtgtgcatctggagaatatattgcaatttcagtcctgatggataatgaaagagccactcttggactttcacgaaaagaacatgatttaacctatcagtttgaccagatgagaggtattcgtaatcaggctgtttccagaaacatgctaattaaaggcaggcatattttaaaaataatcaactcatcactaaaaagataa

SEQ ID NO: 486297 - DNA, 576 bp, Shigella sonnei
atgcaatatgcattgcttgatggatttgaacgaaagtttttgctggatgctcttgaattcggtgttctgaaggactggaaagaaaatccggtaaaagaacttcctgatattgatgaatctgctcaccccttccatgtctgttatggtggatatttattaaatcctggtgtttcagattcagatattagcagaaaaataaaagaccagacaggattctggctggcagctattgatgatacccgcatggattgtcattcaatagcttattatgatattcacacactccctctgatttcgtgtggtcatcaaaagatagttccttttgccgcgttaataaaagctgatgaatgcatcatttcaaaaatttcttcgtattctggttttgccgtaacagcctttttgagaattaaagaccaggatattgcaactaatatacttaaccgtgaggggatttttgcttttaatggctgtgaacgcagattcagacatccagtaagtgaagataactggcaacaggcagtatcagaagaacgtgctattcgttgtgccaaaagattaattcaatgtaaaggataa

SEQ ID NO: 486298 - DNA, 2157 bp, Shigella sonnei
atgaaactttttatcgcagaaaaacccgcagtagcgaatgatattgttaaggcgcttggtggcaattttacccgtcatgatggctggtttgaaagtgataatactattgtgactaactgttttggtcatattatcgaatcacagccccccgaaaactataatcctgaatacaaagagtggaagattgaaacactccctttgcgtctttatcccgtaaaataccagcctgtagaaagcgccgaaaaacaggttaaaacgattattgagcttatcaggcgtgctgatgtgaccgaaattattcatgctggcgatcctgatgacgaaggacagctacttgtcgatgaggtcctggaatatgcaggcaacacaaaacccgttaagcgcgttctgatcaacgacaacacccttccggctgtgaaaaaggcgctggcaaatcccaaaaataaccgtgacttcagaggactctatctcaaggctctggcgcgttctgtagccgacgcgatatacggtttatccatgacgcgtgcttacacaatcccggcaaaaactaaaggctataaaggtgttttgtctgtcggacgggtccagacacccgtgcttggcctgattgtaaatcgcacccgtgccaataaaaatcataaatccagcttctactacaccatgaccggacattttcaacgcggcgctgatgttatcagggcgaactggaaacctggtgagttcgcaccgctgacagaccgcaaattgcttgataaaacctgggcgaatggaacagcaacatcacttgcaggaaaaccagccacagttgaagcggcagcaacagatgataaaaaaacggctgcaccgttgccctttaacctggtacgacttcagcagtacatgaacaaaaaattcaaaatgactgctcaaaaaacgctggatatcacacagcagctacgcgaaaaatacaaagcaattacttacaaccgttcagattgttcatatctttcagacgaacaattcagtgaagcaccacaaataatcgatgccctgaagtcggtgtttgatcagccaatggatattgatacgacacgtaaaagcaaggcatttaacagcgcaaaagtaacagcgcatacagccatcatcccaaccgttagcgtaccggacgtaaacgcactgagcaccgacgaacgcaacgtttacctggcaattgcacaacactatcttgtccagttcatgcctgaaaaggcatatcaggaagtatccgtcgccattcagtgtggtgatgagtcgttttatgcccgtgccaggaaaactacagacagcggatttgaagcgtttcttggtgtggaaaatgccggggacgatgaagcagaagtcgaaaatgatgattccgcttttgatcttctctgtaaaattcgcacaggagaaacagtgacgacaaaagaagtggttgtgaatgagaagaaaacaacgccaccgccattattcaccgaagccactttacttgccgcgcttgttcgtgtcgcagattttgtcactgatccagtgattaaaaagttactgaaggataaagatcgggataaaaaagacgaacatggcggtattggtacgccagctacgcgggcttccatattggaaacactgaaaaaacggaactatatcaccctggaaaaaggaaaacttattccgacagataccgggtatgcgcttattgatgctctgccggatatagctgttaatccagatatgacggcattatgggcggaaaaacagacactcattgaaaacggagaaatgaccatcgaacagttcgttgacgaactgtacaatgatctgataccgatgatcagtaatgcgaacagtgctgaaataaaagtttcccccagcgcgccgtctggtcagtcacaacgcctgtcctctccttgtccttcctgtggtaaacagattgttatcaggccaaaaagctattcctgtacaggatgtgaatttaaaatctggaatgagttttctggcaagaaaatcacccaggcacaggccgaaaaacttattaaatcaggaaaaaccgatttgattaagggatttaaaaagaaaagcggtggaacgtatgatgcggttcttgtccttgaggataagaaaacagggaagctgggttttccggcaagggctaagaagtga

SEQ ID NO: 486299 - DNA, 207 bp, Shigella sonnei; identical to SEQ ID NO: 403783

SEQ ID NO: 486300 - DNA, 339 bp, Shigella sonnei; identical to SEQ ID NO: 31579

SEQ ID NO: 486301 - DNA, 207 bp, Shigella sonnei; identical to SEQ ID NO: 403785

SEQ ID NO: 486302 - DNA, 432 bp, Shigella sonnei; identical to SEQ ID NO: 221126

SEQ ID NO: 486303 - DNA, 441 bp, Shigella sonnei; identical to SEQ ID NO: 403788

SEQ ID NO: 486304 - DNA, 4260 bp, Shigella sonnei
atgattgtcagatacggtggtggtaatgatggtatcgttgattatctgataaatggtcgcaaagcagaacgccagtacacgcgtgatgaacttgatcatcgtgtcgttcttgatggtgatttacagactacagataagattattgattctattgaaaacaaaagtcaggaacgttatttgcacattactctgtcttttcatgaaagtcatgtgtcgaatgaagtgttaaaggctgttgttgatgattataaaaaattattgatgaatgcttatcatcctgatgaatactctttttatgcggaagctcatttgcctaaaattcgtcatatccaggataatagcactggtgaacttgttgaaagaaaaccacatattcatattgtaattcctaaagtaaatttgattactgaaaagttcctgaatccagtgggagatgttaccaaagggcatacaattgaacagcttgatgctatacaggaatttattaataataaatataatcttgatagccctaaagactatccgcgtaaagatgcggattacggaaaaattataagtagagttaagggggatctttacaaagagcatcactctgaattgaaaggtgagttgctttcgcgtatagagaacgagaaaattgaaaattactctgtattcaaagatattgttgcagagtatggtgaacttcgtataagaaatgctggtaaaaccaatgagtatctggctgtaaaattgcctggagataaaaaatacacaaacttaaaaagtcctctttttcgtcagaattacattgagacaaggacattaacacttgagaaaccaacacacaaagagatagaaaagagacttaatacctggttaaataaaacaagccatgagattaagcatatttttaaccaggcggagaaaacaagggaactttacaagacattaagcccttcacaacaaattgatttcctgcaagagaggataaaagaatatgactcaagagaaaaacttaacgaaagaaattctcagcaaacgtcaggacgagagggaggttacaagtcgtgtcctaaaaagtttgccagaatccgtcaatctgaagcaacagtcggattgtcacgtatgccccaacgcggtatggtttacggaatcaatggattcacaagacccgactctgtcagtgtattgtcagatatttcgcagcgtgatctggcagagcaattaccgcaaagagaacatcctggtcaggatgtgcgacgggattatgatagacaattcacagagtcaggaataaaaagtcttgaacgctcttcttttttgtgtgaaacgatgtttcagactctgaatgaggcggcagagaaaaacgaaattacaacgatggcagaaattcgcagaaatattgatcctgtcaggtttctgtcttctgccgccgagcgttttaatattattccagcgcagcataaaatcagaacagcaaaggacggttccccccggttttctgtggggaatcgtaatatgaacgcatctgattttctgacaaagcatattaatcttgcctggaaagatgcgaaatcctttctgcttgaagtttattcacagcagttagaaaacacgccatatacgcgctatccaacctacagacgccttacgcatcatgaagctcgtgagcgtcttaactcactgaatttatctgaaaaaacattacgaaatactatcaggtttgagcgtggcaagctgtataatgatctgcgagagatgagacgcgagttgaagttaataccacgtgaacagcgtgatattgccgtgggtgtgattgtttacaaaaaactaaccacacttgagcgtctttctgaactcgacacagatgggcgacacattattcgtcaatatcatgctgactggcataaggataaagatgaaatgaaagcccttgaacgtctcaaaagctatctcaacttcgatgaaatcaacgccatttctgctgacgaacccgaactttcgcttcagaaagcggtggattcccagcgccgcttagaagaggcgaaaaaggttaacaccaaactaaaagatcttgtgatggataagcaggattccaggattgtttatcgcgatcaggaatcggaaaagcctgtctttaccgacaaagggaactttgtcgttgcgggtaaaaatccctcaaaagaagagatcggaataatgcttgagtattccagggaaaagtttggtggtgtactcaaacttaccggctctgaagatttcaaaaaaatgtgcgctgaagttgccgcagagcaggacatgaagattattttacgcccggagcagtatcaacagatgatgctggaattaaaagcagaacttcagggtaataagtttgagcaggtggaaacacaggaaaatagccaggagtccgaatccagaatagagaaaggtgatgcattgaaggaacaggccaccgaacaggaacaggccaccgaacaggcacagaccacagagcaagcacaggccaccgagcaagcacaggccaccgagcaagcacaagtcgcggagcaagcacaggtcgcggagcaagcacaggtcgcggagcaagcacaggtcgcagagcaagcacaggtcgcagagcaggccacatcttcatatgatcctggtgttattaccagggcaaacaccctggattcacagatgcttagtaaaggcacaaatggtgaatttggctatttgaaatctctggatagcgatgaaaatgagatttgggaagtgctgggacatgtacctggagacagcgatgatatttttgacgttgccagttttgataatgaaaacgacgcaaaagaattttgcaaaattgtgaatgagttaggtattgacagaacacaggctctgattcaggagcagcttactactcaacacgatcaggctactgcgcaggtgcataataaacaggaaatttattgtataaactttagtcgcttccatgatttgaatgaaggtatcgtctttcattctaaagatgcggctattcagtgttatgaggaaagcaaatcttctgcaatagaaaaatatgaaagcaattatttaaatggtgatggttttgatactgttgtgcttatgtctaaaactgtctcaaccgatgaattatcctcttatccagagggggcattagtaacgtttgataggccatttgaaataattgccaattcatatgaagaataccgtactccagtgtatgcggtttctttttcgaaggatgagtttagtgaagatattaagacttttgagtcattgcacgacgcatctgaatataaaaataagatgcttcaggagcacgggcttaaccaggatgatatcttaatcacacctgtaacaagagaagaaatcgcctttaaaggaattaaggacgctgttaatgacgctaatatggcagtgatggaacaggcgggggattcgtccagagaatcaccagaagagatactcgccagtatttcagctaacgagcatatgatctccgggcttgaaaacttcctggttaaagaccgttctcagttcagttcctgcaatggggatatcgttgtggaggcggaaattaccaggggggaaggtggtctttatcgccttgcggtcgctggtaagcatggcttagagcgtggtgatgcagttgccagagtggatgttacggagcagcaatttgccgcgatcactggaaaaacaccttctgaagttttaacgggggaccaaacatcggctcgtgttccggtaattacaggtatccatttcagtacaagggctattgaaaatgtgaataaactggaacaacagaaggattatgtctatttctcaacacatgaaggtctgaatgctgaaataaaagatttcagctctctcaaggatgctattgagtggggccgggttgaatgcgagctacatgatctcaataagcgcgatactgtcatttatcgcgtcgagtctgaacatatttctcaggggattgacgctgtaatgaaaaatgctgaacgcgtggagcgtcatgaaattgagaaagcacagggacgggattgcacgccggaagacggcaagattcttgaggcaattgatcgctttgaggacaagttcagaggggaaggactgaagttcgaaagggagaaggccgaatccgatttgcttaatcacggattcactcgtgaaatggcagaagatgctcttggaaaacaatttgtccaggccagagaagatcatcaggaatcgcagcagcagcgtgacgattcacaggacatgcactaa

SEQ ID NO: 486305 - DNA, 342 bp, Shigella sonnei; identical to SEQ ID NO: 403790

SEQ ID NO: 486306 - DNA, 402 bp, Shigella sonnei; identical to SEQ ID NO: 221130

SEQ ID NO: 486307 - DNA, 753 bp, Shigella sonnei; identical to SEQ ID NO: 31802

SEQ ID NO: 486308 - DNA, 732 bp, Shigella sonnei
atgacgatgaacacggtgaataatatgagtacagttaatcagccagaattaaaacagcctgaaaaggctgtttccagtgaagatattgataattttattgttgatgtattcaaggagacagggcataaaatatctaaagatgatccagttatttcattgatttttctaaaccaaaagatacagaaaaaattcagcaatgagttacaagctaacttcacagccctgtctgaaggcttcagacaggtcgtttcatctgtagaaaatgactatattcaaagattcaaaaatatcgttgagacgtgcggcgatctggataatgaaataaaagaaaaagtagaagagggaaaaaacgatctaaaagaaacaagcgttgaggtaaaagaaaaattaacagatgatattattgaactcatatctggaattaaacgcaaccaggaaaaaaacaacaaattatatgaagaaaagttgaattcattatctaaggctgtaaagcccttcagtacaagaacagccattgcaatttgtgctctgtgcacattatgcctgtctgcggcattttctggcgcaacctggtatgttgcacaacatgaaaaagaggcaagcctgcgcttctatgcaagagcttttcttgatatgaaaaaaataactgaagagagcatgaggaaattaccaaaatcagaccagcaaaatataaaactcaaactagaagaaattgattcaagaaagccataa

SEQ ID NO: 486309 - DNA, 450 bp, Shigella sonnei
atgaccacttttaccagagaaaacgcggaaattaaatcattcatcactggtttcctgagcgacccggcgcacgataaccaatcttcaagcagtctgcttgccaatgtgtttcgtatcgcactggcatcgttggaagcagagccagtcgcgtggcgatatcgctacgtgaaaaaaggcgttacggactctcagggggagccgtgggttggtgactggaaatatgtaccgacaaaagaggattgcaacgacaggccgagctatgaaattcaggcgttattcactcccccgcctgtgccactgataccagaaggattgattaaagcagtgcgcttctatgaacaggttaagcgtgaaaatccgccagtcgaaaccggagcatggaaagacgctgttgactgggttctcgaagaggcttgtcaggctgtaaacattcgcatcaaaggagagtga

SEQ ID NO: 486310 - DNA, 264 bp, Shigella sonnei
atggcaactttaacaaaaaaagaacgggcatggttgaacgaattacaggacgttcttgatcgctgcccatcaccgaaaaaaattggtttttacaccattggcgataaaagcatttacctgtatgacctgcgccgcatggatgaaatcatggaggctcttgataatcgttcgtcaatggattggtgtgttgctgtccatgatatgaatgcagggtttgatgaaaagattttgttcccctcatcagttgaaagcacagcaggataa

SEQ ID NO: 486311 - DNA, 414 bp, Shigella sonnei
atgactacttttaccgacaaagaactgattaaagaaatcaaagagcgcataggcagcctggacgtccgagacaatattgagcgtcgggcttatgaaattgctctggcatcgctggaagcagaggcagttatgttctgtatatcaggacaaaatgtagattcagaagaacatgtatcaaccagcaaagcggttgttgatgcctgggttgaagaatggaatcaggttgacggaagtcctggcgaaccactgtacaaaactatgccactctactatcacgctgccttgccagcgccggtagtgccggatgaaatgtattggcaggatgcgccagttgaaggcagcagcaaagcggctgcatacgctacaggctggaacgcctgccgcgccgctatgcttcatgggaaaggagagtga

SEQ ID NO: 486312 - DNA, 516 bp, Shigella sonnei
atggcgttaacacaccacgaactctgtcagattgcgtacaagttccttaagcgcaacgggttcaaggtttgctttcatgaccgctttgttgctgtaaccagtaccggagaacagccagatgctatgggattcagaaattcagcatcatgcctgatagaggcgaagtgttctcgtgctgacttgttggcagatagaaaaaagcgtttccgtaaaaatccctcacttggcatgggcgactggcgattctttattagtgagccggaaattatttcagttgaggatttacctcccggctggggattacttcacgttgttaacggaagagtacggaaagtacatggatggcccaggggtaattgctgttggggtaatcctgacgataagccatttactgggaataagcaggttgaatgcgattacatgttatctgcattaaggcgcatggagctaagaggacaccttaatgaaatatatgacggtgtaattgttaataagaaagaaggaaacgcagcatga

SEQ ID NO: 486313 - DNA, 321 bp, Shigella sonnei
atgaccactttaaccgacaaagaactgattaaagaaatcagagagcgaatcggcagcctggacgtccgagacaatattgagcgtcgggcttatgaaattgctctggcatcactggaagcagaagcgccaaatttgcctggtggtttcacaattgaagaagcaaaagaattacacgaaaatctggtaaaaagtcacgtaagcaaggcattaagtggcgaaaaaatgaaaaaagaaaatcgtgatgccgatttacgctggattcatggcgtaatagttcaggctgcgtggtttgtgaaagcatcactagggcagaacgcatag

SEQ ID NO: 486314 - DNA, 438 bp, Shigella sonnei; identical to SEQ ID NO: 403795

SEQ ID NO: 486315 - DNA, 183 bp, Shigella sonnei; identical to SEQ ID NO: 22625

SEQ ID NO: 486316 - DNA, 444 bp, Shigella sonnei; identical to SEQ ID NO: 31799

SEQ ID NO: 486317 - DNA, 138 bp, Shigella sonnei
atgtcaacgcggcagatcgtacagcttgctgactcccttgtcaaaggctgggaaaccagaattccggcaatgacgtgcacggagtgggatcaattccggtggtggttaaactacctgcaagggtatgaaatgttttaa

SEQ ID NO: 486318 - DNA, 294 bp, Shigella sonnei
atgcttactgaagctaaaaaaatggcagtagagatgatattctggcctgcttgtcctgtagatgatgattattgtttcgacgctataatgtatacatcagttattgacaagaagtttgaagatgaacatggggtatatcttcatcaggtttacaaagaactatgctcaacacctgaattaaaaaaacttctaaaaaagaaagcaataaaattgattgcttttaagtacgatattgatcttgattcagctaacaagattttaatgaaaaatatgctaaggaggattgaaaactga

SEQ ID NO: 486319 - DNA, 375 bp, Shigella sonnei
atgaaaagtgtttatgttgttggcaaaggtttaatcgttgccggtaataaaattacaatcgatggaaaagagcatgtctcggtagaaaatagtgaaaacattgttatcactgatgattgtattaaaattggtaataaaacagtggtttttaaaggcaggagtattaagatagaaatacatggaaatgtaaataaaatagtaaccgaaaatgctgatgtcagtattcatgggaatgctggggatgttgaaaccgtgagtggtgatgttgattgtcgtcaggttaatggcgatataaccactgtaagtggtgatgttacttgtggcgatgtttctggtgacgtaaccactgtcagcggagatataaacaaaaaatga

SEQ ID NO: 486320 - DNA, 288 bp, Shigella sonnei
atgaaattcacttcaaccacgaatcatgttttcacattcgaacgagtaacgctttgcacgattgttcttattcataaggatacgggacaacagtatgttgtcatatttacggataacaataacattcgtgactataaaaccggaattgttcctcagtttggcaaacttaagcagagtgatattgatttagtccttttctacagggacgaatatgaaaaatattttgattcattaaaagatggcgatgaatgcttgagttttaaagattttattgagtgtctttgttaa

SEQ ID NO: 486321 - DNA, 360 bp, Shigella sonnei; identical to SEQ ID NO: 372517

SEQ ID NO: 486322 - DNA, 159 bp, Shigella sonnei
atgcctgaaattcagtatttatctacctttcccgctatattaactctctcaaggtcaaccgatatcaacgtacttctaccaacatatgttggtacagatgatggtatttccggttcgataatgcttgtaccaacagggagggaatacgcatggcattaa

SEQ ID NO: 486323 - DNA, 432 bp, Shigella sonnei
gtgattgcacagtactatgaattcctgcgccttggtcgtgaaggctataccaaagtacagaatgcttcctaccaggtcgctgcctatctggcggatgagatcgccaaactggggccgtatgagttcatctgtgccggtcgcccggacgaaggcatcccggcggtttgcttcaaactgaaagagggtgaagatccgggatacaccctgtacgacctctctgaacgtctgcgtctgcgcggctggcaggttccggccttcactctcggcggtgaagccaccgacatcgtggtgatgcgcattatgtgtcgtcgcggcttcgaaatggactttgctgaactgttgctggaagactacaaagcctccctgaaatatctcagcgatcacccgaaactgcagggtattgcccagcagaacagctttaaacatacctga

SEQ ID NO: 486324 - DNA, 435 bp, Shigella sonnei; identical to SEQ ID NO: 484502

SEQ ID NO: 486325 - DNA, 963 bp, Shigella sonnei
atgttggtattcattgatgatggttcaacaaacatcaagctacagtggcaggaaagcgacggaacaattaaacagcacattagcccgaacagcttcaaacgcgagtgggctgtctcttttggcgataaaaaggtctttaactacacactgaacggcgaacagtattcatttgatccaatcagtccggatgctgtagttacaaccaatatcgcatggcaatacagcgacgttaatgtcgttgcggtgcaccacgccttactgacaagcggtctgccggttagcgaagtggatattgtttgcacacttcctctgacagagtattacgacaggaataaccaacccaatacggaaaatattgagcgcaaaaaagcaaacttccggaaaaaaatcacattaaatggtggggatacattcataataaaagatgtaaaagttatgcctgaatctataccggcaggttatgaagttctacaagaacttgatgagttagattctttattaattatagatctcgggggcaccacattagatatttctcaggtaatgggaaaattatcaggtatcagcaaaatatacggagattcatctcttggtgtatctctggtcacatctgcagtaaaggatgccctttctcttgcgagaacaaaaggaagtagctatcttgctgacgatataattatccacagaaaagataacaactatctgaagcaacgaattaatgatgagaacaaaatatcaatcgtcaccgaagcaatgagtgaagcacttcgtaaacttgagcaacgtgtattaaatacgctcaatgaattttctggttatacgcatgttatggttataggcggtggcgcagaattaatatgcgatgcagtaaaaaaacacacacagattcgtgatgagcgtttttttaagaccaataactctcaatatgatttggttaacggtatgtatctcataggtaattaa

SEQ ID NO: 486326 - DNA, 354 bp, Shigella sonnei
atgatggacaagcgcagaaccattgccttcaaactaaatccagatgtaaatcaaacagataaaattgtttgtgatacactggacagtatcccgcaaggggaacgcagccgccttaaccgggccgcattgacggcaggtctggccttatacagacaagatcccaggacccctttccttttatgtgaactgctgacgaaagaaaccacattttcagatatcgtgaatatattgagatcgctatttccaaaagagatggctgattttaatccttcaacaaccactcaaccctcttcacaacaagagcaaaaaagtgatgaagagacaaaaaaaaacgcgatgaagttaataaactga

SEQ ID NO: 486327 - DNA, 513 bp, Shigella sonnei
atgaacataagtgtggaagatttgtttccggagtcatttcaacgaattaaagaagaagaagaagcgaacaggcctgatcctaactggtttgcacatttaccgcctgaaaaaatcaatgcgtatatgtccaagtatcctttcaaatcctttgatgatattcctctggacaacagtgggttgcaatacccttcactacaggaactggagttttattttcccccggcggccctggctgctaattgccatcaacttcctgagagaatgagacaaaagcctgtggtcacgatgattaatgggttaaccctgttaaggtcgcttggcgttcaggctttcaatatcgacccacgccgatggcacaaaattaaaacctatttaagtaaaggaacgattgaatatccacaaatgtccgaagacggaaaagtaattatagatggcaggcatagaatactacttattatgcagatttataaagtaactgatgttcccgttttttttctgaaaggaataagctga

SEQ ID NO: 486328 - DNA, 1536 bp, Shigella sonnei
atgagtgataatgaaggtagtgtaccgacagaaggtattgattacggggacacaatggttgtgtggccgtcaacaggacgaattccgggcggtgatgtgaaacccggaggctcatcaggtctcgctccatccatgcctccggggtggggggattacagcccacaaggtatcgcacttgtacaaagtgttctttttcctggaattattcgccggattattcttgataaggaacttgaagagggagactggtcgggatggtctgtcagtgtgcatagcccctggggaaacgagaaagtttccgctgcacgaacagttcttgaaaatggtttacgtggtggtttgccagaaccgtctcgcccggctgctgtttcttttgcccgtctggagcctgcttccggaaatgagcaaaaaattattcgtcttatggttacacagcaactggagcaggtaacggatattcctgccagccagttaccagcagcaggtaataatgtaccggtaaaatatcgtctgacggaccttatgcagaatggtacgcaatatatggctattatcggaggtattccgatgacagtgccagtagtggatgccgttccagttccggaccggagtcgtccgggaaccaatattaaagatgtttacagtgcccctgtatcaccaaatctaccggacctggtattaagtgtgggccagatgaatactccagttcggtctaatcccgaaatccaggaagatggcgttattactgagacagggaattatgttgaggctggttatacgatgtccagtaataatcatgatgtcattgtccgttttcctgaaggcagtggagtttctccgctatatatttcagccgtggagattctggacagtaatagtttaagccagcgccaggaagccgaaaataacgcaaaggatgacttcagagtcaagaaagaacaagaaaatgacgagaagacggtcctgacaaaaaccagcgaggtcatcattagtgtcggtgacaaagttggggaatatcttggagataaatacaaggcgctttcccgtgaaattgcagagaatataaataattttcagggaaaaacgattcgtagttatgatgatgcaatgtcttccattaataagttaatggctaaccccagccttaaaataaatgcaacggacaaagaagccattgtgaatgcgtggaaagcatttaatgctgaggatatggggaataaatttgctgcgttgggtaagacgttcaaagcagcagattatgcaataaaggcaaacaacatcagggagaagagtattgagggttaccagactggtaactgggggccattaatgctggaagtcgagtcctgggttatcagtgggatggcatctgctgtagctcttagtttgttttctttcacattaggctcggcccttatagcctttggtctttcggccacagttgttggttttgttggcgtagttattgcaggtgctattggtgcatttatcgatgataaatttgttgatgagttgaatcacaagatcataaaataa

SEQ ID NO: 486329 - DNA, 528 bp, Shigella sonnei
atgaccagcaataaagataagaacaagaaagcaaacgaaatattatatgcattttccataatcgggattattccattaatggctatattaatacttcgaataaataatccatattctcaagtgctgtactacttatataataaggtggcatttctcccttctattacatcattgtatgatcccgtcatgacaacacttatgtcaaactacaacaagacagcaccagttatgggtattctcgtttttctttgcacatataagacaagagaaatcataaagccagtaacaagaaaacttgttgtgcaatcctgtttctgggggcccgttttttatgccattctgatttatatcacactgttctataatctggaactaacaacagcaggtggtttttttaaattattatctcataatgtcatcactctgtttattttatattgctccatttactttactgttttaaccatgacatatgcgattttactgatgccattgcttgtcattaaatattttaaagggaggcagtaa

SEQ ID NO: 486330 - DNA, 816 bp, Shigella sonnei
atggaaaccttaactgttcatgcaccatcaccatcaactaacttaccaagttatggcaatggtgcattttctctttcagcaccgcatgttcctggtgctggccctcttttagtccaggttgtttatagttttttccagagtccaaacatgtgtcttcaggctttaactcaacttgaggattacatcaaaaaacatggggccagcaaccctctcacattgcagatcatatcgacaaatattggttacttctgtaacgccgaccgaaatctggttcttcaccctggaataagcgtttatgacgcttaccacttcgcaaaaccagcgccaagtcaatatgactatcgctcaatgaatatgaaacaaatgagcggtaatgtcactacaccaattgtggcgcttgctcactatttatggggtaatggcgctgaaaggagcgttaatatcgccaacattggtcttaaaatttcccctatgaaaattaatcagataaaagacattataaaatctggtgtagtaggtacattccctgtttctacaaagttcacacatgccactggtgattataatgttattaccggtgcatatcttggtaatatcacactgaaaacagaaggtactttaactatctctgccaatggctcctggacttacaatggcgttgttcgttcatatgatgataaatacgattttaacgccagcactcaccgtggcatcatcggagaatcgctcacaaggctcggggcgatgttttctggtaaagagtaccagatactgcttcctggtgaaattcacattaaagaaagtggtaagcgataa

SEQ ID NO: 486331 - DNA, 354 bp, Shigella sonnei
atgaaagtaattagcatgaaatttatttttattttaacgattattgctcttgctgctgtttttttctggtctgaagataaaggtccggcatgctatcaggtcagcgatgaacaggccagaacgtttgtaaaaaatgattacctgcaaagaatgagacgctgggacaacgatgttcaacttcttggtacagaaatcccgaaaatcacatgggaaaagattgagagaagtttaacagatgttgaagatgaaaaaacacttcttgtcccatttaaagctgaaggcccggagggtaagagaatgtattatggtatgtaccattgtgaggagggatatgttgaatatgcgaatgactaa

SEQ ID NO: 486332 - DNA, 2886 bp, Shigella sonnei; identical to SEQ ID NO: 25667

SEQ ID NO: 486333 - DNA, 624 bp, Shigella sonnei; identical to SEQ ID NO: 222196

SEQ ID NO: 486334 - DNA, 222 bp, Shigella sonnei
atgtcattaaagcatagtgatgaatttaagcgtgatgcagttcgcatagcactcactagtggcttaacacgccgtcaagttgcgtcagatttaagtattgggctttccacgcttgggaaatggatcgcatcaatttccgatgaaactaaaattcctacccaagacactgatcttctgcgtgagaatgaacgtttacgcaaagagaacggctttgttgaataa

SEQ ID NO: 486335 - DNA, 924 bp, Shigella sonnei
gtggcaaagcaaaagttcaaaatcaccaactggcccacctacaataaagccctcatcaaccgtggctccataactttctggctggatgatgaagctattcaggcctggtatgagtcagcaacaccttcttcacgaggcagacctcagcgctattctgaccttgccatcacgactgtgctggtcattaaacgcgtattcaggctgaccctgcgcgctgcgcagggctttattgattccattttttctctgatgaacgttccgctacgctgcccggattacagctgtgtcagcaggcgggcaaagtcggttaatgtcagtttcaaaacgcccacccggggtgaaatcgcacacctggtaattgattccaccgggctgaaggtcttcggtgaaggcgagtggaaagtcaaaaagcatggccaggaacgccgccgtatctggcgtaagctgcatctcgccgttgacagtaaaacacatgaaatcatctgcgctgacctgtcgctgaacaacgttacggactcagaggccttccccgggttaatccggcaaacccaccggaaaatcaggtcagccgccgccgatggcgcttacgatacccggctatgtcacgatgaactgcggcgtaagaaaatcagcgcgcttatccctccccgaaaaggtgcgggttactggcccggtgaatatgcagaccgtaaccgtgcagtggctaatcagcgaatgaccgggagtaatgcgcggtggaaatggacaacagattacaaccgtcgctcgatagcggaaacggcgatgtaccgggtaaaacagctgttcgggggttcactgacgctgcgtgactacgatggtcaggttgcggaggctatggccctggtacgagcgctgaacaaaatgacgaaagcaggtatgcctgaaagcgtgcgtattgcctga

SEQ ID NO: 486336 - DNA, 276 bp, Shigella sonnei; identical to SEQ ID NO: 484753

SEQ ID NO: 486337 - DNA, 1518 bp, Shigella sonnei; identical to SEQ ID NO: 485407

SEQ ID NO: 486338 - DNA, 231 bp, Shigella sonnei
atgacagtaagtattgtttcaccttccgcagcggctgtaaagccccgccgtcatccccgtttcagacgcgaagacatccccgcgccggaaattgaccccgtgctgaaagccttcgggcgacacatagcccggagttttcaccgggggcgtggtgtacacatccccgccatgaaaaacacggccttcgggcaggtgctccgcacactcgaactgaaacgcgcttttaactga

SEQ ID NO: 486339 - DNA, 1362 bp, Shigella sonnei
atgacattagcagccatcaccatgaccgccccggaagccgccagccctgtgcagatgtaccgcgcgacctactcaccggatgacaacaaactgcgcctgtatgccgcgtcacgcctcgacccggagacgtataaaaaagtgcatgatgccggttttcgctgggcacccaaacaggcgctgtttgtcgcgccagcctggacaccgggccgggaagacgtgctcctctcacttgccggagagattgaggatgaagacagcacgctcgctgaacgtcaggaagcacgggcggagcggtttaccggatacagcggaaagcgggccagtgaatccgcacaggcacttgatgaagtggaaagactggccgcgatgatcccgcccggtcagcccattcttgtggggcatcacagcgaacgccgcgcccgtcgtgatgcgcagcgtattgaaaacggcatgaaacgtgccgtgatgctctttgaacgtgcggaatactgggaagagcgggcgcggtcggcactgcttcacgcgaagtataaagaacgtccggacgttcgctggcgtcgtatcaaaaaaatcgaagctgatttgcgcaaggctgaaaagaccatcgcacagtcgcagaaatatctgacgatgtggcgggctgaatcgctggatctgaatatggcaaaactcatcagcagtcatgaccatatcagcgcctgtttcccgctggatacgtatccgcgcccggcagaaaaaagccagtatgaaggaagtcgatcgttatggtcggccctggatgatgacatcatcaccacggagcaggcccgcgaaattgcgatccgctgtcatgaacggcagatccagcgtcagcaacgctgggttaaccactatcagaaccgcctgatctatgagcgtaccatgctggacgaaagcggcggcgtggttacccggacacaggattttgagccgggcggacaggttttcagccggggcgagtggctgaccatcatccgtgtgaacaaaagcaacggggcggtgagttcagtcacaacgccaaattacagttttctcgggtacagcggcacgatgaaagtgacgcccgatcgcatcacggactacaaagcaccatcggcagaagaggctgccgtcgccagtcaggccgcgaagcgtccgccggtagtcaactatccgggggaaggtttccgggaaatgacaaaggcacagtgggccgccctgccccgggactgtaaggccgtgcgcagtgtggcagaagcagaagaccacggggcataccgctaccgccgcacaatggacaataatttccgcctggtgaatgtgtatatcaccgacatgaaaatcacggaaattccacagaaataa

SEQ ID NO: 486340 - DNA, 564 bp, Shigella sonnei
atgcacagtcagttaagagaacgtatccggctgatgcgcgcaaggctggataacgccgcgccggttgctgaaatccgggctgaatctcagctttttgtgactcctgccccggtctgtgatcgcctggtgatgctggcggagatcagcaaccgtgatcacattctggaaccctctgccggcaccggggccatactgagggcgattcgggataccgcgccgggggccatgtgtgatgcggtggaaatcaacagcgggctggtccggtatctgcgggaaaattttaacggtgtcagggttcagtgtggcgacttcatggaatggcagccggcgcagtattacagccgggttatcatgaatccgccgttcagccacgggcaggatatccggcatatcctgcgggccttttccctgttgcgtccgggtggcgtgctggtcgccgtctgtctcaacggaccacgccagcaggagaagctgttaccgttttctgacgtccgcgaggagctgccgcgcggcacgtttgcttataccgatgtcccgacgatgattattcgtctgcgtgcctga

SEQ ID NO: 486341 - DNA, 540 bp, Shigella sonnei
atggcagttcgtggaattaacaaggtcattcttgtcggtcgtctgggaaaagatccggaagtccgttacatccccaacgggggcgcagtggcaaacctgcaggtggccacgtcagaaagctggcgtgacaaacagacgggggagatgcgggagcagacagaatggcatcgcgtggtgctgttcggcaagctcgcggaagtggcaggtgaatatctgcgcaagggcgcgcaggtctacatcgaggggcaactccgaacccgtagctgggaagataacggtatcacccgttacgtcaccgaaattcttgttaagaccacgggcaccatgcagatgctgggacgtgccgcaggtgctcagactcagccggaagaggggcaacagttcagcggtcagcctcagccggaaccacaggcggaggccggtacgaaaaaaggtggcgcaaaaacgaaaggccgtggacgtaaggccgcgcagccggagcctcagccgcaattgccggagggtgacgattacgggttttcagacgatatcccgttctga

SEQ ID NO: 486342 - DNA, 1959 bp, Shigella sonnei
atgtcagttacagagtctaaggtaaaaacggagcgtaaatccagccgtaaacctgcaaaaacgcaggaaacagtcctgtcggccctgctggcggagacggctgaagtgagcgtgccgctggcctcgctgattaagtcaccgctgaatgtgcgcacggtgccgtattctgcggagtccgtcagcgaactggcagagtccattaagggcgtcggcctgctgcagaatctggtcgtgcataccctgcctggtgaccgttacggtgtcgccgcaggtggtcgccgactggctgcactcaacatgctggcagagcgtggcatccttacggctgactggcctgtacgcgtgaaggttattccgcaggaactggcgactgccgcatcaatgactgaaaacggtcatcgtcgggatatgcaccctgccgaacagattgccggattccgcgcaatggcgcaggaaggcaaaacacctgcgcagactggcgacctgctgggctattcaccccgccacgtccagcgaatgctgaaactggcagaccttgcacccgtcatccttgatgcgctggcagaagaccgcatcaccaccgaacactgtcaggcgctggcgctggagaacgacaccgcgcgtcaggtgcaggtgtttgaagccgcctgccagtcaggatggggcggtaaaccggatgtacagaccattcgtcgtctggtgaccgaaagtgaagtggcggtggctgggaacagtaaattccgcttcgtgggggctgatgccttctcgccagacgaactgcgcaccgatttgttcagcgacgacgagggtggctatgtggactgcgtggcgctcgatgccgccctgctggaaaaactccaggctgtcgctgaacaccttcgggaagccgaaggctgggaatggtgcgccgggcgcatggagcctgtcggtgagtgccgtgaggatgccggaacataccgctgtctgccggagccggaagcggtgctgacggaggcggaagacgaacgcctgaacgaactgatgacgcgttacgacgcgctggaaaaccagtgtgaggaatccgacctgctggaagcagaaatgaagctgatgcgctgcatggcgaaggtcagagcgtggacgccggagatgcgtgccggaagcggtgtggtggtgtcctggcgttacggtaatgtgtgtgtccagcgtggtgtgcagttgcgcagtgaagatgacgctgctgacgacgctgaccgcacggaacaggtgcaggagaaagcgtcagtggaggaaatcagtctgccgttgctgacgaaaatgtcctcagagcgcacgctggcagtccaggcggcactgatgcagcagccggacaaatctctggcactgctggcatggacgctctgcctgaatgtgtttggcagcggggcgtacagtaaaccagcacaaatcagcctggaatgtgaacattattcgctgaccagcgatgcgccatcggggaaggaaggtgccgcattcatggcgctgatggcagaaaaagcccgtcttgctgccctgttaccggagggatggtcacgggacatgacgacattcctgtcactcagtcaggaggtgctgttatccctgctcagtttctgcaccgcatgcagccttaacggtgtccagacccgtgtgtgtggtcacacgtcacgcagtccgcttgactcgctggaaagcgctatcggattccacatgcgcgactggtggcagccgacaaaagcaaacttcttcggacacctgaaaaagccgcagattatcacagccctgaatgaggcaggactgtccggtgccgcacgggacgcggagaagatgaagaaaggtgatgcggctgaacatgcagagcaccatatgaaagacaaccgctgggttccaggctggatgtgtgcaccacatccacagacagatgccactgaacgcaccgataacctggctgatgccgtctga

SEQ ID NO: 486343 - DNA, 720 bp, Shigella sonnei
atgagcgcacgttcacaggcactggttcctctcagcacagagcaacaggccgcatggcgggcggtggcggagaccgaaaaacgccgccatcagggtaacacgctggctgaatatccgtatgcgggtgcgtttttccgctgtctgaacggaagccgcaggatatcgctgtctgacctgcgatttttcatgccgtccctgaccgcagaagaactgcacggcaaccgtcttcagtggctgtatgccatcgatgtgctgattgaaacacagggcgaggtctgcctccttccccttcccggtgatgcagcagtgcgcttgttcccgtcggtgcggtttcgtgtcagggaacgcagtcgccataaatccgcgctggtcatgcagaagtacagccgccagcaggcgagggaggcagagcagaaagcccgtgcgtaccaggcgctggtcgctcaggctgaaatcgaactggcattccattcgccggaaacagtcggaagctggcatgcacgctggagtgaccgggtggcagagcatgacctggaaaccctgttctggcagtggggcgagcgttttccgtcactggccggaatggaacgctggcagtggcaggatatgccgttctggcaggttattgcggaagccagtcttgcagcaagagaggccggtcacgctgtccgtgagatggagcggtggatggtgccgaacaaactccgggaggcagcgtga

SEQ ID NO: 486344 - DNA, 213 bp, Shigella sonnei; identical to SEQ ID NO: 5358

SEQ ID NO: 486345 - DNA, 288 bp, Shigella sonnei; identical to SEQ ID NO: 5261

SEQ ID NO: 486346 - DNA, 363 bp, Shigella sonnei
atgattgaacaatttttcaggcccgactctgtcgaacaggcgctggaactgaagcgccgctaccaggatgaagccgtctggttcgccgggggcagcaaactcaatgctacaccaacccgtaccgataaaaagattgccatttccttacaggatctggaactggactgggttgactgggataacggtgcactgcggattggtgcaatgtctcgcttgcagccactgcgtgatgcgcgctttattcctgcagcactgcgtgaagccctcggttttgtttactcacgccatgttcgtaatcagtcgaccattggtggtgaaacgtcgcccggcaggaagagtcagtgctgcttcccgtcctgctag

SEQ ID NO: 486347 - DNA, 2292 bp, Shigella sonnei
atgaacgtagaagtgaaggacggcaagattgtttcttcaacaggcgcgctggcgaaaaccataccgaattccttacagtctacggcggcggatcaggtacacaccacgacgcgtattcagcatccgatggtgagaaaaagctatctcgataatccactgcaaccgacgaaaggtcgtggcgaagatacctatgtacaggtgagctgggaacaagcattaaaactgattcatgagcaacacgatcgcattcgcaaagctaacggaccatcggctatttttgccggatcatacggctggcgctcttctggcgtgttgcataaagcgcaaaccttactgcaacgttatatgaacctggcgggcggttattccgggcatagcggcgattattcaaccggggcggcacaggtgatcatgccgcatgtggtcggttctgtagaggtgtatgaacagcagacctcctggccgctgattctggaaaacagccaggttgtggtgctgtgggggatgaacccgctgaataccttaaaaattgcctggagcagtaccgatgagcaagggctggaatacttccatcagctgaaaaaatctggcaaaccagtgattgccattgatcctatccgctccgaaaccatcgacttctttggcgataatgccacctggatcgcgccgaatatgggcaccgacgtggcactgatgttagggattgcgcataccctgatgacacaaggcaaacacgataaagtgttccttgaaaaatacactaccgggtatccgcagtttgaagagtatctgagaggtaagagcgataatacgccgaagagcgcggcctgggcggcggaaattactggcgtaccggaagcgcagatagtcaaactcgctgaactgatggcggcgaatcgcacaatgctgatggcaggctggggaattcagcgccagcaatatggtgaacagaaacactggatgctggtgacgctggcggcgatgttagggcagattggtacaccgggcggcggttttggtttctcttatcattactccaatggtggcaacccgacacgtgttggcggcgtgctgccggaaatgtctgcggcgattgccggacaggccagcgaggccgctgatgatggcggaatgagggcgattcctgttgcccgtatcgtcgatgcgctggaaaatcctggcggcaaatatcagcataacggtaaagagcaaacgtatccgaatatcaaaatgatctggtgggcgggtggcggtaactttacccatcaccaggatactaatcgtctgattaaagcatggcagaaaccggagatgatcgtcgtttctgaatgctactggaccgcagctgctaaacacgcagatatcgtattaccgatcaccacatcgtttgagcgcaatgacttgacgatgaccggtgattacagcaaccagcatattgtgccgatgaagcaggctgttgctccgcaatttgaagcgcgaaacgattttgatgtgtttgccgatcttgcggaattactcaaacctggcggaaaagagatctataccgaaggtaaagatgaaatggcgtggctgaaatttttctatgatgccgctcagaaaggggcccgtgcgcaacgcgtcactatgccaatgtttaatgccttctggcagcaaaataaactgatcgaaatgcgccgcagcgagaagaacgaacagtacgttcgttatggtgatttccgcgccgatccggtgaaaaatgcgctgggtacgccaagtggcaaaattgagatttactccaaaacgctggaaaaatttggctataaggattgcccggcacacccaacctggcttgcgcctgatgagtggaagggtaccgccgacgagaagcagttgcagcttctgaccgcacatccggcacaccgtttacacagtcagcttaactatgcggaactgcgtaaaaaatatgcggttgccgatcgtgaaccgatcactattcacaccgaagatgctgctcgatttagtattgcgaatggcgatctggtgcgtgtctggaacaaacgtggtcagattttgacaggcgcggtggtgactgacgggatcaaaaaaggcgtggtatgcgtgcatgaaggtgcatggccagatctggaaaacggcttgtgtaaaaacggcagtgcgaacgtgttaacggcggatatccccagctcgcagctggcaaatgcctgtgccggtaactctgcgctggtgtatatcgaaaaatatacgggtaacgcaccgaagttaacggcatttgataagcctgctgttcaggcgtaa

SEQ ID NO: 486348 - DNA, 552 bp, Shigella sonnei; identical to SEQ ID NO: 485858

SEQ ID NO: 486349 - DNA, 381 bp, Shigella sonnei; identical to SEQ ID NO: 35582

SEQ ID NO: 486350 - DNA, 414 bp, Shigella sonnei
atggcatttaatgccccctttgccgtgtcgcagaacagtgccgatgcctcttatttacagcagatggcgctgtcatttattgccctccgtctgaatgtttcatcagaaaccgtcgatgcctcacatcaggcgcttctgcaatatatccgcccgggcgcacagaaccagatgaaagttattctggctgaagaagcgaagcgtattaaaaacgataacgtgaactcagcctttttccagaccagtgttcgtgtctggcctcagtatggccgtgtggaaattcgaggtgtgcttaaaacctggattggtgattcaaaacctttcactgatatcaaacattacatccttattctgaagcgggaaaacggggtgacctggctggataatttcggggaaacagacgatgagaaaaaataa

SEQ ID NO: 486351 - DNA, 729 bp, Shigella sonnei
atgagaaaaaataatacggcaataatattcggcagcctgtttttttcctgcagcgtgatggccgcaaacggtacgctggcccccaccgtggtgccaatggtgaacggtggtcaggccagtattgccatcagcaataccagcccgaatctgtttaccgttcccggtgaccggattatcgccgtgaacagtctggatggtgccctgaccaataatgagcagaccgcctccggcggtgtggtggtggccaccgtcaacaaaaagccctttacgttcattctggaaacagaacgtggtctgaatctttccattcaggccgttccccgtgaaggcgcggggcgtaccattcagctggtcagtgacctgcgcggaaccggagaagaagccggtgcgtgggaaacgtccacgccttacgaatccctgcttgtgaccatcagccaggccgtccgtggcggaaaattacccgctggctggtatcaggtcccggtgacaaaagaaaccctgcagaccccggcggggctgtcttcagtggcagatgcagtatggatggggaatcacctgaagatggtccgctttaccgtggaaaataaaacgctgtctgccctgaatatccgggaaagtgatttctggcagccgggaacccgtgccgtgatgttcagccagcctgccagccagttactggcaggtgcgcgcatggatgtgtatgtcatccgtgacggggagggcaactga

SEQ ID NO: 486352 - DNA, 1428 bp, Shigella sonnei
atggccagtatcaataccattgtgaaacgcaagcagtacctgtggctggggattgtggttgtcggtgcagcctccgcgattggtggggcactgtatctgtctgatgtggacatgtccggtaacggtgaaaccgtggctgaacaggagcctgtgccggatatgaccggtgtggtggatacgacctttgatgacaaggtgcgtcagcatgccaccacagagatgcaggtgacggcagcacagatgcagaagcagtatgaggaaatccgtcgtgagctggatgtcctgaacaaacagcgcggtgatgaccagcgtcgtattgaaaagctgggacaggacaatgctgcactggcagagcaggtgaaagccctgggtgcaaatcctgtcaccgcgaccggtgagccagtaccgcagacgccagcctcaccgcccggcccggaaggcgaaccacagccaggaaacacacccgtatctttcccgccgcagggcagcgttgctgttccaccgccgacggcgttttatcccgggaatggtgtcacgccaccaccgcaggtgacgtaccagtctgtaccggtgcctaaccggatacagcgtaaggtgttcacccgtaatgagggaaaacagggaccatcactgccgtacattccgtcaggaagttttgcgaaagccatgctgattgaaggggctgatgccaatgcctcagtcaccggtaatgaatccacggtgccgatgcagttgcgtatcaccggcctggtggaaatgccgaacagcaagacgtatgacgcaacgggatgttttgtgggtctggaagcctggggggatgtctccagtgagcgtgccattgtacgtacccgcaatatcagctgcctgaaggacggcaaaacaattgatatgccgattaaggggcatgtcagcttccggggtaaaaacggtatcaagggcgaagtggtgatgcgtaacggcaaaatcctcggctgggcatggggcgcgggatttgttgatggtatcggtcagggaatggagcgcgcctcccagccggctgtcgggctgggtgccacagccgcttacggggctggtgatgtcctgaaaatgggtatcggtggcggcgcatcgaaagccgcacagacgctcagtgactactacatcaaacgtgccgaacagtatcacccggtgataccgattggtgcgggcaacgaagtgaccgtggtgttccaggacggcttccagctgaaaaccgtggaagagatggcgctggaacgcacgcagagcagagcggaagaagacaatccggaaagtccggttcctgttccgccatcggctgaaagtcatcttaacggctttaatactgaccagatgctgaagcagctgggcaacctgaatccgcagcagtttatgtccggcagccagggagggagcaacgatggcaaataa

SEQ ID NO: 486353 - DNA, 591 bp, Shigella sonnei
atggcaaataatatgtcgtcccgtcaggcgtgccatgccgcccggtatgttgtcgcccgggttctgcgaggactgttctggtgtctgaagtacaccgtcattctgccactggccacaatggccctgatggctctgtttgttttatggaaggacaacaccacgccggggaaattactggttaaggagattaacttcgtaagacaaacagcacctgccggacagttcccggtcagtgaatgctggttttcttcctctgattcttcaggcagatcagaaatacaggatatctgccattaccgcgcggctgatgctgcagaatatgccagggagactgaccagtctctgatgcaactgttcaccgcattatgggcaacgctggcactgatgtatgtctcgctggcggtgatctccagaaaatatccgatgcgacccggaaaaatgaaatgtgtccgggtcgcaactgcagatgaacatctgaaggaagttcttacggaagatgcttccctgccggaaaaaatcaggaaatgccatgtttatttccctgatgaccgaacaaacagaagcaacggagataaaaatgaacatgcgtaa

SEQ ID NO: 486354 - DNA, 369 bp, Shigella sonnei
atgtttatttccctgatgaccgaacaaacagaagcaacggagataaaaatgaacatgcgtaatattaatattattactgcacgctctgtaccggataaaagcgtatcagatgattttatgaatgctgttctcagtaactgcaccacaagaatcgtacttcctgcactgaaggaattcggttctgaatcattgccgcacaattttaatatggcagctgtcggtgtgatgaagaagggtatgtcgatgagtttattttcttctccggggcatattgtggttgccggacaatccggtggcggaaaatctgttccggtgaaagaactaatcgacagaattattcagaaatataaggagcccttcgatgaataa

SEQ ID NO: 486355 - DNA, 252 bp, Shigella sonnei; identical to SEQ ID NO: 5331

SEQ ID NO: 486356 - DNA, 516 bp, Shigella sonnei
atgaaacagatttctttctttattcctctgctggggaccttattactttccggctgtgccggaaccagtacggaatttgagtgtaacgccaccacatccgatacctgtatgacgatggagcaggccaatgagaaggccaaaaaactggagcagtcctcagaagcaaagccggttgcggcatcactgccgcgcctggctgaagggaacttccggacaatgccggtgcagaccgtcaccgcgaccactccgtccggcagcagacctgcggtgacagcacatccggagcagaaactgctggcacctcgcccgctgtttaccgctgcccgggaagtgaaaacggttgttccggtcagttcagttacgccggtaacacctccccgtccgctaagaacgggtgagcagacggcagcattatggatagcgccttatattgataaccaggatgtttatcatcagccatccagcgtgttttttgttattaaaccgtctgcgtggggaaaaccacgtattaattaa

SEQ ID NO: 486357 - DNA, 414 bp, Shigella sonnei
atgcataaatcagaaaatgaaaaaatagattttattctggatgagcatgagcggatattcagaaaacagggttctttgtgtatggcactgggtaagggctttttagttatagctattctttgtggtgttgccacattctgtgtttctggcctgtatctgaaatccctgtgcctgtctgttgcctgctgttgtggggtattcagtcgtatttttaattattacagcgtaccggaggaatcacgcatggtactcagtcgtcaggaattactccggcttatgcgtctgactgaagacgtaccagatgtgagacaggaactgcttaaccgtttgttgtccggtaaaaaactgactggtcgggatgaacaggatatccggcgtctctggcaggaaacgcagaggaaacactatgcataa

SEQ ID NO: 486358 - DNA, 474 bp, Shigella sonnei
atgcataaatcagaagctgaaaaaatagattctattctggatgaacatcaacagatatatcgcagacataaccgaatagataacatcctggcgtattgtgcgtgtattgcatggattccctgtattattgctgcgttcggcgttgatggtatatatctgaaaatcctgtttgcggtccttgcctgctgtggtgcggtatgcttttttattttcttcttcaccctcctgccggaatcactcatggtcctcagccgtcagagcctgcttcagcttatgcgtctgactgaagacgtaccggatgcgagacaggaactgcttaaccgtctgctgtccggtaaaaaactgactggtcgggatgaaaaggatatccggcgtctctggcaggagaaagtggatgcaatgcaggagtctgccacccgtcagcgtgaacaggataccatccggaagtttaccgaagagagtaaatccgaatga

SEQ ID NO: 486359 - DNA, 159 bp, Shigella sonnei
atgcatacctttatttttcttgtgctgataaaaaatattaacggtggcggaagctggaatgttaccccccatgccaaatacggatgtatgcgtgcaggttcttcggataatcgaagcacacggaggcaggggctttggaaatacaggggagtgtattga

SEQ ID NO: 486360 - DNA, 312 bp, Shigella sonnei; identical to SEQ ID NO: 30383

SEQ ID NO: 486361 - DNA, 363 bp, Shigella sonnei
atgaagtcgatagatttaaaatctgttctggcttttatatttgttggcgttatggctatgttgatatgtggtcttttttacaatgattaccttgagcaacaacctgcaacaccagaacaactgacagagattatacaggataccccctgtgcagcagaagcatttaaggaagctattaagtctgacacatctgattatcagcctgaacctttaagtcttggtaaggcaaaagagcttgcatcagcgtgtagagaaagaaacgaaatggcagaggtgaaacgggtaagagaaaatgagcgcaataagattcgcgaaaaacaaattcaggcattaaatgatgctcattcagtaaaggaacgttaa

SEQ ID NO: 486362 - DNA, 489 bp, Shigella sonnei
atggcgcagggtcaggggcagattcatcccctccggcagcggaaactgtgtcgctgccgcgttcatataataggcacgggtaatggcgttaaaccgttcagcctgttcaccggaccaggagaactcacgcagcccgtattcaattctgtcaccaacaagctgactggacatcagatggatgcagaacggcactccgcgcggcagtttggtgcgcagcatgtggtcgagcgcctccacaatagactcattcgccccattgatgggaatggcttccagcataaagcccatcgtggtgtcattcatgaacagaccggattcctggttataatcacggtacggcagcagacggctgaactgcgggaagctcatttcgcccagaacttcattggcctttgcggattcgtcaggcagtttcagtgctgtgacgagggagttaaccgcctgagtgacggcatcaagtgggttattactcatatgagtattccttag

SEQ ID NO: 486363 - DNA, 381 bp, Shigella sonnei
gtgagttttcacctggtcttccaccaccagagtcagcgtcaggatgaacggacaggagatggacagttccgggttcagcaggttgctgtagttgtcggccatgttccacaggaaggcgatttccgggttacgggccagatggaaattcaggatgcgggccgtgctgttcctgccgttctcacgcaggcccagcgtcaggtaatccgcccggactttcaggtcaaaactgtcctccacacactgataattcagatcagaatacgggtccagctgacgtcttttcggatacagggagtccgggttatggttaatcatctccccgacaatatcgataaaggcctgtgcatccaccgcctgtgtggtgatactggccccctgtaa

SEQ ID NO: 486364 - DNA, 3132 bp, Shigella sonnei
atgtttagtaaactgtttaaaagcgtgagcagtctggttgatagtgagctcagacataatttacgtacaaattctgaatatcaaaaatatcgctggaatatttttgaacgcctgctggcctggtgttcgacatactatgggcaggctatgctgattctctgggctggtgcaataatgattgttcttgcctgtttgtatctgaggccggttctggccccatttggcaagaagtattttaaaggaattgaaatgctcccgcaggggctctccgatctgttggggggacaattaaccatcattggtattgtatttccattggttgttggtctgatcagtgtcctgtttcagaaaaaatcgacccgtgagcatatccagtcagcctatcagctttactcgggatacatgtttgcaggcctgagcggtctttctcttgctgcatttattctggtgagtgaacttttgtctgcccggggggataaataccttgatatttgccttgttgtagtggcaataatctggatgatcatgaatattggtttgtctatctggttttttattcagagcctgaatgttctggatgatcgccggcgtgatcgaattatgcttaagtattttatttcaaaagtcgtggcgcaacatatcagaacagcaatggtaaaaaactggttggctcttcctgggagatatattaaccaaatgggacggctgaatgtatctgttgatgtttatgattcaccggagaaggaaaagtctgatcttctgaagttaaaacttaaaatggatgaatgtgtgagagatatctatacacttccattattgcttctcctcaggagattaaaacctgtcgaaacgggacctgcaagaatcagagtcttacccgggtgggggatacataacagcgaagtggttattctggctacaaccggtatcagatataatgctatctgggagaagctgttcaagctctgttttatccgtggaagcaaatgggaaaaaacaaattttttaaatttcaccagaggtttttatggggaaatttatgatgctctggatgaacgaaatctgggggcgtttgaggaagctgcagacagacttgtttcgacctttattacactgaaaagatgtttccagtatggtgataaaaattatattgatgatgtatccatttcattttttccacaaagtttaagccagtcttttcataatgatttctaccgtcttgcagaagaagtggtgaaaacactggataccacatctacgtattttcgaaagatcatacatcttcctcagtctttttaccggtatcggggagaagacagaaccggagagttgcaacaggctcttcagtcccagtgtgatatctggcagatactgattgactggaatgttggaaacaaggcgttatcagtgaaccagaagcaacgttatgttgcaatgctgcaacattttattggcgagtgggaaagctggcatatgtggttgcgtctgacgtttaagaataatgttgatactgctggctatactgaggcccttgtatcacatttgtttcgctctatggaaatgcttattacagcaataacatctgatgatattgatgccactgatctgagtactgatatgtttatgctgtggcttaatcaggggcagtttcataatcattatcacgaagaatatctgtggcacagccttttccttacgccagattttttattgcactctgtttcagacaactgtcagtcctgcatattgaggggggcatcgtataacgaaaaagccgcattatccctgacaatgcgtaatgtgatgactgatctccgcctgttcctgtcagcttatatggtgaggtatctgggacaacaaaaaaatgtcaatttgctcactatcatcaaacggttactgtctccttcactggtcgcccaaactggggcatataatacactaccttcggcaatagtaggtcagactgatattattgatgttatattacgtctcactttctgccatgcagacgagcacagtaactggttttcacgtttgtctcatatggtggagaggctcaccagaaacaacaaaggccaggttatttccgggcggatttatatgagtagtgttgatgatttaaacacactatactctgcatttgctgatatagcggtaatgctgtctgtatctgaacaacgtatcagccagaaagtggttactgcaatcggtgaagggattttttcattttctgataaaaaaaatattgtttatacgctgaaatctctgctgaaaaacacgacagacgtagcaggcaattttctgatgacatctgaggagtacgctacgcgagttgtaatttttaacagtacactggacatgtacatatccgcttttgaagaaagcattaagtcagatattataaaagcaaaagaagatatcgatcttttcagaaggattgatatgaacatatctcaaaatatcattgatgacattaagaaagatcatcttctttctctgtttgagtttacacctgatactggaatttcagaacgctgggaaaaacaatggattaatattggcattgataaggaaagtgtggcaaagaaacttggatgtacaattgatccgacattttttccctcaacaacaattgcagacaaaatacttaatacagttcaccggaaactctttattaatcgcggtcagttgagtgaggatataggcaatctggatgaactttttcataaagtaaaaatttttatgaaaaaagaagaagattgcactctcattgtgtatggtgattgtttttccaggaaattatacgaacttgaatattgcactgataaacataatgaacttggcataaaaagagtaagtaaaccagaaaagggatatcagccacatgttcttcaatatatgattggcaactgtacaatatatttcgttccggactgtcaggataattactcattactggtacggaattcatcttttggccgtttacgtctgttccgttatcctgatgatacgatgttctgcacgttctgccgggaagatgcagatgattcgcttaaaagtattatgacccatctctgggagctggatgcagagatgacagatcctgtcatagctatgtttaatcacgtctga

SEQ ID NO: 486365 - DNA, 978 bp, Shigella sonnei; identical to SEQ ID NO: 35489

SEQ ID NO: 486366 - DNA, 300 bp, Shigella sonnei
atgagttatgaagtagaatggcgaccaggtgcgattgaggatataacggcgttgtttgaatatctggccgagaatgcatctctttgggatgcaaggaacgtgacagagcgtctgatctctgcaaccgatcacctggcagattatcctcggctgtatgaaactgatgaacgctatggcgaaagggttcgccgcattagcttacttggacagcacgttctttatgaagtgaatgatgaggccagtcgtgtcaatatcctggcggttgtaggccagcgtcagaatccccgattcattctttga

SEQ ID NO: 486367 - DNA, 264 bp, Shigella sonnei
atgaataacagcacacattacgaaaacgccaatttcctgcgcgagctggccgaaaacctgcctcgtattttgccagaaagcagcacagacaagtctgcactattgcaacgcctcgctaatgaagaattggcacgtgcggaatacgacgaacagatacgaacgaaagttgccgctgctcgcgccgataagcggccggggatgagttccacgcaactgcgccagcaactacagggacgttatcaggaactgtgcaatgagttatga

SEQ ID NO: 486368 - DNA, 1221 bp, Shigella sonnei; identical to SEQ ID NO: 485591

SEQ ID NO: 486369 - DNA, 417 bp, Shigella sonnei; identical to SEQ ID NO: 10349

SEQ ID NO: 486370 - DNA, 594 bp, Shigella sonnei; identical to SEQ ID NO: 10350

SEQ ID NO: 486371 - DNA, 1206 bp, Shigella sonnei; identical to SEQ ID NO: 10351

SEQ ID NO: 486372 - DNA, 624 bp, Shigella sonnei; identical to SEQ ID NO: 10352

SEQ ID NO: 486373 - DNA, 624 bp, Shigella sonnei; identical to SEQ ID NO: 10353

SEQ ID NO: 486374 - DNA, 387 bp, Shigella sonnei; identical to SEQ ID NO: 10354

SEQ ID NO: 486375 - DNA, 321 bp, Shigella sonnei; identical to SEQ ID NO: 67344

SEQ ID NO: 486376 - DNA, 1206 bp, Shigella sonnei; identical to SEQ ID NO: 19666

SEQ ID NO: 486377 - DNA, 126 bp, Shigella sonnei; identical to SEQ ID NO: 19667

SEQ ID NO: 486378 - DNA, 327 bp, Shigella sonnei; identical to SEQ ID NO: 486130

SEQ ID NO: 486379 - DNA, 2952 bp, Shigella sonnei
gtggtgaaaaaggaacacgcggacggcagcgtcacgcagagtcagtttgacgccgtgggcaggctcaggacacagacggatgccgcaggccggacaacagaatacagcccggatgtggtgacgggcctcatcacgcgcatcaccacgccggatggcagggcatcggcgttttactataaccaccacagccagttaacgtcagccaccgggcctgacgggctggaaatgcgccgcaaatatgatgaatccggccgtctgattcaggaaaccgcccctgacggcgatatcacccgctaccgttatgataatccacacagtgacttaccctgcgcaacggaagatgccaccggcagccggaaaaccatgacatggagccgttacggtcagttgctgaccgtcactgactgttccggttatgtaacccgttatgaccatgaccgttttggtcaggtgacggcggtgcaccgcgaggaagggctgagccagtaccgcgcatacgacagccgtggacagttaattgcggtgaaagacacgcagggccatgaaatgcggtatgaatacaacgccgccggtgacctgaccgccgtcattgccccggacggcagcagaaacgggacacagtacgatgcgtggggaaaagccatctgtaccacgcagggcgggctgacgcgcagtatggaatacgatgctgccggacgggtcatccgtctgaccagtgaaaacggcagccacaccaccttccgttacgatgtactcgaccggctgatacaggaaaccggctttgacggccgcacacagcgttatcaccacgacctgaccggcaaacttatccgcagcgaggatgaggggctggtcacccactggcactatgacgaagcagaccgcctcacgcaccgcaccgtgaagggtgaaaccgcagagcggtggcggtacgacgaacgcggctggctgacagacatcagccatctcagcgaagggcaccgggtgacggtgcattacgggtatgatgagaaaggccggctgaccggtgagcgtcagacggtgcatcacccgcagacggaagcactgctctggcagcatgagaccagacatgcgtacaacgcgcaggggctggcgaaccgctgtataccggacagcctgtccgccgtggaatggctgacctacggcagcggctggctgtcaggcatgaaactcggcgacacaccgctggtggagtacacccgcgaccgcctgcaccgggaaacgctgcgcagcttcggccgttatgaactcaccatcgcttatacccctgccgggcagttacagagccagcacctgaacagcctgctgtctgaccgcgattacacctggaacgacaacggcgaactcatccgcatcagcagcccgcgccagacccggagttacagctacagcaccaccggcaggctgaccggcgttcacaccaccgcagcgaatctggatatccgcatcccgtatgccacagacccggcggggaaccgcctgcccgacccggagctgcacccggacagcaccctcagcatgtggccggataaccgtatcgcccgtgacgcgcactatctttaccggtatgaccatcacggcagactgacagagaaaaccgacctcatcccggaaggggttatccgcacggatgatgagcgcacccaccggtaccattacgacagtcagcaccggctggtgcactacacgcggacacaatatgcagagccgctggtcgaaagtcgctatctttacgacccgctgggccgcagggtggcaaaacgggtatggcggcgtgaacgggacctgacgggctggatgtcgctgtcacggaaaccgcaagtgacctggtacggctgggacggcgaccggctgaccacaatacagaacgacagaacccgcatccagacgatttatcagccggggagcttcacgccactcatcagggtcgaaactgccaccggtgagctggcgaaaacgcagcgccgcagcctggcggatgcccttcagcagtccggcggcgaagacggtggcagtgtggtgttcccgccggtgctggtgcagatgctcgaccggctggaaagtgaaatcctggctgaccgggtgagtgaggaaagccgccgctggctggcatcgtgcggcctgacggtggagcagatgcaaaaccagatggacccggtgtacacgccggcgcgaaaaatccacctgtaccactgcgaccatcgcggcctgccgctggtgcttatcagcacggaaggggcaacagaatggtgcgcagaatacgatgagtggggcaacctgctgaatgaagagaacccgcatcagctgcagcagcttatccgcctgccggggcagcagtatgatgaggagtccggcctgtattacaaccgccaccgctattatgacccgctgcaggggcgatatatcactcaggatccgattggactgaaggggggatggaatttttatcagtatccgttgaatccgataactgatattgacccgttgggattagcgacctgtttatacagcataactttaagtatgctttcatgcgtttcagatacgcaaaatgatgataactcttatgatgtgcttactattcctgtcgcctctggtaataatggtaataatatgcaatgtaaaaataatcctggttgtacacacttacaaaatagaggtccaatacctcaaggggtatggagctggaatgttaatggtcctggagcaaccaatagaaaacctaatggtatacgtttaataccgtcagcaaatacagaaacatataatcgtgatggatttttaacacaaagttgtttaaacgctttcggtccgtctttaggacctcgattctgttccgagggttgtataactggttcatctaatgacatgcaaaaattaaatgagttaatattttcagagccagatagcacattaacagttacggactaa

SEQ ID NO: 486380 - DNA, 1164 bp, Shigella sonnei; identical to SEQ ID NO: 485785

SEQ ID NO: 486381 - DNA, 3417 bp, Shigella sonnei; identical to SEQ ID NO: 485369

SEQ ID NO: 486382 - DNA, 1026 bp, Shigella sonnei; identical to SEQ ID NO: 485458

SEQ ID NO: 486383 - DNA, 675 bp, Shigella sonnei
atggctgacagtcagttttatcgccccggcctcccgcaacttatttctatgatccggagcgatttattaacccgctttgagcaggatacgctgcttcgtcgtatggatgcggaagtgtatgcccgtgtacaggctgcagccgtacacacgttgtacgggtatatcgattatcttgccagaaatctgttaccggacgtgtgtgatgaagactggctgtaccggcacgccagaatcaaacgctgcccgcgaaaagaagcggtggcagcccggggatttgtgcgctgggatggcgtagaggggacgccggtattgccagcgggaacgcagatccagcgtgataatcaggtgacctttaccacgacggcgacggtgaccgcagccgatggtcttctccgggtgcctgttgtggcagacgaaccgggatcggcggggaatacggatgatggtattgccatgcaactgggaacacccgtcagtggtctgccgtccacagggtacgctgacaccattacagacggtgaagatattgaaaatctggaaatatggcgtgcccgcgttatggaacgttattactacattccacaggggggcgcaggtaatgactccaacttattgatagtgttttatgttcagataatgcccgatgactttgtcatgcagctccaccgattttga

SEQ ID NO: 486384 - DNA, 390 bp, Shigella sonnei
atgaacaacaataacacattgtacgtcgggttagatgttcacaaagaatcgattactgtcgcttatgctatcaattcagaacctgttgaactgatgggtaaaattggcacatcacctactgatattcagaatctttgtaaacgtctcaggtcaaagtcatcgcaggtcagtatcgtttatgaagcggggccctgtggttatggactttatcgtcggctggtgaaatccggttttgactgcatggtctgcgccccctcacttatcccgaaaaaaccgggggagcgggttaaaaccgatcgccgtgatgccatcagacttgtgcgttcactgcgtgcaggagtgtcaacgccacgatgtttgaccgttatttgccattttcatgcccgctaa

SEQ ID NO: 486385 - DNA, 960 bp, Shigella sonnei; identical to SEQ ID NO: 485466

SEQ ID NO: 486386 - DNA, 1479 bp, Shigella sonnei; identical to SEQ ID NO: 485472

SEQ ID NO: 486387 - DNA, 420 bp, Shigella sonnei
atgaagctgctagtgacatacatcaggtggagtactaaagagcaagactcaggagactccttaagacggcaaacaaacctcattgatgctttctactctaagcacaaaaacgattattaccttcttcctgctcacagatatgttgataagggtaaatctggttttcaccagcaacataagaatcaaggttctgacttcagacgtatgtttgaaaatgttatgtctggggctattccagaaggttccttgattgttgtagagaactttgaccgcttcagtagggctgatatcgacacagctatagatgatgtcaggcagatactgaggaagggggtctctatactgactctgggtgatggtgaactctacgacaagtcagccttaacagaccctgtgaagttgattagactggccccctga

SEQ ID NO: 486388 - DNA, 1734 bp, Shigella sonnei; identical to SEQ ID NO: 485507

SEQ ID NO: 486389 - DNA, 276 bp, Shigella sonnei; identical to SEQ ID NO: 19894

SEQ ID NO: 486390 - DNA, 3006 bp, Shigella sonnei; identical to SEQ ID NO: 10984

SEQ ID NO: 486391 - DNA, 558 bp, Shigella sonnei; identical to SEQ ID NO: 7707

SEQ ID NO: 486392 - DNA, 597 bp, Shigella sonnei; identical to SEQ ID NO: 485523

SEQ ID NO: 486393 - DNA, 291 bp, Shigella sonnei
atgaaaacttataatggcgagagaaaataccgtgactatttactcagacgttacagcatttctcgtgaaggtcatcttatgaaggatactcacggggaagtttaccggattagaccaaagaaagaagggaggggttatttcttttacgatggtgtgacagatttaaagattgacgctttgaggtttgcagtgctgtatcattttgatatctggaattcaatccaccagctacgattaaaagacggtgaccccagcaacttaaaggccaccaatattatcacaaaacgttag

SEQ ID NO: 486394 - DNA, 504 bp, Shigella sonnei
atgccgggcaactgcacgcattatgggcgttggcctcaacacgattttacgtcacttaaaaaactcaggccgcagtcggtaacctcgcgcatacagccgggcagtgacgtcatcgtctgcgcggaaatggacgaacagtggggctatgtcggggctaaatcgcgccagcgctggctattttacgcgtatgacagtctccggaagacggttgttgcgcacgtattcggtgaacgcactatggcgacgctggggcgtcttatgagcctgctgtcaccctttgacgtggtgatatggatgacggatggctggccgctgtatgaatcccgcctgaagggaaagctgcacgtaatcagcaagcgatatacgcagcgaattgagcggcataacctgaatctgaggcagcacctggcacggctgggacggaagtcgctgtcgttctcaaaatcggtggagctgcatgacaaagtcatcgggcattatctgaacataaaacactatcaataa

SEQ ID NO: 486395 - DNA, 552 bp, Shigella sonnei; identical to SEQ ID NO: 39077

SEQ ID NO: 486396 - DNA, 972 bp, Shigella sonnei; identical to SEQ ID NO: 39078

SEQ ID NO: 486397 - DNA, 927 bp, Shigella sonnei
atgccaaactggtgctcgaatcgtatgtatttttctggtgaaccagcacagatcgctgagattaaacgactggccagcggtgcagtcacaccgctttatcgccgcgccacaaatgaaggtattcagctgtttctggccggaagtgccggacttctgcagatcactgaaaatatccgctctgagcagtgccccggagtgacggctgccggacgtggtgctgtatcaccggaaaatatcgcgttcacccgctggctgacacacctgcagaacggtgtactgctggatgagcaaaactgcctgatgctgcatgaactctggctgcagagcggtactggacagcgtcgctgggaagagttaccggatgatgtcagggaaactatcactgtgcatttcaccgcaaaaagaggtgactggtgtgacatctggggtaacgaggatgtatcggtgtggtggaaccgtctgtgtgacaacgtactgccggaaaaaaccatgccgtttgacctgctgacggttttgccgacccgcctggatattgaagtgaatggctttaacggcggtgttctgaacggtgttccttctgcatatcactggtatacagaacggtatggcgtgaagtggccttgtgggtatgacctgaatatcagcagtcagggggaaaacttcattcaggtagatttcgacacgccgtggtgtcagccggaaagcgacgttgttgcagaattaagccgccgtttcggctgcacgctggagcactggtacgccgaacagggctgcaatttctgtggctggcagttgtatgagcgcggagagctcgttgatgtgctgtggggggaactggaatggtcttccccgacagatgacgatgagctgccggaagtcaccggacctgcgtggatagtcgacaaggtggcgcattatggcggatga

SEQ ID NO: 486398 - DNA, 984 bp, Shigella sonnei; identical to SEQ ID NO: 484785

SEQ ID NO: 486399 - DNA, 261 bp, Shigella sonnei; identical to SEQ ID NO: 25661

SEQ ID NO: 486400 - DNA, 561 bp, Shigella sonnei
atgcgattagcttcccgttttgatcggtataattccattcgccgtgagcgtcctttaacggatgatgaattaatgcagtttgtgccgtctgtcttttccggtgataaaaatggggcccggagtgaacgttatacgtatattccaacaatcaatatcatcaataagttacgtgatgaaggtttccagccgttctttgcctgtcagagtcgggtttgcgatttgggacgccgcgaatacagtaaacatatgttacgtcttcgcagggaagggaatattaacgggaaagatgttcctgaaattatcctgcttaattcacatgatgattcatccagttatcagatgatccccggaatttttcgttttgtctgcacaaatggcctggtgtgtgggaataattttggcgaaatccgcgttccacataaaggtgatattgtcgggcaggttattgagggagcgtatgaagtgctcggtgtctttgataaagtcactgaaaatatggaggcaatgaaagagatacatcttaacagtgacgaacaacatttatttgcagagctgcattga

SEQ ID NO: 486401 - DNA, 306 bp, Shigella sonnei; identical to SEQ ID NO: 21649

SEQ ID NO: 486402 - DNA, 234 bp, Shigella sonnei; identical to SEQ ID NO: 21650

SEQ ID NO: 486403 - DNA, 288 bp, Shigella sonnei; identical to SEQ ID NO: 21651

SEQ ID NO: 486404 - DNA, 138 bp, Shigella sonnei; identical to SEQ ID NO: 232725

SEQ ID NO: 486405 - DNA, 1038 bp, Shigella sonnei
atggggcaacaaaagcagcgtaatcgacgttgggttctggcctcgcgtccacatggcgcaccggttccggagaatttccgtcttgaagaagatgatgtcgccacaccgggtgaaggacaggtgttactgcgcacagtttatttgtccctggacccgtatatgcgtggacgtatgagcgatgagccatcttattcaccgcctgttgatattggcggcgtgatggtcggcggcacggtgagccgtgttgtggagtcgaatcatcctgattatcagcctagcgactgggtgctgggctacagtggatggcaggactatgacatatccagtggtgatgatctggtgaaacttggcgatcatccgcaaaatccatcgtggtcgctgggtgtgctggggatgccaggctttaccgcttatatggggctgctggatatcggtcagcctaaagagggcgaaacgttggtggtagctgcggcgacaggtcctgtgggagcaacggtggggcaaatcggcaaacttaaaggttgcagggtggtgggggttgccggtggcgcggaaaaatgccgccatgctatcgaggtgctgggcttcgatgtttgtcttgatcaccacgcggatgattttgccgaacaactggtgaaagcgtgcccaaaaggtattgatatctattatgaaaacgtgggcggtaaggtatttgatgcagtgctaccattacttaatacatctgcgcgcattcccgtttgtggcttagtgagcagctataacgctacagagctaccacccggtccggatcgtttacccctgttgatggcaacggtgctgaaaaaacgtattcgcttgcaagggtttattatcgctcaggattatggtcaccgcatccatgagtttcagaaggagatggggcaatgggtgaaagaggataaaatccactaccacgaagatattactgatggtttagagggtaatgactccaacttattgatagtgttttatgttcagataatgcccgatgactttgtcatgcagctccaccgattttga

SEQ ID NO: 486406 - DNA, 750 bp, Shigella sonnei; identical to SEQ ID NO: 485661

SEQ ID NO: 486407 - DNA, 240 bp, Shigella sonnei; identical to SEQ ID NO: 485662

SEQ ID NO: 486408 - DNA, 213 bp, Shigella sonnei; identical to SEQ ID NO: 486092

SEQ ID NO: 486409 - DNA, 246 bp, Shigella sonnei; identical to SEQ ID NO: 486098

SEQ ID NO: 486410 - DNA, 207 bp, Shigella sonnei
atggaaacgacattcgtgctggatgcactggagcaggcgttgtgggcccgtcgtccgtctggcaccatccattacagcgataaaggctctcagtatgtgtcactggcctataaggcgcgactaaaagaagcaaaactgctggcatcaacagggagtacaggcgactcgtatgacaacgcgatggcagagatcatcaagggcctttag

SEQ ID NO: 486411 - DNA, 561 bp, Shigella sonnei; identical to SEQ ID NO: 485315

SEQ ID NO: 486412 - DNA, 303 bp, Shigella sonnei; identical to SEQ ID NO: 21656

SEQ ID NO: 486413 - DNA, 660 bp, Shigella sonnei
atgggaaaaatcattacagttgctgggcataaaggcggcattggcaaaagcaccgtgctttgctccttatgtgtgtgtgtcatcaaaaaagggaaaacagcctgtttcctggaaacagattcacagggaagcatcaaggatttcattgaggaacgtcaggctaacgccagtctgtcggaaataccgtattacgagtgctacacagatattccggcgatggtgcaaaaactggctgcccgttttgattatgtgttcgtcgatacgcctggtatgaaatctccggcattcgtaaaagcactgagttgtgctgatatcgtcctcacattcgtagaaccaggatccggcatcgagatcaacacgctgggacggctggttttcgacattaaaacagcacaggccggagtcaatccgtcaatgaaagcatggatcgttctgaataagtgcgcaaccaatccgtcagacagtgaagcgtcagaactacgcaatcaacttaatgatgatcctgactggcttcctgttccacgtcagcgcatctatatgcgcactgcgcataaaaaagcctataactgtggtatgggcgtacatgaatacaacgacaaacgaggaaacaaagcccgtggcgagattgaattactgttaaaagaaacgaatatcatatag

SEQ ID NO: 486414 - DNA, 324 bp, Shigella sonnei; identical to SEQ ID NO: 477667

SEQ ID NO: 486415 - DNA, 675 bp, Shigella sonnei; identical to SEQ ID NO: 474307

SEQ ID NO: 486416 - DNA, 861 bp, Shigella sonnei
atgataagtttatcaccaccgactatttgcaacagtgcccccaaaaatgcccctcataaggttgtgttacctgattttactggtctggcaattcggcttgatgcacaaatcaggaaccagtttcatcaactgaaagaggatgagcacttccttcgatatcggcagttgtcggaaaggtggtatcaggcgggctctattagtgacagaaacaaccgcagtaagcgttttgagaagatcatggatgactcacttgattttttgctttacagccaagacgtcatgcctaacatcaatccagatgatctccaatggcatgattacgaaaaggctagcagtaagggtaaaatgtactgtgtagcgcttctgttccatgtcattgcacgggctgcatatgaacccgaatctgtgggtaaagatccgacacttccagaatattgccggtggatgaaaaattggatagagaaaacattaggtcatgattttttagatagaatgatgatctattgtgcgctgtttgccccagcgtattttcccgcgttacaacgtctgagcggagagaaagaaacgcgtgatgtccatgaattcctggctgagcatgttcgcactttagctcaaaaaaattcttcagaggtaaattatagagatcaacggcaattcacgtttggctacaccatgttcacgaagcaacaatttgaatttctggacatgatgcgcgatgtccattaccggattgattgtattgaacagctccttctggaccttatagaacgtaaggttgtggatttcactgatgcatctgttgcaggcacgtggattgagaagcaaattcagcggcttgaatcaaacgacgtaaagcagtaa

SEQ ID NO: 486417 - DNA, 285 bp, Shigella sonnei
atggggtctgtgcagccgatggccgagaaagccgctgtaagcgcccagaacgagcgaagagccaaggagctaagggaaaccctagcccagcagcaaaaacgcttacaggcccttcaggagccgtttaaggggctatccaaggatcaggtagcgggactgatccggcaggcggtgaaattgcggcaggagaacgagcaggagaagcaggagcgcgcccagcagatcaaagagcgattcaaggccaagcgggaacgggagcgcagcgaccgcagcaggggccgttaa

SEQ ID NO: 486418 - DNA, 216 bp, Shigella sonnei
atgagcatgtattacatcaagacaggtctggagtactggaaacccaagggctacgggtacaccaagagccgcgaggaggcgggggttttcaccctcaaggacatggaagaattgaacctcgatggctgcaccctggaacgcgccgaagtggcgttcctggacgaggacggccccagtcccgacctaccccaccgcgtcaccctgccccgcgattga

SEQ ID NO: 486419 - DNA, 204 bp, Shigella sonnei; identical to SEQ ID NO: 9795

SEQ ID NO: 486420 - DNA, 816 bp, Shigella sonnei; identical to SEQ ID NO: 6090

SEQ ID NO: 486421 - DNA, 228 bp, Shigella sonnei
gtgaggaggcgtaacgcgagaggcggtataagcagaacggtctcggtgtatctcgatgaagatacaaacaaccgacttattaaggccaaagatcgtagtggaagaagtaaaacgatagaagtccagatccgtctcagagatcatctgaaacggtttcctgatttctataacgaagaaatattcagggaggtggccgaagagagcgagtcaacatttaaagagctttag

SEQ ID NO: 486422 - DNA, 687 bp, Shigella sonnei
atgtgtgcgctggatcgtagagaaaggccacttaacagtcaatctgtaaataaatacatccttaacgttcagaatatctacagaaattctcccgttccggtttgtgtccgtaacaaaaaccggaaaatcctttatgccaatggggcttttattgaactcttttccagagaagataaacctttatccggagagagttatatacgtctgcaggttgaaatttttctttcatcacttgaactggaatgccaggctcttggacatggctctgcattttgtcgtcgttttaattttcatggcgaaatctatcagataaggatggagaatgtttctttttataatgacgaatctgttgttttatggcaaattaatccgtttcctgattatccattttttgcgttaaatcagagtgtaagtaatacaaatacttctggtcaattaacgatatggaatgatctttctccaggaacattggttgttttctctttttatatgctgggtgttggtcacgcaacaattgccagagaattgggtattacagacagagcatctgaggatcgaattaaaccagttaaacggaaaataaaagagttttttgaacactttgatttattcagagtgtcatgtatctataagggggaaatagattcgctattaagtataattcgtgaattttataatgttaaataa

SEQ ID NO: 486423 - DNA, 384 bp, Shigella sonnei
atggccagagtaaatctgtatatcagtaatgaggttcatgaaaaaattaacatgattgttgaaaagcgtcgtcaggagggagcaagagataaagatataagcctttcaggaactgcttcaatgcttcttgaattagggcttcgtgtatatgacgcccagatggagcgtaaagagtctgcgtttaaccagacagagtttaataaacttcttcttgaatgtgctgtaaaaacacagtcaacggtagcaaagattttaggtattgagtctctcagccctcatgtctccggaaacccgaagtttgaatatgccagtatggttgacgatatcagagagaaagtgtctgttgagatggaccggttttttccaaaaaatgatggtgaataa

SEQ ID NO: 486424 - DNA, 228 bp, Shigella sonnei; identical to SEQ ID NO: 20701

SEQ ID NO: 486425 - DNA, 654 bp, Shigella sonnei
atgtgtgcaatggatcgtagagaaagagcactcattcgtcaattacatttccctaacgacttaagagagaacatttcattattgaaatatcccgtatgtatacgttttgaagacggttcttttataggaacaaatcacagcttcgagcgatttattaaattatcatattgttcatgtgatgaatggtttgagcatttgactttagaatccaagttacaactatcaagatctgagatggattcatatttttcaacttatggtgtaagttatattaataatgttttaattagtgctatgtcatggagcatggttatcgaaacactcaatacaaacgaaggttgttttttcgtctggcgatttattgagtcaaatgacaaaaatatttcaacatctttgatttctaaatctaatgatgggttgatgtttttttctggggaatatgtagatattgaaccctatcttgtagggtttagccattattattctgcagcagtgacaaaaattagtatatctaaatccaagaagaaaacgatgaattttttcaaaatgaatgggtttagttccagagatcactggttggatgaaatgctcaggtctgaaaaaatactatttctatatgatagagtaaaaggaatattaaaaaacaagtgttaa

SEQ ID NO: 486426 - DNA, 384 bp, Shigella sonnei; identical to SEQ ID NO: 472345

SEQ ID NO: 486427 - DNA, 516 bp, Shigella sonnei
atgaatatccaggaagcattaaacgtttttggattatccggcgaattaactgaaaaagatatcaaagcagcatacagaaaagccgctttaaaatatcatccagatcgtaacccgttaggggctgaactgatgaaagcggtaaatgcagcttttgatgtcttgatggcaaatattgataaaataaatcagttccagagcgctgatgaacatgcacgatataattacggtgatgacctggaaaaagtattaaacgttctttctggtttatctggtctggtatttgaagtgataggtaactgggtatggattagtggagaaactattacacataaggaaactttaaaagaaatcgggtgtaaatgggcggcaaagaaaaaacaatggttttatcgtccggacgaacataaaagttactggaatcgtgaagaacacacgatagaagaaatccgcgcaaaatacggtacaaccggacagcgcagggcgacagggtggcaacgcgtggaaaccagagcgtaa

SEQ ID NO: 486428 - DNA, 543 bp, Shigella sonnei
atgaactctttttttgaacaatatcaccctgtctttgaagttgtctgccgtatcctggggaacggctggcgcgtgaacaaacttgatgattgtccgtctcgtataaaactgacgtcaccgcagtttaaaaattactctgtgcatattcggatggaaaaagaccgattttctgttgtggggagtgtggatagtcgttcctggagtagtccgtatcatgtttgcacgttatccaggaagcggaatcccgttgatatagcagccaatatcgagcgaaaaattttgctaaatgcttcgcaggaggtgttacaggcgattgagtatgagaaacgccaggcggcaaaaaaggacgaaattctgatcctgaaaggtatgttatcgcaacttgtccagcttgaaagctggtatggggcattgacaggctttaaagctgaaaatggattgaacggtaaagtcaccgagcagggcgagcgttatgatttgcagattaggggtttgagtatagatcaacttgttaaaattacaggatatttgaaacagttatga

SEQ ID NO: 486429 - DNA, 255 bp, Shigella sonnei; identical to SEQ ID NO: 21654

SEQ ID NO: 486430 - DNA, 243 bp, Shigella sonnei; identical to SEQ ID NO: 21653

SEQ ID NO: 486431 - DNA, 438 bp, Shigella sonnei
atgtctgagcgagcgtgcgcggtccgacattcccacatcctgtcccgaaaattcccgccgtttctcggttttttgagcgtcgcagaccgcacgacaaacgaaacgaagtgtagtttgtatgagtgcgcacttcgtgagattccccgactgccagtttgtcgatcgcgcggaacagctgtggcacgaaaacggcagaatgatttgctgtccggttgccagaactgcgcgcttacgtggagggcggcgcggcgcaaaaaactgccgacattgcgccagtgttccggtgacacaaacccgcagaaatcgggacaggatgtgggaatgtcggaccgcgcacgctcgctcagacattccccacctggtcagggcttcgccccgacaccccgccaacgcctcacggcacgcgaaaaaattccgcgtaccgctcaccgttcttga

SEQ ID NO: 486432 - DNA, 528 bp, Shigella sonnei
atgagtgcacgtggtatcaacaaggtcgtcctcgtcgggcgtctgggaaaagatccggaagtccgttacatcccaaacgggggcgcagtggcaaacctgcaggtggccacgtcagaaagctggcgtgacaaacagacgggggagatgcgggagcagacagaatggcatcgcgtggtgttgttcggcaagctcgcggaagtggcaggtgaatatctgcgcaagggcgcgcaggtctacatcgagggacaactccgtacccgtagctgggacgacaacggcatcacccgctacatcactgaaattcttgttaagaccacgggcaccatgcagatgctggggagtgcaccacagcagaacgctcaggcgcaaccgaagcctcagcagaatgggcagccacagagtgctgacgcgacgaaaaaaggtggcgcgaaaacgaaaggccgtggacgtaaggccgcgcagccggagcctcagccgcaaccgccggagggtgacgattacgggttttcagacgacatcccgttctga

SEQ ID NO: 486433 - DNA, 234 bp, Shigella sonnei
atgagcgaatatttcagaatacttcagggactgccggacggctcctttacccgtgaacaggcggaagccgttgccgcacagtaccggaacgtctttatcgaggatgatcagggaacgcattttcgcctggttgtccgtcaggatggcacgttgatctggcgctcctggaattttgaggactgtgccgggtactggatgaaccagtacatcagggatttcgggattcttaagtaa

SEQ ID NO: 486434 - DNA, 663 bp, Shigella sonnei
atgtcaattgagcatattttaatcgggaaacatcatgggggttctgattactggagaactccatttttgttatttaagaacttacaccgtgaatttattttcagtctagatggtgctgcaactgagcatgacacgctgttaccacgattcaccaatgatataagccgtcaatcatgggttagtgaaaaggtcttctgtaacccgccgtacagcgatattccgtcgttcctcttaaaagcgtctgaagcggatttagtagctttcctgataccgcatagagccaacaccagctactggcttaggcacatttacagcaataaccactgtcatgaaatccgtattcttcatcgtgcagttaaataccttccaccagcagggcataacaggcttactattaggtcaccgtttccaagtgcagtcgttgtttttaaaaaagaaccacgtaagcacgaaattacacagatggtttgctgtgctgatacattgctaccgttaaccatcattaaccgtggtggactaagaggaagacccaccatttacccacctgagacgctcgacagcttcataaaactatacaggcaaggaaaacccattaagtacattgcagatgctctcagaatgcctctgagcacgtcatacaggattgctcaaaggttgagctaa

SEQ ID NO: 486435 - DNA, 771 bp, Shigella sonnei
atgaacgaaacgctgaatgcactgatttgtcgccacgcccgtaacctgctgctggcgcagggctggccggaagagacggatgttgaccagcgaaatccgaaccatccgggctggatcagcatttacgtgcggctggatgcgccccggctggcgacgttactcgttaaccgccacgatggcgtgctgccgccgcacctggcctccgccattcagaaactgaccggaaccggggcggaactggtactgtccggcagtcagtggcagtcgctgccggtacttccggcagacggaacgcaggtgtctttcccgtatgccggtgagtggctggcagaggacgaaatcagggcagttcttgatgcggtacgcgatgcagtacgctgtgtcagttaccaggtggcagaagatacgcggcgtatccgggcggcgctgaccacaaccggtcagacgttactgacccgccagacgcgccgctttcgcctggtcgtgaaggaaagcgatcacccctgctggctcgatgaggacgacgaaaacctgcccgtggtgctcgatgccatcctgaaccgggacgcacgtttttcggcggtggaaatgtatctggtcagcgattgtattgagcatatcctgtccagtgggctggcctgcgatgtgctgcgtataccggatgaaccgccccgccggtggtttgaccgttgtgttctgcgggaagttgtccgggaagcccgggccgaaatccgtagcgtggcggatgccctggcaaaaatcaggggctga

SEQ ID NO: 486436 - DNA, 435 bp, Shigella sonnei
atgtacggaacatgcgaaatgctctgccgggagctggcagcaaagtatccgggagacacgccactgatgctggttgtctggtccccggaagagattcaggcactggctgacggtatggaaatatctctgaccgatcatgaaatcaggaccgtcctggcgcgcctggaggacatcccggaagaccagcggattgagtccggtatttcttccgccgcagcgatggagattatcagcaacgtgagcgaaaaccgcctggtgaccgtctctgctgaactgctggcgtccctgattcagaccgctgaacaggcactgtggaaacgtgagtgggccgcccgtgataacggcctcgccgtcccggaatgcgtcacccgccgtcaggcagtgattaatcaggcccgcaccctgctgaaaaacaacacacacgaaaacaactga

SEQ ID NO: 486437 - DNA, 1206 bp, Shigella sonnei
atgaataacaccaactacaacatggcggtctgtggcacctccggggccggtaaaaccgggctgatacagccacttatccgcagcgtgctggactccgggggctttgccgtggtgttcgacatgggggatggctacaagtccctgtgtgagaacatgggcggggtgtatctggacggtgaaaccctgcgttttaacccgtttgcgaacatcaccgatattgaccagtcagcggagcgtgtccgcgaccagttgtcggtgatggccagccccaacggtaacctggatgaagtgcatgaaggtctgctgctgcaggcggtcagggcctcctggctggctaaaaagaataaggcgcgcatcgatgatgtggtggatttcctgaaaaacgcccgtgataacgaccagtatgtagagtcaccgactatccgcagccgtctggacgaaatgattgtgctgcttgaccagtacactgctaacggcacttatggccagtatttcaactccgatgagccgtccctgcgggatgatgcgaaaatggtggtgctggagctgggcggactggaagaccgtccgtccctgctggttgcggtgatgttcagccttatcatttacattgagaaccggatgtaccgcacgccgcgtaacctcaagaaactgaacgttattgatgaaggctggcgtctgctggacttcaaaaatcacaaggtcggtgaatttattgagaaaggctaccgtacggcccgccgtcataccggtgcctatatcaccatcacacagaacatcgtcgactttgactctgataaggcctccagtgctgcccgcgcggcatggggtaactcctcctacaaaattatcctcaaacagagtgcgaaggagttcgcgaaatacaaccagctgtatccggaccagttcctgccactgcagcgcgacatgattggtaagtttggtgcagccaaagaccagtggttcagttccttcctgctgcaggtggaaaaccattcctcctggcaccgtctgtttgtggacccgttaagccgcgccatgtacagctctgacggcccggattttgagtttgtgcagcagaagcgtaaagaggggctgagtattcatgaggcagtgtggcagctggcgtggaagaagtcagggccggagatggcttcgctggaagcctggctggaagaacatgagaaatacaggagtgtggcatga

SEQ ID NO: 486438 - DNA, 351 bp, Shigella sonnei; identical to SEQ ID NO: 232723

SEQ ID NO: 486439 - DNA, 345 bp, Shigella sonnei
atgccttactcggcgaaacgatatcagacagaaaacggtgaggttccatacaccgactggatgaaaaaattaagacgtaaagaccagaccgcagcgttaaaggtggattccagaattgcccgcgctatgagcggaaattttggagatcataaattcgaaagggacggtgtctgggaattacgagttgattacggtcctggttacagggtttattattcaatcgaagatggcgaaataattcttctgctcattggagggaataaaaaaactcagacagtcgatttagataaagccgttagttatctgcaagattttaaaaagaggtcaaaaaatgacagccactaa

SEQ ID NO: 486440 - DNA, 177 bp, Shigella sonnei; identical to SEQ ID NO: 485770

SEQ ID NO: 486441 - DNA, 804 bp, Shigella sonnei; identical to SEQ ID NO: 485810

SEQ ID NO: 486442 - DNA, 837 bp, Shigella sonnei; identical to SEQ ID NO: 22759

SEQ ID NO: 486443 - DNA, 804 bp, Shigella sonnei; identical to SEQ ID NO: 19906

SEQ ID NO: 486444 - DNA, 1149 bp, Shigella sonnei
atgaggcgcttcgcaggcgcatgtcgtttcgttttcaatcgtgctctggcacgtcagaatgagaatcatgaggtcggtaataaatacatcccttacgggaaaatggcttcctggctggttgagtggaaaaatgccactgaaacgcaatggcttaaagattctccctcacagccattgcaacagtcactgaaagaccttgagcgggcttacaaaaacttcttccggaagcgggctgcttttccccgattcaaaaagcggggacagaatgatgcattccgctacccgcagggcgttaagctcgatcaggaaaacagccgtatttttctgccgaaactgggctggatgcgctaccggaatagccgtcaggtcacgggtgttgtgaaaaatgtcactgtcagccagtcctgcggtacgtggtacatcagtattcagacagaaagtgaagtatccactccggctcacccttcagcatcaatggtcgggctggatgctggcgtggctaaactcgccacgctgtcagatggcacagtctttgagcctgtaaacagttttcagaaaaaccagaagacgctggcgagacttcagcgacagttaagccgcaaggtcaaattcagcaacaactggcagaagcagaaacgcaaaatacagcgactgcattcctgtatcgcaaatatccgcagggactaccttcacaaagtcacaacggccgtcagcaaaaaccacgcaatgatagtcattgaggatttgaaggtcagcaacatgtcaaagtcagcagcgggtacggtcagccagccggggcgcaatgtccgggcaaaatcaggtttaaaccgttcgatactggatcagggctggtatgaaatgcaccgccagcttgagtacaagcagctctggcgtggcggtcaggtgcttgctgttccgccagcgtatacaagccagcgttgcgcgtactgtggtcatacagcgaaagagaaccgcctgtcacaaagtaaattcagatgccaggtatgtggatatacagtgaacgccgatgtaaatggtgctcgtaacattttagcggcggggcacgccgttcttgcctgtggagagatggtgcagtcaggccgcccgttgaagcaggaacccaccgaaatgattcaggcgacagcctga

SEQ ID NO: 486445 - DNA, 393 bp, Shigella sonnei; identical to SEQ ID NO: 485788

SEQ ID NO: 486446 - DNA, 303 bp, Shigella sonnei; identical to SEQ ID NO: 484410

SEQ ID NO: 486447 - DNA, 360 bp, Shigella sonnei
atgcaactgagcaggctgacgctgagaagtaaaaagccggagcttgtggagcaagagctgtggggtgtcttactggcttataatctggtgagatatcagatgattaaaatggcggaacatctgaaaggttactggccgaatcaactgagtttctcagaatcatgcggaatggtgatgagaatgctgatgacattgcagggcgcttcaccgggatgtataccggagctgatgcgcgatcttgcaagtatgggacaacttgtgaaattaccgacgagaagggaaagggccttcccgagagtggtaaaggagaggccctggaaataccccacagccccgaaaaagagccagtcagttgcttaa

SEQ ID NO: 486448 - DNA, 654 bp, Shigella sonnei; identical to SEQ ID NO: 485795

SEQ ID NO: 486449 - DNA, 729 bp, Shigella sonnei; identical to SEQ ID NO: 485761

SEQ ID NO: 486450 - DNA, 303 bp, Shigella sonnei; identical to SEQ ID NO: 484410

SEQ ID NO: 486451 - DNA, 375 bp, Shigella sonnei; identical to SEQ ID NO: 485586

SEQ ID NO: 486452 - DNA, 258 bp, Shigella sonnei; identical to SEQ ID NO: 485585

SEQ ID NO: 486453 - DNA, 303 bp, Shigella sonnei; identical to SEQ ID NO: 485775

SEQ ID NO: 486454 - DNA, 561 bp, Shigella sonnei; identical to SEQ ID NO: 485315

SEQ ID NO: 486455 - DNA, 1326 bp, Shigella sonnei
gtgtttgaagctgcctgtcagtcgggatggggcggtaaaccggaagtacagaccattcgtcgtctggtgaccgaaagtgaagtggcggtggcggggaacactaaattccgctttgtgggggctgatgccttctcgccagatgaactgcgcaccgatttgttcagcgacgacgagggtggctatgtggactgtgttgcgctcgatgctgccctgctggaaaaactccaggctgtcgctgaacaccttcgggaagcagaaggctgggaatggtgcgccggacgtatggagcctgttggttcctgccgtgaggatgccggaacataccgcagtctgccggagccggaagcggtgctgacggaggcagaagaagaacgcctgaacgaactgatggctcgttacgacgcgctggaaaaccagtgtgaggaatccgacctgctggaagcagaaatgaagctgattgactgcatggcgaaggtcagggcgtggacgccggagatgcgtgccggaagtggcgtggtggtgtcctggcgttatggaaacgtatgtgtccagcgtggtgtgcagttgcgcagtgaagatgacgcgactgatgacgctgaccgcacggaacaggtgcaggaaaaagcgtcagtggaggaaatcagtctgccgttgctgacgaaaatgtcttccgaacgcacgctggcagtccaggcagcactgatgcagcaaccggacaaatctctggcactgctggcatggacgctctgcctgaatgtgtttgacagcggagcgtacagtaaaccagcacaaatcagcctggaatgtaaacattattcgctgaccagcgatgcgccgtcagggaaggaaggtgccgcattcctggcgctgatggcagaaaaagcccgtcttgcggccctgttaccggagggatggtcacgggacatgacgacgttcctgtcactcagtcaggaggtgctgttatccctgctcagtttctgcaccgcatgcagccttaacggtgtccagacccgcgagtgtggtcgcacgtcacgcagtccgcttgactcactggatagcgccatcggttttcacatgcgcgactggtggcagccgacgaaagcaaacttcttcggacacctgaaaaagccgcagattatcgcagccctgaatgaggcaggactgtccggtgctgcacgggacgcggagaagatgaagaaaggcgatgcggctgaacatgcagagcaccatatgaaagacaaccgctgggtgcctggctggatgtgtgcaccacgcccacagacggatgccactgaacgcaccgataacctggctgatgccgcctga

SEQ ID NO: 486456 - DNA, 804 bp, Shigella sonnei
gtgacctggtttgaactgggggagaacgacaaaaaccagatgctgtacagcatgaaggtatgcccaccgctgtggcgcatagggctgcgccagaacttccgtatcttccagaatgaggacatcgaaagcatcctcgcgacgatcctgaaggaaaacggtgtgaccgagtggagtccgctgttcagcgagccgcatccttcccgtgagttttgtgtccagtacggcgaaactgattacgatttcctgtgccggatggcggcggaggaaggcatcttcttttatgaggagcacgcgcaaaaaagtaccgaccagagcctggtcctgtgcgacaccgtgcgttatctgccggagtcctttgagatcccctggaacccgaacacccgtaccgaggtaagtaccttctgcatcagccagttccgctacagcgcacaaatccgtccttcttccgtggtgaccaaagactacacctttaaacgacccggctgggcagggcgttttgatcaggaaggccagtaccaggattaccagcgcacacagtatgaagtgtatgactaccccggacgtttcaagggtgcccacgggcagaactttgcccgctggcagatggatggctggcgcaacaacgcagaagtggcgcgcggaacaagccgttcgccggagatatggccgggacggcgaattgtgctgacggggcatccgcaggcgaacctgaaccgggaatggcaggtggtggcgagcgatcttcacggcgagcagccgcaggcggtaccgggacggcaggggttcaggcaccacgctgaataa

SEQ ID NO: 486457 - DNA, 501 bp, Shigella sonnei
atgtctgttgttgcacctgctgtatacgttggaacctggcacaaatacaactgtggaagcatcgccggacgctggtttgacctgaccacgtttgatgatgagcgcgactttttcgccgcctgccgtgctcttcaccaggatgaagccgatcctgaactgatgtttcaggattatgagggattcccggggaatatggcctctgaatgtcatatcaactgggcctgggttgaaggcttccgccgggcacgggatgaaggctgcgaagaggcttatcgtctctgggtggatgataccggtgagacggattttgacagcttccgcgatgcctggtggggcgaggctgacagtgaggaggcttttgcggttgagttcgccagtgataccggcctgctggctgacgtgccggagacggtggcgctctattttgactatgaggcgtatgcgcgggatttattcctggactccttcacctttattgacggtcatgtgttccgtcggtga

SEQ ID NO: 486458 - DNA, 666 bp, Shigella sonnei
atgcaggctgtggctgtcacagaacaacgtcgtcgtcagggacgcacacttccagcatggccttatgccagcgctttctttcgctgcctgaatggcagtcgccggatttcgctgaccgatctccgcttttttgctcctgcgctgacgaaggaggaatttcatggcaaccgtctcctgtggctggctgcagtggataaactgattgaaagttttggagaagtctgtgttcttcccctgccatccgatgcggggcaccgtctgttcccgtccgtgccttttcgtgaaggtgagcgtcgtcgtcagaaaaccacgctgacagagcagaaatacagccgccagcgggaacgtgaggcagaacgacgggaactggaataccagacatgttttgctcaggcgcagattgaccttgcgtttcatactcccgccacggtcggaagctggttgtcccgctggtctggtgttgttgaggagcatgatctggaaacgattttctgggggtggtgcgggcgttttccgtcactgtcatcatttgaccggtttttctggcaggaggaaccactctggcggctgatttttgaagccggtgaggccggtcgtggtgcaccgatacaggtacgtgcacttgagcagtggatgatcccgaacaagctggagaacgtaatatga

SEQ ID NO: 486459 - DNA, 657 bp, Shigella sonnei; identical to SEQ ID NO: 9983

SEQ ID NO: 486460 - DNA, 510 bp, Shigella sonnei; identical to SEQ ID NO: 9982

SEQ ID NO: 486461 - DNA, 303 bp, Shigella sonnei; identical to SEQ ID NO: 458125

SEQ ID NO: 486462 - DNA, 192 bp, Shigella sonnei
atgaatatcaacacggaaacccgcgaaattctgcgtaattacagggctgtgattaatgcgcggcgtcgtgagatggggcagaaaccgctcactaccgcgcagattgttgatgaaatctgcgattttgtggtgaatcagcaggcggttttcctgggcggtcactatatctttcagggcagcagaaacaggtaa

SEQ ID NO: 486463 - DNA, 423 bp, Shigella sonnei
atgtactgtactgttaaagaaattatccgcgatgtactggatacagacgtgccggacagtgaatgcgtttttgccgtggtgctgactcgtggggatgtgcgccatatggctcaggactggaacctgtcagacgatgagctggaaaccgtcatgcagcggctggacgatgcctttgagcatggtgcggatgtcagcattgttcacgacgttgttcgtgagctgatggaagaaaagcgcgccagccgtcaggtgacagttccggcggtgatgctggaaaaagtgatggcgctggcaggcagtgaaatgaagcgcctgtatgccgtcgggagtgagaacgggggcgacggtgacgcattcgtcagggaggaacgcgaagcaatggacgttgtgttacaggcgctggacggggagaagatgtcatga

SEQ ID NO: 486464 - DNA, 303 bp, Shigella sonnei
atgatgccggaatatgaaggcggattctggcacttcatccgcctgccggacggtggcggttacatgatgccggatggcgaccgttttcatctggttaacggtgaaaactggtttgaccgtaccgtgagtgctgatgccgcaggtgtcattctgacctctcttgtgattaaccgccagttgtggctgtaccacgacagcggggatgcaggactgactcacctgtacaggatgcgcgatgcgcagttgtggagccacatcgaatttcaccccgaatgtaacgcgatttacgcagcactggactga

SEQ ID NO: 486465 - DNA, 861 bp, Shigella sonnei; identical to SEQ ID NO: 5314

SEQ ID NO: 486466 - DNA, 252 bp, Shigella sonnei
atgactggctgggaactgcgaatctggcgaaaaagcatgctctggtcacgcgaaaaagcggccagagaatttggcgtgacgcagagaacatggcacgcctgggaaaatgcggaacaggtggacgtcaccgtctggaggaccacccaggcactttcagtccgtgacctgctgcctcacatgcaggggatgcgcaaggcagatatcatcaggcgtctggaaaatgaactgggggaaacggcagaggatgtgtga

SEQ ID NO: 486467 - DNA, 315 bp, Shigella sonnei; identical to SEQ ID NO: 33595

SEQ ID NO: 486468 - DNA, 330 bp, Shigella sonnei; identical to SEQ ID NO: 36176

SEQ ID NO: 486469 - DNA, 561 bp, Shigella sonnei
atgacagagcagaagcgaccggtactgacactgaagcggaaaacggaaggggagacgcctgtccgcagccggaaaaccatcatcaatgtcaccacgccaccaaagtggaaggtgaaaaagcagaagctggccgggaaagcagcccgggaagcagagctggcggcaaaaaaagcgcaggccagacaggcactgtccatttatctgaacctgcccacgctggatgaggccgtgaataccctgaaaccctggtggccgggattatttgacggtgacaccccccggcttctggcctgcggtatccgggacgtgttactggaagacgtggcgcagcggaatatcccgctctcgcataaaaaactgcgcagggcgctgaaggccatcacccgttcagaaagctatcttggtgccatgaaagccggtgcctgccggtatgacacggaagggtatgtgacggagcatatttctcaggaggaggaagcgtatgcggcagcgcgtctggataaaatccgccgccagaaccggataaaggcagaacttcaggccgtgcttgatgagaaataa

SEQ ID NO: 486470 - DNA, 501 bp, Shigella sonnei
atgtctgttgttgcacctgctgtatacgttggaacctggcacaaatacaactgtggaagcatcgccggacgctggtttgacctgaccacgtttgatgatgagcgcgactttttcgccgcctgccgtgctcttcaccaggatgaagccgatcctgaactgatgtttcaggattatgagggattcccggggaatatggcctctgaatgccatatcaactgggcctgggttgaaggcttccgccgggcacgggatgaaggctgcgaagaggcttatcgtctctgggtggatgataccggtgagacggattttgacagcttccgcgatgcctggtggggcgaggctgacagtgaggaggcttttgcggttgagttcgtcagtgataccggcctgctggctgacgtgccggagacggtggcgctctattttgactatgaggcgtatgcgcgggatttattcctggactccttcacctttattgacggtcatgtgttccgtcggtga

SEQ ID NO: 486471 - DNA, 276 bp, Shigella sonnei; identical to SEQ ID NO: 484087

SEQ ID NO: 486472 - DNA, 210 bp, Shigella sonnei; identical to SEQ ID NO: 485798

SEQ ID NO: 486473 - DNA, 276 bp, Shigella sonnei; identical to SEQ ID NO: 484087

SEQ ID NO: 486474 - DNA, 303 bp, Shigella sonnei; identical to SEQ ID NO: 21213

SEQ ID NO: 486475 - DNA, 222 bp, Shigella sonnei; identical to SEQ ID NO: 10759

SEQ ID NO: 486476 - DNA, 444 bp, Shigella sonnei
atggccgcctggaaaaatgcgggattcagcgttgttggtcacctggtcttcaccaaaaactacacatcgaaggccgcatatgtgggctatcgccacgaatgcgcctacattctggcaaaaggccgtccacgtctgccacaaaacccgctgccggacgtgctgggctggaaatattcgggcaatcgccatcacccgacggaaaagcccgttaccagcctgcaaccgctgattgagagcttcacacacccgaacgcaattgtgctggacccgtttgcaggcagcggctcaacctgcgtcgccgccctccagtccggacgccggtatatcggtatcgagctgcttgagcagtatcaccgtgccgggcagcaacgccttgccgccgtgcaacgggccatgcagcagggggccgcgaatgatgactggtttatgccggaggctgcgtaa

SEQ ID NO: 486477 - DNA, 222 bp, Shigella sonnei
atgaactatgcaggacacgaaaaactgcgcgccgaagtggcggaggtggccaatgccatgtgcgacctgcgtacaaccatgaatgagatggagcagcggtacagctttaatgccgacaccctgccggaacgtctggtgcgtcagacgctgtttcgcgcaaaccgcctcctgatggaggcatataccgaaattctggaactggattcctgcttcaaagattga

SEQ ID NO: 486478 - DNA, 444 bp, Shigella sonnei
atgtctgcctggaaaaatgcgggattcagcgttgttggtcacctggtcttcaccaaaaactacacatcgaaggccgcatatgtgggctatcgccacgaatgtgcctacatcctggcaaaaggccgtccacgtctgccacaaaaaccgctgccggacgtgctgggctggaaatattcaggcaatcgtcatcacccgacggaaaagcccgttaccagcctgcaaccgctgattgagagcttcacccccccgaacgcaattgtgctggacccgtttgcaggcagcggctcaacctgcgtggccgccctccagtccggacgccggtatatcggtatcgagctgcttgagcagtatcaccgtgccgggcagcaacgccttgccgccgtgcaacgggccatgcagcagggggccgcgaatgatgactggtttatgccggaggctgcgtaa

SEQ ID NO: 486479 - DNA, 216 bp, Shigella sonnei; identical to SEQ ID NO: 485850

SEQ ID NO: 486480 - DNA, 435 bp, Shigella sonnei
atgtacggaacatgcgaaatgctctgccgggagctggcagcaaagtatccgggagacacgccactgatgctggttgtctggtccccggaagagattcaggcactggctgacggtatggaaatttctctgaccggtcatgaaatcaggaccgtcctggcacgcctggaggacatcccggaagaacagcggattgagtccggtatttcttccgctgcggtgatggagatcatcaataacgtgagcgaaaaccgccaggtgaccgtccctgctgaactgctggcgtccctgattcagaccgctgaacaggcattgtggaaacgtgaatgggccgcccgggatcatggcctcgccgtcccggaatgcgtcacccgccgtcaggcagtgattaatcaggcccgcaccctgctgaaaaacaacacacacgaaaacaactga

SEQ ID NO: 486481 - DNA, 222 bp, Shigella sonnei
atgaactatgccggacacgaaaaacttcgcgccgacgtggcggaggtggccaatgccatgtgtgaccttcgggccaggctgaacgatatggagcatcgctgtcgctttgattccgatgtgcttgttgaacgcctggcacgccagactctgtatcgcgccaatcgcctgttcatggaggcgtataccgaaattctggaactggatgcgtgctttaaagattga

SEQ ID NO: 486482 - DNA, 270 bp, Shigella sonnei; identical to SEQ ID NO: 239458

SEQ ID NO: 486483 - DNA, 165 bp, Shigella sonnei; identical to SEQ ID NO: 239457

SEQ ID NO: 486484 - DNA, 510 bp, Shigella sonnei
atgaaaaaatggatgttagcaatctgcctgatgtttataaatgggatctgcgaagccgccgattgctttgatcttgcaggtcgggattacaaaatagacccggatttactgagagcgatatcatggcaagaatcccgttaccgggttaatgccatcggtattaatccggtaacgggatatggcagcggactgatgcaggtagattcccagcattttaacgaactagcccgctatggaattaagccggaacatctgacaacagatccctgcatgaacatttataccggtgcttattatctggcaatagcctttaaaaaatggggcgtctcctgggaggccgttggtgcatacaatgccggattcaggaagaccgaacgccagaaccagagacgtcttgcctacgcatcagaggtttaccggatttatacctggataaagagtagtaaaggcatccgggttccgaccacgaagaaatcactttcccaaattaacagtgtgcagaacaattaa

SEQ ID NO: 486485 - DNA, 495 bp, Shigella sonnei
atgcaattgcatgcggcaggtatacggaccggtgatgcagagcgaatactgtccagcggtgaatactggcaacgtcagaagacgctgctgacagaaagggaagtcagttttatgaaaggactgttcagaattgtggatatgaagcggtggtatctgtgtccgcaggtacgggtcgcggatatcgtccagctgaacgggaatatccggccacgatcacgccagtggtggcagttattcaggatggtgtctcagtggcatgttgatgtggttatcgttgagcggcgttcgttcagtattgttgcagcagtagagctggatgatgccagccatttacgaccggaacgcagacgccgggatattcttctggaagaggttctgaggcaggctggtattccgttgctcagaagccacgatgccagaaaactgctgcagatgaccggagaatggctgaatacaacaggggctgatcagcagtcaccggaacatcgtagctga

SEQ ID NO: 486486 - DNA, 705 bp, Shigella sonnei; identical to SEQ ID NO: 8686

SEQ ID NO: 486487 - DNA, 468 bp, Shigella sonnei; identical to SEQ ID NO: 19402

SEQ ID NO: 486488 - DNA, 372 bp, Shigella sonnei; identical to SEQ ID NO: 11381

SEQ ID NO: 486489 - DNA, 504 bp, Shigella sonnei; identical to SEQ ID NO: 486394

SEQ ID NO: 486490 - DNA, 498 bp, Shigella sonnei; identical to SEQ ID NO: 486152

SEQ ID NO: 486491 - DNA, 177 bp, Shigella sonnei; identical to SEQ ID NO: 485877

SEQ ID NO: 486492 - DNA, 330 bp, Shigella sonnei; identical to SEQ ID NO: 461591

SEQ ID NO: 486493 - DNA, 501 bp, Shigella sonnei; identical to SEQ ID NO: 486470

SEQ ID NO: 486494 - DNA, 312 bp, Shigella sonnei; identical to SEQ ID NO: 5263

SEQ ID NO: 486495 - DNA, 474 bp, Shigella sonnei
gtgtctttcccgtatgccggagaatggctgaccgaagacgaaatcagggctgttcttgatgcggtgcacgatgcggtacgaagcatctgttaccaggtggcagaagatgcgcggcgtatccgtgcggcgctgaccaccaccggtcagacgttgctgacccgccagacgcgccgcttttgcctggtcgtgaaggaaagcgatcacccctgctggctcgatgaagatgacgaaaacctgcccgtggtgctcgatgccatcgtgaaccggggagcacgtttttcgtcggtggaaatgtatctggtcagtgagtgtattgagcatatcctgtccagtgggctggcctgcgatgtgctgcgtataccggatgaaccgccccgccgctggtttgaccgtggtgttctgcgggaggtggtccgggaagcccggaccgaaatccgcagcatggcggatgccctggcaaaaatcaggggctga

SEQ ID NO: 486496 - DNA, 315 bp, Shigella sonnei; identical to SEQ ID NO: 33595

SEQ ID NO: 486497 - DNA, 315 bp, Shigella sonnei; identical to SEQ ID NO: 33595

SEQ ID NO: 486498 - DNA, 216 bp, Shigella sonnei
atggagatcatcaataacgtgagcgaaaaccgccaggtgaccgtccctgctgaactgctggcgtccctgattcagaccgctgaacaggcattgtggaaacgtgaatgggccgcccgggatcatggcctcgccgtcccggaatgcgtcacccgccgtcaggaggtggttaatcaggcccgcaccctgctgaaaaacaacagacacgaaaacgactga

SEQ ID NO: 486499 - DNA, 366 bp, Shigella sonnei; identical to SEQ ID NO: 485870

SEQ ID NO: 486500 - DNA, 441 bp, Shigella sonnei; identical to SEQ ID NO: 478325

SEQ ID NO: 486501 - DNA, 474 bp, Shigella sonnei
gtgtctttcccgtatgccggagaatggctgaccgaagacgaaatcagggcagttcttgatgcagtgcgcgatgcggtacgcagtgtcagttgccgggtggcagaagatgcgcagcgtatcagggcggcgctgaccacaaccggtcagacgttgctgacccgccagacccgccgctttcgcctggtggtgaaggaaagcgatcacccctgctggctcgatgaggacgacgaaaacctgcccgtggtgctcgatgccatcctgaaccggggcgcacgtttttcggcggtggaaatgtatctggtcagcgattgtattgagcatatcctgtccagtgggctggcctgcgatgtgctgcgtataccggatgaaccgccccgccggtggtttgaccgtggtgttctgcgggaggtggtccgggaaggccgggctgaaatccgcagcatggcggatgccctcgcaaaaatccggggctga

SEQ ID NO: 486502 - DNA, 315 bp, Shigella sonnei; identical to SEQ ID NO: 33595

SEQ ID NO: 486503 - DNA, 438 bp, Shigella sonnei
atgatgaataccgaactgacactgaatgccctgcagtccatgaatgcccaggaatatgaagaaatccgtgctgcgggaagcgatatgcgccgtaatctcactcacgaggtgatgcgtaaagtggacgcaccggctaactggatgatgaacggagagtatggcagcgagttcgggggctttttccccgtccaggttcgtttcacgccagcccacgaacgtttccacctggcattatgttcgccgggagacgtctctcagctctggatgctggttctggtgaatggtggtggacagcctttcgccgtcgttcaggtgcaacatatcctcacgcctgtcgcgatcagtcacacgctggcgcttgccgcgacactggatgcgcagggatacagtgttaacgacatcatccatatcctgatggcagaaggaggtcaggcatga

SEQ ID NO: 486504 - DNA, 435 bp, Shigella sonnei
atgaaaactgaactgaccctgaatgtattacagaccatgagcgcacaggaatatgaagatatccgggctgccggaagtgatgaacgccgtgagctgacacacgccgtgatgcgggagctggatgcgccggacaactggacgatgaacggcgagtatggcagcgagtttggcggatttttccccgtccaggttcgtttcacgcctgcccacgaacgttttcacctggcgttatgttcaccgggcgatgtctctcaggtctggatgctggttctggtgaattgtggtggacagcctttcgccgtcgttcaggtgcaacatatcttcacgcctgtcgctatcagtcacacgctggcgcttgccgcgacacttgatgcgcagggatacagtgttaacgacatcatccatatcctgatggcagaaggatgtcaggcatga

SEQ ID NO: 486505 - DNA, 447 bp, Shigella sonnei; identical to SEQ ID NO: 475809

SEQ ID NO: 486506 - DNA, 249 bp, Shigella sonnei; identical to SEQ ID NO: 18900

SEQ ID NO: 486507 - DNA, 261 bp, Shigella sonnei; identical to SEQ ID NO: 7695

SEQ ID NO: 486508 - DNA, 207 bp, Shigella sonnei; identical to SEQ ID NO: 10660

SEQ ID NO: 486509 - DNA, 219 bp, Shigella sonnei
atgaaagatactcacggggaagtttaccggattcgaccgaagaaagaagggagggattattatttcgtcgatggtgtgacagatttaaagattgacgctttgaagtttgcggtgctgtatcattacgatttatgggattcagtccaccagctacgattaaaagacggtgaccccggtaatctgagggccaccaatattatcaagggaaagtgccggtaa

SEQ ID NO: 486510 - DNA, 159 bp, Shigella sonnei
atgacgattgcagaacgtcttattcaaaaaggcgctcttgaagtggcgcgggaaatagcctgccggcttcgggatataggctggccgctggaacggattcaggaggtcacgggactttccggtgaagaactgaaaaagctgtttcctgatgagcagtag

SEQ ID NO: 486511 - DNA, 1374 bp, Shigella sonnei
atgccacgcattaaacctcttctggttctttgtgctgctttactgacggtcacccccgcagcgtcagcggatgtgaacagcgacatgaatcagttctttaacaagctgggcttcgcctccaataccacacagccgggcgtctggcaggggcaggccgccggttatgcttacggtggctccctgtatgcccgtactcaggtcaaaaatgttcagctgatttccatgacgctgccggatatcaatgccggatgtggcggcatcgacgcctacctcggctcgttcagttttattaatggcgagcagctgcagcgttttgttaagcagattatgagcaatgctgccggttacttttttgaccttgccctgcagacaacggtgccggaaatcaaaaccgcaaaagacttcctgcagaaaatggcaagcgacattaacagtatgaacctcagttcctgccaggcggcacaggggattatcggcgggcttttcccccggacgcaggtgtcccagcagaaagtctgtcaggacattgccggtgagagcaatatttttgctgactgggcggcttcccggcagggatgtaccgttggcgggaaatctgacagtgtcagggataaagccagcgacaaggataaggagcgggtgaccaaaaacatcaacatcatgtggaatgcgctttccaaaaacagaatgtttgacggcaacaaagagctgaaagagtttgtgatgacgctgaccggctcactggtgtttggtcccaacggcgaaatcacaccgctgtcagccagaaccactgaccgctcaattatccgggccatgatggaaggcggcacagcaaaaatttatcactgcaacgattctgataaatgcctgaaagtggtggcagacacaccggtgaccatcagccgggataatgcactgaagtctcagattactaaacttctggccagcattcagaacaaggcggtcagtgacacgcctctggatgacaaggaaaaaggctttatttccagtaccaccatccccgtcttcaaatacctggttgacccgcagatgctcggtgtttccaacagtatgatttaccagctgacggactatatcggttacgacatcctgctgcagtacattcaggagctgatacagcaggccagggcgatggtggccacaggaaattatgacgaagcagttatcgaacatattaacgacaacatgaatgatgccacccggcagattgcggcgtttcagtcgcaggtgcaggtacagcaggatgcgctgctggttgtcgatcgtcagatgagctacatgcgtcagcagctttccgcccgcatgctcagtcgttaccagaacaactatcacttcggagggagcacgctgtga

SEQ ID NO: 486512 - DNA, 996 bp, Shigella sonnei
atgaatgaatttataaaagaacggttttcgtatttagcagataataaaaaagaaaacgccccagaactaaatgtttcctacggtatcgataagaattttttgtatggtgctggcgtttcaatttcttccgttttgattaataattcagatattaattttgtctttcatgttttcactgattatgtggatgatgattatttaaagtcatttaatgaaacagcaaaacaatttaatacctcaattattgtatatttaattgacccaaaatactttgctgatctgccgacgtcacagttttggtcgtacgcgacatacttcagggtattgtcctttgaatatctgagtgaaagtatttccacactgctgtatctggatgccgatgtcgtttgtaaaggaagtctgaagcctctcacagaaattatatttaaagatgagtttgctgcggtcattcctgacaatgttagtactcaggcggcatgtgcaaaacgcctcaacattcccgagatgaatggacgttatttcaatgcaggcgttatctatgtcaatcttaaaaaatggcatgaagcaaatttgacaccgtatttactcacgcttttacgaggggaaactaaatatggctctcttaaatatttagatcaggatgcgttgaatatcgcatttaatatgaataatatctacctcgcgaaggattttgatactatttataccctgaaaaacgaacttcatgatcgtagtcatcgaaagtatcagcaaaccattaccgataaaacagtattgattcactatacagggataactaaaccatggcatagctgggctggttatccgtctgcatcatactttaatatcgcgcgtgaacaatctccctggaagaaatatcctcttaaagaggcgcggactgttgcagaaatgcagaaacaatataagcatctgtttgcccatggtgagtatattaaaggcataacttcattaattaagtacaagcttaagaaataa

SEQ ID NO: 486513 - DNA, 672 bp, Shigella sonnei; identical to SEQ ID NO: 484887

SEQ ID NO: 486514 - DNA, 351 bp, Shigella sonnei; identical to SEQ ID NO: 232723

SEQ ID NO: 486515 - DNA, 294 bp, Shigella sonnei; identical to SEQ ID NO: 21652

SEQ ID NO: 486516 - DNA, 561 bp, Shigella sonnei; identical to SEQ ID NO: 486400

SEQ ID NO: 486517 - DNA, 510 bp, Shigella sonnei
atgaaaaaatggatgttagcaatctgcctgatgtttataaatgggatctgcgaagccgccgattgctttgatcttgcaggtcgggattacaaaatagacccggatttactgagagcgatatcatggaaagaatcccgttaccgggttaatgccatcggtattaatccggtaacgggatatggcagcggactgatgcaggtagattcccagcattttaacgaactagcccgctatggaattaagccggaacatctgacaacagatccctgcatgaacatttataccggtgcttattatctggcaatagcctttaaaaaatggggcgtctcctgggaggccgttggtgcatacaatgccggattcaggaagaccgaacgccagaaccagagacgtcttgcctacgcatcagaggtttaccggatttatacctggataaagagtagtaaaggcatccgggttccgaccacgaagaaatcactttcccaaattaacagtgtgcagaacaattaa

SEQ ID NO: 486518 - DNA, 192 bp, Shigella sonnei
atgaatatcaacacggaaacccgcgaaattctgcgtaattacagggctgtgattaatgcgcggcgtcgtgaaatggggcagaaaccgctcaccaccgcgcagattgttgatgaaatctgcgattttgtggtgaatcagcaggcggttttcctcggcggtcactacatcttacagggcagcagaaacaggtaa

SEQ ID NO: 486519 - DNA, 336 bp, Shigella sonnei
atgacggcgggccgtacggtagcctttctcaataaattcaccgaccttgtgatttttgaagtccagcagacgccagccttcatcaataacgttcagtttcttgaggttacgcggcgtgcggtacatccggttctcaatgtaaatgataaggctgaacatcaccgcaaccagcagggacggacggtcttccagtccgcccagctccagcaccaccattttcgcatcatcccgcagggacggctcatcggagttgaaatactggccataagtgccgttagcagtgtactggtcaagcagcacaatcatttcgtccagacggctgcggatagtcggtga

SEQ ID NO: 486520 - DNA, 381 bp, Shigella sonnei; identical to SEQ ID NO: 458903

SEQ ID NO: 486521 - DNA, 618 bp, Shigella sonnei
atgcccgtattccctgccagctttaacacgtccttcctgtgctgcatcatcgcctctttcaccccttcccggtgttttttcagtgattcctctgtcgaagctgtgaacagggctatagcgtctttgattttcgtctcgtttgatgtcacagccttgcttacagatttttcgagcttcctgaactcgtcgttcagtattgtctctgtagattcggctctctctttcagctttttctcgaactccgcgcccgtctgtaaaagattgctcataaaatgctcctttcagcctgatattcttcccaccgttcgggtctgcaatgctgatactgcttcgcgtcaccctgaccacttcaagccctgcctctgtgagcgcctgaatcacatcctgacggccttttatctccccgacatgataaagagcgtctatcccgcgtgtgacgctctctgcaagcgcctgtttcgtttccggcaggttatcagagagagtcagtacccggcggttctccggggcgttggggtcatgcagcccgtaatggtgattcaccagcgtctgccaggcatcaattctcggcctgtctgcccggtcgtagtacggctggaggcgttttccggtctgtag

SEQ ID NO: 486522 - DNA, 198 bp, Shigella sonnei; identical to SEQ ID NO: 462944

SEQ ID NO: 486523 - DNA, 234 bp, Shigella sonnei; identical to SEQ ID NO: 21482

SEQ ID NO: 486524 - DNA, 609 bp, Shigella sonnei
atgaacaccgaggtgctgaataaccgcaccacggatgtgataaacaaccatgctgaaaccattggcaacaatcagatgattgcggttaccaacaatcagatagagacggtgggcgttaaccagatagagacggtgggcagtaaccagataattaaagtgggttctgttcaggtggaaacgattggacttgttcgtgcgctgacggtgggcgtggcgtatcagacgacggtaggtggcattatgaacacctcggtggcactgatgcagtcctcgcagatcggtttgcataaatcgttgagggtcgggctgggttatgacgtcaaagtcggaaataacgttaccttcaccgttggtaaaacgaaaaaggatgataccgggcagaccgcgatttactccgccggtgagcatctggagctctgctgtggtaaggcaaggctggtgctgacgaaggacggacaaatttttctcaacggcacaaaaattcatttgcagggtaaggagcaggttaatggtgactcactgttgattaactggaactgtgcagcctcgaaatccccaccgaagacccctgatgaaaagcaggatacgccggatatgagagagtactga

SEQ ID NO: 486525 - DNA, 3417 bp, Shigella sonnei; identical to SEQ ID NO: 485369

SEQ ID NO: 486526 - DNA, 960 bp, Shigella sonnei; identical to SEQ ID NO: 485466

SEQ ID NO: 486527 - DNA, 609 bp, Shigella sonnei; identical to SEQ ID NO: 485493

SEQ ID NO: 486528 - DNA, 2181 bp, Shigella sonnei; identical to SEQ ID NO: 485629

SEQ ID NO: 486529 - DNA, 510 bp, Shigella sonnei
atgaaaaaatggatgttagccatctgcctgatgtttataaatgagatctgtctggccactgattgctttgatcttgcaggcagggattacaaaatagatcctgatttactgagagcaatatcatggcaagaatcccgttaccgggttaatgccatcggtattaatccggtaacgggatatggcagcggactgatgcaggtagattcccagcattttaacgaactggcccgctacggaattaagccggaacatatgacaacagatccctgcatgaacatttataccggtgcttattatctggcaatagcatttaaaaaatggggcgtcacctgggaggccgttggtgcatacaatgccggattcaggaaaactgaacgccagaaccagaggcgtcttgcctacgcatcagatgtttaccggatttataccgggataaaaagcagtaaaggtatccgggttccgaccacgaagaaatcactttcccaaatgaacagtgtgcagaacaattaa

SEQ ID NO: 486530 - DNA, 240 bp, Shigella sonnei; identical to SEQ ID NO: 485662

SEQ ID NO: 486531 - DNA, 783 bp, Shigella sonnei
atggacccggtgtacacgccggcgcgaaaaatccacctgtaccactgcgaccatcgcggcctgccgctggtgcttatcagcacggaaggggcaacagaatggtgcgcagaatacgatgagtggggcaacctgctgaatgaagagaacccgcatcagctgcagcagcttatccgcctgccggggcagcagtatgatgaggagtccggcctgtattacaaccgccaccgctattatgacccgctgcaggggcgatatatcactcaggatccgattggactgaaggggggatggaatttttatcagtatccgttgaatccgataactgatattgacccgttgggattagcgacctgtttatacagcataactttaagtatgctttcatgcgtttcagatacgcaaaatgatgataactcttatgatgtgcttactattcctgtcgcctctggtaataatggtaataatatgcaatgtaaaaataatcctggttgtacacacttacaaaatagaggtccaatacctcaaggggtatggagctggaatgttaatggtcctggagcaaccaatagaaaacctaatggtatacgtttaataccgtcagcaaatacagaaacatataatcgtgatggatttttaacacaaagttgtttaaacgctttcggtccgtctttaggacctcgattctgttccgagggttgtataactggttcatctaatgacatgcaaaaattaaatgagttaatattttcagagccagatagcacattaacagttacggactaa

SEQ ID NO: 486532 - DNA, 267 bp, Shigella sonnei; identical to SEQ ID NO: 11114

SEQ ID NO: 486533 - DNA, 327 bp, Shigella sonnei; identical to SEQ ID NO: 485698

SEQ ID NO: 486534 - DNA, 216 bp, Shigella sonnei; identical to SEQ ID NO: 485679

SEQ ID NO: 486535 - DNA, 771 bp, Shigella sonnei
atgaatgaaacgctgaatgcactgatttatcgccacgccagcaacctgctgctggcgcagggctggccggaagagacggatgttgaccagcggaacccgaagtatccgggctggatcagcatttacgtgcggctggatgcgccccggctggcgacgttacttatcaagcgtcacggtggcgtgctgccgccgcacctggcctctgccattcagagactgaccggaaccggggcggaactggtactgtccggcagtcagtggcagtcgctgccggtacttccggcagacggaacgcaggtgtctttcccgtatgccggtgagtggctgaccgaagacgaaatcagggctgttcttgatgcggtgcacgatgcggtacgaagcatctgttaccaggtggcagaagatgcgcggcgtatccgtgcggcgctgaccaccaccggtcagacgttactgacccgccagacgcgccgctttcgcctggtcgtgaaggaaagcgatcacccctgctggctcgatgaagatgacgaaaacctgcccgtggtgctcgatgccatcgtgaaccggggagcacgtttttcgtcggtggaaatgtatctggtcagtgagtgtattgagcatatcctgtccagtgggctggcctgcgatgtgctgcgtataccggatgaaccgccccgccgctggtttgaccgttgtgttctgcgggaagttgtccgggaagcccgggccgaaatccgtagcgtggcggatgccctggcaaaaatcaggggctga

SEQ ID NO: 486536 - DNA, 222 bp, Shigella sonnei; identical to SEQ ID NO: 486477

SEQ ID NO: 486537 - DNA, 444 bp, Shigella sonnei
atgtctgcctggaaaaatgcgggattcagcgttgttggtcacctggtcttcaccaaaaactacacatcgaaggccgcatatgtgggctatcgccacgaatgtgcctacatcctggcaaaaggccgtccacgtctgccacaaaaaccgctgccggacgtgctgggctggaaatattcaggcaatcgtcatcacccgacggaaaagcccgttaccagcctgcaaccactgattgagagcttcacacatccgaacgcgattgtgctggacccgtttgcaggcagcggctcaacctgcgtggccgccctccagtccggacgccggtatatcggtatcgagctgcttgagcagtatcaccgtgccgggcagcaacgccttgccgccgtgcaacgggccatgcagcagggggccgcgaatgatgactggtttatgccggaggctgcgtaa

SEQ ID NO: 486538 - DNA, 198 bp, Shigella sonnei; identical to SEQ ID NO: 263519

SEQ ID NO: 486539 - DNA, 234 bp, Shigella sonnei; identical to SEQ ID NO: 486433

SEQ ID NO: 486540 - DNA, 720 bp, Shigella sonnei
atgagcgcacgttcacgggcactgatccccctcagcgcagaacaacaggccgccatgcaggctgtggctgtcacagaacaacgtcgtcgtcagggacgcacacttccagcatggccttatgccagcgctttctttcgctgcctgaatggcagtcgccggatttcgctgaccgatctccgcttttttgctcctgcgctgacgaaggaggaatttcatggcaaccgtctcctgtggctggctgcagtggataaactgattgaaagttttggagaagtctgtgttcttcccctgccatccgatgcggggcaccgtctgttcccgtccgtgccttttcgtgaaggtgagcgtcgtcgtcagaaaaccacgctgacagagcagaaatacagccgccagcgggaacgtgaggcagaacgacgggaactggaataccagacatgttttgctcaggcgcagattgaccttgcgtttcatactcccgccacggtcggaagctggttgtcccgctggtctggtgttgttgaggagcatgatctggaaacgattttctgggggtggtgcgggcgttttccgtcactgtcatcatttgaccggtttttctggcaggaggaaccactctggcggctgatttttgaagccggtgaggccggtcgtggtgcaccgatacaggtacgtgcacttgagcagtggatgatcccgaacaagctggagaacgtaatatga

SEQ ID NO: 486541 - DNA, 435 bp, Shigella sonnei; identical to SEQ ID NO: 486504

SEQ ID NO: 486542 - DNA, 135 bp, Shigella sonnei
atgaagaaaggcgatgcggctgaacatgcagagcaccatatgaaagacaaccgctgggtgcctggctggatgtgtgcaccacgcccacagacggatgccactgaacgcaccgataacctggctgatgccgcctga

SEQ ID NO: 486543 - DNA, 888 bp, Shigella sonnei
atgccactgctggataagctgcgtgagcagtacggggtcggaccgctatgcagcgaactgcatattgccccgtcaacgtattaccactgtcagcaacagcgacatcatccggataaacgcagtgcccgtgcgcagcgcgatgactggctgaagaaagagatacagcacgtatacgatgaaaatcacaaggtatacggtgtgcgtaaagtctggcgtcagttgttacgggaaggtatcagagtggccagatgcactgtggcacgtctcatggcggttatgggacttgccggtgttctccggggtaaaaaggtccgtacgaccatcagccggaaagccgttgccgcaggcgaccgcgtaaaccgtcagttcgtggcagaacgacctgaccagctgtgggtggctgattttacttacgtcagcacatggcagggcttcgtctatgtggcgttcatcattgatgtgtttgccggatacattgtggggtggcgggtctcatcgtccatggagacgacattcgtgctggatgcactggagcaggcgttatgggcccgtcgaccgtccggcacggtccatcacagtgataaaggttctcagtatgtatcgctggcctacacacagcggcttaaggaagccggattactggcatcaacaggaagtacaggcgactcgtatgacaacgcgatggcggagagcatcaatggtctttacaaagcggaggtaatacaccgtaagagctggaaaaaccgtgcagaagtggaactggccatactcacgtgggtggactggtataacaatcgacgattgctggaaaggctgggccatactcctccggcagaagcagaaaaagcttattatgcttccatcggaaacgatgatctggcagcctga

SEQ ID NO: 486544 - DNA, 327 bp, Shigella sonnei; identical to SEQ ID NO: 485848

SEQ ID NO: 486545 - DNA, 267 bp, Shigella sonnei; identical to SEQ ID NO: 11114

SEQ ID NO: 486546 - DNA, 303 bp, Shigella sonnei; identical to SEQ ID NO: 484410

SEQ ID NO: 486547 - DNA, 462 bp, Shigella sonnei
atgctcaatacaatcgctgaccagatacatttccaccgccgaaaaacgtgcgccccggttcaggatggcatcgagcaccacgggcaggttttcgtcgtcctcatcgagccagcaggggtgatcgctttccttcaccaccaggcgaaagcggcgggtctggcgggtcagcaacgtctgaccggttgtggtcagcgccgccctgatacgctgcgcatcttctgccacccggcaactgacactgcgtaccgcatcgcgcactgcatcaagaactgccctgatttcgtcttcggtcagccattctccggcatacgggaaaaacacctgtgttccgtctgccggaagtaccggcagcgactgccactgactgccagacagtaccagttccgccccggttccggtcagtttctgaatggcggaggccaggagcggcggcagtacgccgccgtgacggttgatgagtaa

SEQ ID NO: 486548 - DNA, 435 bp, Shigella sonnei; identical to SEQ ID NO: 10758

SEQ ID NO: 486549 - DNA, 444 bp, Shigella sonnei
atggccgcctggaaaaatgcgggattcagcgttgttggtcacctggtcttcaccaaaaactacacatcgaaggccgcatatgtgggctatcgccacgaatgtgcctacatcctggcaaaaggccgtccacgtctgccacaaaaaccgctgccggacgtgctgggctggaaatattcaggcaaccgccatcacccgacggaaaagcccgttaccagcctgcaaccgctgattgagagcttcacccccccgaacgcaattgtgctggacccgtttgcaggcagcggctcaacctgcgtggccgccctccagtccggacgccggtatatcggtatcgagctgcttgagcagtatcaccgtgccgggcagcaacgccttgccgccgtgcaacgggccatgcagcagggggccgcgaatgatgactggtttatgccggaggctgcgtaa

SEQ ID NO: 486550 - DNA, 858 bp, Shigella sonnei
gtgactgatcttcaacaaacgtattaccgccaggtaaagaacccgaatccggtgttcactccccgtgaaggtgccggaacgctgaagttctgcgaaaaactgatggaaaaggcggtgggcttcacctcccgttttgatttcgccattcatgtggcgcatgcccgttcccgtggtctgcgtcggcgcatgccaccggtgctgcgtcgacgggctattgatgcgctgctgcaggggctgtgtttccactatgacccgctggccaaccgcgtccagtgttccatcaccacactggccattgagtgcggactggcgacagagtccggtgcaggaaaactctccatcacccgtgccacccgggccctgacgttcctgtcagagctgggactgattacctaccagacggaatatgacccgcttatcgggtgctacattccgaccgacatcacgttcacaccggctctgtttgctgcccttgatgtgtctgaggatgcagtggcagctgcgcgccgcagtcgtgttgaatgggaaaacaaacagcgcaaaaagcaggggctggattccctgggtatggatgagctgatagcgaaagcctggcgttttgtgcgtgagcgtttccgcagttaccagacagagcttaagtcccgtggaataaaacgtgcccgtgcgcgtcgtgatgcgaacagggaacgtcaggatatcgtcaccctggtgaaacggcagctgacgcgtgaaatctcggaagggcgctttactgctaatggtgagacggtaaaacgcgaagtggagcgtcgtgtgaaggagcgcatgattctgtcacgtaaccgcaattacagccggctggccacagcttccccctga

SEQ ID NO: 486551 - DNA, 981 bp, Shigella sonnei
atggcctacctgacggtatggcagggcgatgacgtacagcgccgggtgaaaggtgtggtgacctggtttgaactgggggagaacgacaaaaaccagatgctgtacagcatgaaggtatgcccaccgctgtggcgcacagggctgcgccagaacttccgtatcttccagaatgaggacatcgaaagcatcctcgcgacgatcctgaaggaaaacggtgtgaccgagtggagtccgctgttcagcgagccgcatccttcccgtgagttttgtgtccagtacggcgaaactgattacgatttcctgtgccggatggcggcggaggaaggcatcttcttttatgaggagcacgcgcaaaaaagtaccgaccagagcctggtcctgtgcgacaccgtgcgttatctgccggagtcctttgagatcccctggaacccgaacacccgtaccgaggtaagtaccctctgcatcagccagtttcgctacagcgcacaaatccgtccttcttccgtagtgaccaaagactacacctttaaacgacccggctgggcagggcgttttgatcaggaaggccagtaccaggattaccagcgcacacagtatgaagtgtatgactaccccggacgtttcaagggtgcccacgggcagaactttgcccgctggcagatggatggctggcgcaacaacgcagaagtggcgcgcggaacaagccgttcgccggagatatggccgggacggcgaattgtgctgacggggcatccgcaggcgaacctgaaccgggaatggcaggtggtggcgagcgatcttcacggcgagcagccgcaggcggtgccgggacggcaggggttcaggcaccacgctggagaaccactttgcggtaataccggcagaccggacatggcggccacagccgttgctgaaaccgctggtggatggcccgcagagcgccgtcgtgacgggaccggcaggcgaggaaatcttctgtga

SEQ ID NO: 486552 - DNA, 501 bp, Shigella sonnei; identical to SEQ ID NO: 486457

SEQ ID NO: 486553 - DNA, 303 bp, Shigella sonnei; identical to SEQ ID NO: 484410

SEQ ID NO: 486554 - DNA, 327 bp, Shigella sonnei; identical to SEQ ID NO: 486130

SEQ ID NO: 486555 - DNA, 501 bp, Shigella sonnei; identical to SEQ ID NO: 486470

SEQ ID NO: 486556 - DNA, 504 bp, Shigella sonnei; identical to SEQ ID NO: 486394

SEQ ID NO: 486557 - DNA, 327 bp, Shigella sonnei; identical to SEQ ID NO: 486130

SEQ ID NO: 486558 - DNA, 303 bp, Shigella sonnei; identical to SEQ ID NO: 21213

SEQ ID NO: 486559 - DNA, 366 bp, Shigella sonnei
atgatcccgggcggcccattcacgtttccacaatgcctgttcagcggtctgaatcagggacgccagcagttcagcagggacggtcacctggcggttttcgctcacgttattgatgatctccatcgccacgccggaagaaataccggattcagtccgctggtcttccgggatgtcctccaggcgcgccaggacggttctgatttcatgatcggacagggaaatatccattccgtcagcgagggcctgaatctcttccggggaccagataaccagcatcagcggcatgtctcccggatactttgctgccagcgcccggcagagcgtttcgcatgttccgtacattctcatctccttctcagtctttaa

SEQ ID NO: 486560 - DNA, 444 bp, Shigella sonnei; identical to SEQ ID NO: 486549

SEQ ID NO: 486561 - DNA, 276 bp, Shigella sonnei; identical to SEQ ID NO: 484087

SEQ ID NO: 486562 - DNA, 216 bp, Shigella sonnei; identical to SEQ ID NO: 485850

SEQ ID NO: 486563 - DNA, 303 bp, Shigella sonnei; identical to SEQ ID NO: 484410

SEQ ID NO: 486564 - DNA, 789 bp, Shigella sonnei; identical to SEQ ID NO: 485823

SEQ ID NO: 486565 - DNA, 309 bp, Shigella sonnei
atggcccccgtggtgttgtcaggtgcatacctgcaacgtgcgggggttttctctctccagcaaccaatgccaccagggattaagcccccgcaacattgcgcctcaccggaatccttccggcttgacgctgattctacgactgtttttctgttccggaatccgtctcatcttcactctgtgctgcgcattccgcagaatattatccgcttgcaaccgttgcatttttcttacgaaaaaggccgcagagtttcactcctgcggcctggtccgggcgcaaattgccattacggcagcctgacgcccacatga

SEQ ID NO: 486566 - DNA, 276 bp, Shigella sonnei; identical to SEQ ID NO: 484087

SEQ ID NO: 486567 - DNA, 303 bp, Shigella sonnei; identical to SEQ ID NO: 21213

SEQ ID NO: 486568 - DNA, 303 bp, Shigella sonnei; identical to SEQ ID NO: 21213

SEQ ID NO: 486569 - DNA, 327 bp, Shigella sonnei; identical to SEQ ID NO: 485848

SEQ ID NO: 486570 - DNA, 258 bp, Shigella sonnei
ttgcgcctgagcgttctgctgtggtgcactccccagcatctgcatggtgcccgtggtcttaacaagaatttcagtgatgtagcgggtgatgccgttgtcgtcccagctacgggtacggagttgtccctcgatgtagacctgcgcgcccttgcgcagatattcacctgccacttccgcgagcttgccgaacaacaccacgcgatgccattctgtctgctcccgcatctcccccgtctgtttgtcacgccagctttctga

SEQ ID NO: 486571 - DNA, 441 bp, Shigella sonnei; identical to SEQ ID NO: 478325

SEQ ID NO: 486572 - DNA, 552 bp, Shigella sonnei
atggcgatacttggatattgcagggtgagtacagatgaccaatccatcactaaccagcaaatgcaaattgaagaggcagggtacaacattgctaaatggttcactgatgaagctgtcagtggttctgtcaaagcttctttaagaaacggtttcagcagactattagcttatgcacgagaaggtgacaccgtagttgtggtagctgtagaccgtcttggacgtgacacaattgatgtgttatcaacggttaaagcgctacaggctaaaggtgtgacagttatcagccttagagaagggtttgacttatcaagcgctatgggtgaagcaatgttaggcattatgtcaacgttggcacagcttgaaagaagcttgatagcagagcgtagaaaggctggtattgaacgtgctaaagctgaaggggtacatatggggaggcctgtaaaagcttcttcagaggctgtacagacgcttatttcacaaggtaagacgaggttgcagattcaggaagagttaggaatctctagagcaacttattacagacttgctaaataa

SEQ ID NO: 486573 - DNA, 642 bp, Shigella sonnei; identical to SEQ ID NO: 486151

SEQ ID NO: 486574 - DNA, 498 bp, Shigella sonnei; identical to SEQ ID NO: 486152

SEQ ID NO: 486575 - DNA, 288 bp, Shigella sonnei; identical to SEQ ID NO: 5261

SEQ ID NO: 486576 - DNA, 348 bp, Shigella sonnei; identical to SEQ ID NO: 485869

SEQ ID NO: 486577 - DNA, 561 bp, Shigella sonnei
atgacagagcagaagcgaccggtactgacactgaagcggaaaacagaaggggggacgcctgtccgcagccggaaaaccatcatcaatgtcaccacgccaccaaaatggaaggtgaaaaagcagaagctggccgagaaagcagcccgggaagcagagctggcggcaaaaaaagcgcaggccagacaagcgctgtccatttatctgaacctgcccacgctggatgaggctgtgaacaccctgaagccctggtggccgggattatttgacggtgacacgccccggcttctggcctgcggtatccgggacgtgttactggaagacgtggcgcagcggaatatcccgctctcgcataaaaaactgcgcagggcgctgaaggccatcacccgttcagaaagctatcttggtgccatgaaagccggtgcctgccggtatgacacggaagggtatgtgacggagcatatttctcaggaggaggaagcgtatgcggcagcgcgtctggataaaatccgccgccagaaccggataaaggcagaacttcaggccgtgcttgatgagaaataa

SEQ ID NO: 486578 - DNA, 441 bp, Shigella sonnei; identical to SEQ ID NO: 478325

SEQ ID NO: 486579 - DNA, 543 bp, Shigella sonnei; identical to SEQ ID NO: 21048

SEQ ID NO: 486580 - DNA, 279 bp, Shigella sonnei; identical to SEQ ID NO: 11573

SEQ ID NO: 486581 - DNA, 222 bp, Shigella sonnei; identical to SEQ ID NO: 486481

SEQ ID NO: 486582 - DNA, 447 bp, Shigella sonnei; identical to SEQ ID NO: 475809

SEQ ID NO: 486583 - DNA, 135 bp, Shigella sonnei; identical to SEQ ID NO: 10658

SEQ ID NO: 486584 - DNA, 267 bp, Shigella sonnei; identical to SEQ ID NO: 11114

SEQ ID NO: 486585 - DNA, 318 bp, Shigella sonnei
gtgaagtggccttgtgggtatgacctgaatatcagcagtcagggggaaaacttcattcaggtagatttcgacacgccgtggtgtcagccggaaagcgacgttgttgcagaattaagccgccgtttcggctgcacgctggagcactggtacgccgaacagggctgcaatttctgtggctggcagttgtatgagcgcggagagctcgttgatgtgctgtggggggaactggaatggtcttccccgacagatgacgatgagctgccggaagtcaccggacctgcgtggatagtcgacaaggtggcgcattatggcggatga

SEQ ID NO: 486586 - DNA, 318 bp, Shigella sonnei; identical to SEQ ID NO: 8580

SEQ ID NO: 486587 - DNA, 159 bp, Shigella sonnei; identical to SEQ ID NO: 486510

SEQ ID NO: 486588 - DNA, 285 bp, Shigella sonnei
atgccaaactgcgatcgattcagatgccattttgcacctcacgcgctacgcacgctgaaactggctgacgagcaaatcgccgaactctccatgctctgcggcttcgatgatgatcttgccgcacagacaacgcaggccagcaaccgtatccgcggccttctgacccagatacatccggcactggagcgcgttctcggtccgagacttgagcacccggcggtactcgatcttctccagcgatatccctcaccagaaaaactcgcttcgctgggcttcgctgggtga

SEQ ID NO: 486589 - DNA, 258 bp, Shigella sonnei
ttgcgcctgagcgttctgctgtggtgcacgtcccagcatctgcacggtgcccgtggtcttaacaagaatttcagtgacgtaacgggtgataccgttatcttcccagctacgggtacggagttgcccctcgatgtagacctgcgcgcccttgcgcagatattcaccagccacttccgcgagcttgccgaacagcaccacgcggtgccattccgtctgctcccgcatctcccccgtctgtttgtcgcgccagctttctga

SEQ ID NO: 486590 - DNA, 192 bp, Shigella sonnei; identical to SEQ ID NO: 10832

SEQ ID NO: 486591 - DNA, 345 bp, Shigella sonnei
gtgaaaaaattacgtatcggcgttgtgggattaggcggcattgcgcaaaaagcgtggttaccggtgctggcggcagcgtctgactggatgttacaaggagcctggtcgcctacgcgcgcgaaagccctgccaatttgtgaaagctggcgcattccttatgccgattcgttatccagccttgccgccagttgcgatgcggtttttgtgcattccagcaccgccagccactttgacgtggtcagtacgttactcaatgcggtgtacatgtctgtgtcgataaaccgctggcagaaaatctgcgcgatgctgaacggctggtggaactggcggcgcggaaaaaactga

SEQ ID NO: 486592 - DNA, 225 bp, Shigella sonnei
gtggcttattacagcattggtgatgttgctgaacgttgcgggattaatcctgtcactctccgggcctggcaacgccgctacggtttgttaaaaccacagcgcagtgaaggcggacaccgactctttgatgaagaagacatacaacgcatcgaagagatcaagcgttggataagtaatggcgtccctgtaggcaaagttaaagcattactggaaaccaccagctag

SEQ ID NO: 486593 - DNA, 276 bp, Shigella sonnei; identical to SEQ ID NO: 484087

SEQ ID NO: 486594 - DNA, 372 bp, Shigella sonnei
atgggagaaatgtcgaataataatataaaagttcatttaaatgaaccagagataatatttttacatgccgttcttcagcaatacttaagccaaagttgcggtgcgtttgtgtgcatggcagcccaggaagtgattgaacaaagggaaagcaattctgacagcgccccctatacgttattaaaaaactatgctgacagatttaaaaaatattcagcagaagagcagtacgaaattgattttcaacatcgactggtaaacaggaattgttatttagataaatatggcgatgcaaatatcaatgattattatagagacttagaaataaaacactcacaacgcaaaaatagagcatcaggaaaaagagtaagttaa

SEQ ID NO: 486595 - DNA, 738 bp, Shigella sonnei
atgcctgaccattctctttttcgattacggattcttccgtggtgcattgcgctggcaatgtcagggagttatagcagtgtctgggctgaagacgacattcagtttgattcccgttttctggaattaaaaggcgacacaaaaattgatctgaagcgtttttccagccagggatatgttgagcccggaaaatacaatttacaggttcaactaaataaacagccattggcggaagagtacgatatttactggtatgctggtgaagatgacgcgagcaaaagctatgcttgtctgacaccggaactggtagcgcagtttggtttaaaagaagacgtggcgaaaaatctgcaatggagccacgatgctaaatgcctgaaatccggtcaactggaaggcatggaaattaaggctgatttaagccagtccgcattagtcatttcactgccacaggcttacctcgaatatacttatcccgactgggatccgccttcacgttgggatgacggcatctccgggatcgtcgcggactacagcatcaacgcacaaacccggcacgaagaaaatggcggtgatgatagtaacgagatcagcggcaacgggacggtcggggttaacctggggccgtggcgtatgcgtgctgactggcagactaactatcaacatactcgcagtaatgatgacgatgaattcagcggcgatgaaactcaaaaaaaatgggagtggagtcgctactatgcctag

SEQ ID NO: 486596 - DNA, 1404 bp, Shigella sonnei; identical to SEQ ID NO: 481853

SEQ ID NO: 486597 - DNA, 1404 bp, Shigella sonnei; identical to SEQ ID NO: 481858

SEQ ID NO: 486598 - DNA, 3099 bp, Shigella sonnei
atgggggatattatgcgtcccattccgtttgaggaacttttgacgcgcatatttgatgaataccaacaacaacgctcaatctttggtattcccgagcaacagttttactcacctgtaaaaggtaaaactgttagcgtcttcggtgaaacctgtgccactcccgtcggccctgccgctggcccgcacacgcagctcgcgcaaaatattgtcacttcctggctgactggcggacgcttcatcgaactaaaaaccgtccaaattcttgaccgcctggagctggaaaagccctgtattgatgccgaagacgaatgctttaacaccgaatggtctaccgaatttaccttgcttaaagcctgggatgaatacctcaaagcctggtttgccctgcaccttctcgaagcgatgttacagccttctgattccggtaaatcgttcatctttaatatgagcgtcggttacaacctcgaaggtattaagcaaccgccgatgcaacagttcatcgacaatatgatggacgcatctgaccatccgaaattcgctcaatatcgcgatacgctgaataaattactccaggatgacgcatttttagcccgccacggattgcaggaaaaacgcgaaaacttgcaagccttacccgctcgcatccccaccagtatggtgcagggcgtcaccctctccaccatgcacggctgtcctccgcatgaaatcgaagccatttgccgctacatgctggaagaaaaagggctcaacacctttgtcaaacttaacccgaccttactggggtacgcgcgtgttcgtgagatcctcgatgtctgcggtttcggttacataggcttaaaagaagagtcatttgatcacgacctcaagctgacgcaagcactggaaatgctggagcgcctgatggtactggcaaaagaaaaatcactcggctttggcgtaaaactgactaacactctcggcaccatcaacaataaaggcgcactgcctggtgaagagatgtatatgtcaggccgtgcgctgttcccgctctccatcaatgttgcagcagttctctctcgcgcctttgacggcaaactgcccatttcttattccggtggtgccagtcagctgactatccgcgatatttttgatacaggtattcgccctattactatggcaaccgacctgctgaaacctggcggctatctgcgcttaagtgcctgcatgcgcgagctggaaggctccgacgcctggggacttgaccatgttgacgtcgaacgactgaacagactggcagcagacgcgttaaccatggaatacacccagaaacactggaagccagaagagcgtattgaagtggcagaagacctgccgctgaccgattgctacgttgccccctgtgttactgcctgcgctatcaagcaagatattccggaatacatccgtctgcttggcgaacaccgctatgccgacgcgctggaactcatctaccaacgcaacgccctacctgccattaccggtcatatttgcgatcaccagtgccaatacaactgtacccgcctggattacgacagtgcgctgaatatccgcgaactgaaaaaagtcgcgctggaaaaaggttgggatgaatataagcaacgctggcacaaacccgccggttctggttcacgccatccggttgccgtgattggtgcaggtccggcgggtctggcagcaggttacttccttgccagagcgggccatccggttacgctgtttgaacgcgaagccaatgctggcggcgtggtgaaaaatatcattcctcagttccgtattcctgcagagttaattcagcacgatatcgattttgttgccgctcacggcgtgaaatttgagtatggctgctcacccgatttaaccgttgaacagttaaaaaatcagggcttccactatgttctgattgccaccggcactgataaaaatagcggtgtgaaactggcgggcgacaaccaaaatgtctggaaatcactccccttcctgcgtgaatacaacaagggtacagcgctcaagctgggcaaacatgtggtcgttgtcggggcgggtaacaccgcaatggactgcgctcgtgcggcgttacgcgttccaggcgtagaaaaagcaacgatcgtttaccgtcgttcactacaagagatgcccgcatggcgcgaagagtatgaagaagcgttgcacgacggcgtagagttccgtttcctgaataatccggaacgtttcgatgctgatggcaccttaaccttgcgcgttatgtcgcttggcgaaccggatgagaaaggtcgtcgccgtccggttgaaaccaacgaaacagtaacactgcatgtagacagcctgatcaccgccattggtgaacagcaggatactgaagccctgaatgcgatgggcgtgccgctggacaaaaacggctggccagacgtcgaccataatggcgaaactcgtctgactgacgtctttatgatcggcgacgtacagcgcggaccatcctccattgtcgctgctgtcggaaccgcgcgtcgggcgaccgatgccatccttagtcgggaaaatatccgttcccaccagaacgataaatactggaacaacgtcaatccagcggaaatctatcaacgtaaaggcgatatctctatcacgctggtgaacagtgacgatcgtgacgcgtttgtcgcccaggaagccgctcgctgcctcgaatgtaactacgtttgcaacaagtgtgtggatgtctgcccgaaccgcgccaacgtctccattgcagtccctggcttccagaatagattccagacgctgcacctcgacgcttactgtaacgaatgcggcaactgcgctcagttctgtccgtggaacggtaaaccatacgaagacaaaatcaccgtcttcagcctggcgcaagactttgataacagcagcaccccaggcttccttgtggaagattgccgggtacgagtacgtctgaataaccaaagctgggtgttaaacatcgacagcgaaggtcagtttaacaacgtaccaccggagctgaacgatatgtgccgcatcatcagccatgtccaccagcatcatcattatctgctgggccgcgtggaggtgtaa

SEQ ID NO: 486599 - DNA, 654 bp, Shigella sonnei
atgagcgccatagattcccaacttccctcatcttctgggcaagaccgcccaactgatgaggttgaccgcatattatcaccaggaaagctgatcatactcggtctgcaacacgtccttgtcatgtacgcaggtgcagtcgctgttcctcttatgattggtgaccgactgggcctctcaaaagatgctattgcgatgctcattagctcggatctcttttgctgcgggatcgtcacattattgcaatgtatcggtatcggccgctttatggggatccgcctgccggtgattatgtcggtgacctttgctgctgtaacaccaatgatagccattgggatgaacccggatatcggcctgctggggatatttggtgccactatcgccgcgggttttatcaccacattattagcgccatttattggtcgcttgatgcctttattcccgccactggttaccggtgtggttattacttctattgggcttagcatcattcaggtgggtattgactgggccgccggaggtaaagggaatccgcaatatggtaatcccgtttatttaggtatctcctttgctgtcttaatttttatcttgctcattactcgctatgcgaaaggatttatagccgctgggtgtgtatttcttcgggaattatattaa

SEQ ID NO: 486600 - DNA, 198 bp, Shigella sonnei
atggccaaaaattatgcggcgctggcacgctcggtgatagcggcactggcttgccagccactcaatggcagcgccagggttatttaccagcgtgcaattcttcgatccggcgaatccaatgagcatcgtctgggtgttcgcggtcatggcgctggcggtggtgctgtcgtttatcctcacactgttgctcggctttga

SEQ ID NO: 486601 - DNA, 1440 bp, Shigella sonnei; identical to SEQ ID NO: 481968

SEQ ID NO: 486602 - DNA, 786 bp, Shigella sonnei; identical to SEQ ID NO: 482519

SEQ ID NO: 486603 - DNA, 2505 bp, Shigella sonnei
atgtataaaaaattaaaattaaccacaataagcgaattgattaaaaatatttattgttcattatccgttctcatcattggttgtgcgtcagcttatgccgttgaattcaacaaagatttaatcgaagccgaagatcgtgaaaacgttaacctttcccaatttgaaactgatggccaattacccgtaggtaaatactcattaaacgctcttattaataataaaaggacgccaatccatctggacctgcaatgggtattaattgataaccaaactgcagtttgtctgactccagagcaattaacattattaggctttactgatgagattattgaagaggctcagcaaaacctgatcgatggttgttaccctatcgaaaaagaaaaacaaattacaacttatctcgataaagggaaaatgcaattatccatatctgcacctcaggcatggttaaaatacaaagatgcaaactggacgcctcctgaactttgggatcatggtattgctggggcatttcttgactacaatttatatgcctctcattatgcaccacatcagggcgataattcacaaaatataagttcctatgggcaggctggggttaatcttggggcctggcgcctgcgtactgattaccagtacgatcagtcatttaacaatggcaaaagccaggcgaacaacctggattttccgcgtatttatttgtttcgcccaatcccagcaattaatgcaaaactaactataggtcaatacgatactgaatcctctattttcgactctttccatttttctggcgtttcgttgaaaagcgatgagaatatgttgccgcctgatctacgtggttacgcaccgcaaatcacgggtgttgcacaaacgaatgcaaaggtcactgtctcacagaacaaccgtattatttatcaagaaaatgttcctcctggcccatttgctattactaatttattcaatacattacaggggcaactggacgtcaaggttgaagaagaggacgggcaagtcacgcaatggcaagttgcatctaatagtattccttatctgacgcgtaaagggcagattcgctacaccactgctatgggtaaaccgaccagcgttggtggtgattccttacaacaacccttcttctggactggtgaattctcatggggttggctgaacaatgtatccctgtatggtggttcagttttaacaaaccgtgattatcaatctctggctgccggcgttggctttaaccttaactcattgggttcattatcttttgatgtcacacgatctgatgctcagttgcataatcaggataaagaaacgggttatagctaccgcgctaactattcaaaacgttttgaatctaccggtagccagctcactttcgctggttaccgtttctctgataaaaactttgtgacaatgaatgaatatatcaatgacactaaccattacatgaattatcagaatgaaaaagagagttatattgtcacgtttaaccagtatcttgaatcattaaggttaaatacatacgtaagtttggctcgtaatacttactgggacgccagcagtaatgtgaattattcattatcacttagccgcgattttgatatcgggccattaaaaaacgtctccgcttctctaacatttagccgaataaactgggaagaagacaaccaggatcaactgtacctaaatatttcgattccctggggaaccagtagaacattgagctatggtatgcaacgaaatcaggataacaagatttcgcatactgcttcgtggtatgactcttccgatcgaaataattcctggagcgtttctgcttcaggcgacaatgatgaattcaaagatatgaaagcgtcactacgcgccagttatcagcataataccgagaacggtcgtctctatctctccgggacatcacagcgagacagttattattctctgaatgccagttggaatggttcattcacggcgactcgtcacggagccgctttccatgactatagtggtagtgctgactcgcgttttatgatcgacgcagatggtgcagaagatattccgttgaacaataaacgcgcggtaactaatcggtatggcatcggagttattccatcagtcagcagttacataacaacatcattaagcgttgatacccgaaatcttccagaaaatgtggatatcgaaaactcggttatcaccaccaccttaaccgaaggtgctattggctacgccaaacttgatacccgcaagggctatcaaatcatgggggttattcgcctggcagatggtagtcacccaccactggggattagcgtaaaagataaaaccagccataaagaattaggactggttgctgatggcggctttgtatacctcaacggcattcaggatgacagcaaacttactttacgctggggtgataaatcctgttttattcaaccacccaatagcagcaacttaaccaccggaacggttattttaccgtgtattagccaaaattaa

SEQ ID NO: 486604 - DNA, 867 bp, Shigella sonnei; identical to SEQ ID NO: 482327

SEQ ID NO: 486605 - DNA, 699 bp, Shigella sonnei
atgtcaataattaattccacgccagtgcgtgttattgtcattgtaggatgtgatggttcaggtaaatcgaccctcacggcaagcctggtaaatgaactggcagcaagaatgccaacagaacacatttatctcgggcaatcgtccgggctaattggcgaatggatttcacagctccctgttattggcgcaccttttgggcgttatctgcgaagtaaagcggcacatgtgcacgaaaaaccctcaacaccgcctggcaatattactgctctggttatctatctgctttcctgctggcgggcgtacaagtttcgcaaaatgttgtgtaaaagccagcaaggctttctgctcatcaccgaccgctacccgcaggttgaagtgccgggttttcgctttgatggcccgcaattggcaaaaaccacgggcggtaacggttggataaaaatgttaaggcagcgcgagctgaagctgtaccaatggatggcatcttatttgcccgtattgttgattcgtcttggcattgatgaacaaaccgcgtttgcgcgtaaacctgaccaccaactggcagcgttacaggaaaaaatcgccgttacgccgcaactgactttcaacggcgccaggatccttgaactggatggtcggcaaccagccgatgaaatcctgcaagcgtcactacgtgcaattcacgccgcgctttcctga

SEQ ID NO: 486606 - DNA, 1359 bp, Shigella sonnei
ttggcgggttttaacatcaaacattggtttgcagatggcgcgtttcgcaccattattcgcaatagcgcctggttaggctccagtaatgtcgtgagcgccttgctggggctgttggcgctctcgtgtgccggtaaagggatgacgcccgccatgtttggcgtactggtgattgtgcaatcgtacgccaagtcgatcagcgattttattaagtttcagacatggcagctggtggttcagtacggaacgccagccttgaccaacaataatccgcagcaatttcgcaatgtcgtctcattttccttctcgctggatatcgtcagcggcgcggtggcgattgtcggcggcattgccttactgccattcctttcccattcattaggtctggatgaccaaagcttttggctggcggcgctgtattgcacgctcattccttcaatggcttcctccacgccgaccggcattctgcgtgcggtagatcgcttcgatttaattgctgtacagcaggcgacgaaaccttttctgcgcgcagcggggagcgtcgtagcctggtattttgactttggttttgcgggttttgttattgcctggtacgtgtcgaatctggttggcggcaccatgtactggtggtttgcagcgcgcgaattacgccgcagaaatatccataatgccttcaaattgaatctgtttgagtctgcccgacacatcaaaggcgcgtggagttttgtctggtcaaccaacattgcccactccatctggtcggcgcgtaactcgtgcagcacagtgctggtggggatcgtgttaggacccgctgccgccgggttatttaaaatcgccatgacattcttcgacgccgccggaacgccagcgggtttgctgggtaaaagtttttacccagaggtgatgcgtttagatccgcgcaccaccagaccgtggttgttaggtgtgaagtccggtttactggcgggcggaatcggtattctggtggcgctcgcggtgttgatcgccggcaagccgctcatttcgctggtgtttggcgttaagtatctcgaagcgtatgacctgattcaggtgatgctgggcgcaattgtgatttcgatgctgggtttcccgcaggagtcattgctattgatggcgggaaaacagcgcgcttttctcgtggcgcaaaccatcgcctcaatcggctacatcgtattgctgttcatgttctgtcatctgtttggtgtgctgggagcagcgtttgcttacttcggtgggcaatgtctggatgtggtgctctcgttaattccaactttaaaggcattttttcagcgtcattccttgctttataacgcagccggggtaatgactccaacttattga

SEQ ID NO: 486607 - DNA, 276 bp, Shigella sonnei
gtggcttctgtttctatcagctgtccctcctgttcagctactgacggggtggtgcgtaacggcaaaagcactgccggacatcagcgctatctctgctctcactgccgtaaaacatggcaactgcagttcacttacaccgcttctcaacccggtacgcaccagaaaatcattgatatggccatgaatggcgttggatgccgggcaactgcacgcattatgggcgttgacctcaacacgattttacgtcacttaaaaaactcaggccgcagtcggtaa

SEQ ID NO: 486608 - DNA, 204 bp, Shigella sonnei
atgatcaatcgtcaactttcacgtctgctgttgtgcagcattctcggcagcacgacgctgatttccggctgtgccttggtacgcaaggattctgcgcctcatcaacagctcaaaccggaacaaatcaaactggccgatgatattcatcttgccagctccggctggccgcaggcgcagtggtggaaacaactcaatgacccgtag

SEQ ID NO: 486609 - DNA, 1119 bp, Shigella sonnei; identical to SEQ ID NO: 484375

SEQ ID NO: 486610 - DNA, 1221 bp, Shigella sonnei
atgtctatttataaaattcctcttccgctcaatattctggaagctgcacgagagcgtattacctggacactcaacaccctaccccgcgtttgtgtctcattttctggcggcaaaaactctggtttaatgctgcatctgacagccgaacttgcccgacaaatgggcaaaaaaatctgcgttttgtttatcgactgggaggcgcaattctcttgcaccattaactatgttcagtccctgcgcgagttgtacaccgatgtcatcgaagagttttactgggttgcgctcccgcttacgacgcaaaattccctttcacaataccaacccgaatggcagtgctgggaacctgatgtcgaatgggtgcgtcagcccccgcaagatgcgataaccgatcctgactttttctgcttttaccagccaggcatgaccttcgaacaatttgtacgtgagtttgccgaatggttttcacaaaaacgtccggtggcgatgatgatcggcatccgtgcggatgagtcctacaaccgttttgtcgccatcgccagtttaaataaacaacgttttgccgacgataaaccatggactacggccgcaccaggcggtcatagctggtacatttaccccatttacgactggaaagtggctgatatctggacctggtatgcaaatcatcaaaatctctgcaacccactgtataacctaatgtatcaggcaggcgttcctctgcgtcatatgcgaatttgcgaaccttttggcccggagcaacgacaaggattatggctctatcacgttatcgaaccggatcgctgggctgctatgtgcgcacgagtcagcggggtaaaaagtggcggcatttacgccggacatgataatcatttctatgggcatcggaaaatcctcaagccagaacatttagactggcaagaatatgcattattgctgctcaatagcatgccggaaaaaacagctgagcattaccgcaataaaatcgccatttatttgcactggtatcagaaaaaaggcatcgaggttccacaaacccagcaaggggacattggcgcgaaagatatcccctcctggcggcggatatgcaaagttttactcaataacgattactggtgtcgggcattatcatttagtcctacgaaagcgaagaactatcagcgttataacgaacggataaaaggaaaacgtcaggaatgggggatactatgcaacaacgattaa

SEQ ID NO: 486611 - DNA, 903 bp, Shigella sonnei
atggccaatctctacgacttgaaaaaattcgacttaaatcttcttgtcatatttgagtgtatttaccagcatttaagcattagcaaagctgctgaatcactatatatcaccccatcagccgtgagccagtcgttacaacgcttacgtgcgcaatttaatgaccctgtattcattcgctcaggaaaaggtatcgcgccgacgacaacagggttgaatctgcatcaccatcttgagaaaaacctcaaaggccttgaacaaacaattaatatagtcaataagtccgaactaaagaaaaactttattatctacggccctcagctcatttcttgctctaataatagtatgctgatccgctgcctacggcaagatgcctctgtcgagattgagtgccatgatatcctcatgtcagcagagaatgctgaagaactgttggttcaccgcaaagccgatctggtgatcacccaaatgccagtgatcagccgttccgtcatttgcatgccattgcatacaattcgcaatactctaatttgtagtaataagcatccgcgaattactgacaatagcacttatgaacaaattatggcagaagagttcacccaattaatatccaaatcagcaggagttgatgatattcaaatggaaatagacgagaagtttatgaatcgcaaaatttcatttcgtggttcctctttgctgacaataattaatagcattgcagttacagatttactgggaatagtcccctatgaactttataactcccaccgtgactttcttaatttaaaagagataaaactagaacatccgttaccttcaataaagctttacatttcctataataaatcttctttaaataatttggtgttctcccgatttattgaccgtctaaatgagagtttttga

SEQ ID NO: 486612 - DNA, 1041 bp, Shigella sonnei
atgaaaaggaatttattatcttccgctattatagtcgccatcatggccctcggtctgacgggttgtgatgataaaaaagccgaaacagaaacgcccccgcctgccaatagtcaacctgccgcaccagctcctgaagctcccgttgcaaaagcagaagctaaacctgaaacacctgcgcaaccggtggtcgatgaacaagcggttttcgacgaaaaaatggatgtctatatcaagtgctacaacaagttacagatccctgtacagaacagtctggcgcgttatgctgactggctgaaagattttaaacaggggcctaccggtaaagagagtactgtttatggcatctacggcattagtgaatccaacctcgctgagtgtgaaaaaggcgtaaaaagtgctgtggcgttaacgcctgcgctgcaacctattgatggcgtggcggtgagttatattgatgctgccgtggcgttgggtaataccattaacgaaatggataaatattacacccaggaaaattataaagacgatgcgtttgcgaaagggaaaacgctgcaccagacattcttaaaaaatctggaatcctttgaacctgtagcagaatcttatcatgcggcgattcaggaaattaatgataagcgccagcttgcggaactgaaaaatattgaagaaagagaagggaaaacattccactactactctctggcagtcatgatttcagcgaaacaaattaataacctgatttcgcaagagaagtttgatgttgatgcggcaatgaagaaagtctctgaactggaaatgctggtagcgcaggccaaagaagcggataaaggcggtatgaatttctcgttcattaattcggcagaccagtatcaactcgagactaaaaaatatgttcgccgcgtcagagataaagtcccgtactctgactgggataaagagcatcttcaggatgcaaacacaagctggatggtcgaagactcatttccacgagcgttacgcgagtacaacgaaatggttgatgactataatagcctgcgttaa

SEQ ID NO: 486613 - DNA, 621 bp, Shigella sonnei; identical to SEQ ID NO: 482718

SEQ ID NO: 486614 - DNA, 981 bp, Shigella sonnei; identical to SEQ ID NO: 372750

SEQ ID NO: 486615 - DNA, 294 bp, Shigella sonnei; identical to SEQ ID NO: 372751

SEQ ID NO: 486616 - DNA, 273 bp, Shigella sonnei; identical to SEQ ID NO: 6431

SEQ ID NO: 486617 - DNA, 501 bp, Shigella sonnei
atgacagtgatgacgctcaatctcgtcgaaaaacagccagcagctatgcgccggataattggtaagcatcttgccgtccctcgttggcaggatacatgtgattattataatcagatgatggagcgcgaacggctaacagtttgctttcatgcgcagttaaaacaacgtcacgcaacgatgcgttttgaagaaatgaacgacgtcgaacgtgaacggctggtttgtgcaattgatgaattgcgtggggcattctcaaaacgccgtcaggttggcgcaagtgagtatgcatatattagttttttaacagtcagtcagcgtcgtactttatttatgcatgccggattgactgaaaaagaattcaatcagccatactggcgaattaatgaagagtcatgttactggcgtgatgctttattccgtgcattacgtgaactattcagtctgtttgagtatgcaccgacaattctgacgtcggtaaaaccagagcaatatttgcattaa

SEQ ID NO: 486618 - DNA, 225 bp, Shigella sonnei; identical to SEQ ID NO: 372754

SEQ ID NO: 486619 - DNA, 300 bp, Shigella sonnei
atgtcctgttctcattcagttgtattactgaataacgccttaaaaatcgccgttatgaaaaatggcgacttgtctcttattcaactttgtcttgataaagaaaaacgcgacatcactgaatctgttatcgcgatttatcagaatgaattaaacctcctgtctgatgtggtcaatttacttgttaaacgcgctgtattccacaagcaaatttcctcagtggatgaactgacaaaattaacgacagaacttgccagttattgcgctgatgtatccaggaaacttaacgataaaaggagctga

SEQ ID NO: 486620 - DNA, 225 bp, Shigella sonnei
atgccggacaacatagattttattcaggaacaacaggctgaattactggagcgccagattaacgcggcaagggtaaaacattgcggtgcttctgcgctggtttgcgaagagtgtgacgcgccaattcctgctgcccgtcgtgcggcttatccgtcagccacgcgttgtgtttcctgtcagtcagtctttgaagcaaaaaacaaacattaccggagaacggcatga

SEQ ID NO: 486621 - DNA, 276 bp, Shigella sonnei
atgagtattcgtattgaaattggcgaacgttatgtcgttaccagtgacagcttccagtttattctccacgagaaaaagagagcggaaagcggtaaaaacgccggtcaggaatggctggcggtggttggttattacccgaaattaagccagctcgtttccggcctgatgcatcacgatattctgaccggaagcgcaaagtcttttgctgatttaaacgcgcaggttgagcaactcagcaagcgttgttcagaggcttttggctcatatggccgttaa

SEQ ID NO: 486622 - DNA, 2298 bp, Shigella sonnei
atggccgttaaagcctccgggcgttttgtccctccgtcagcatttgctgcaggcaccggtaaggcgtttaccggtgcttatgcatggaacgcgccacgcgaggctgtcgggcgcgaaagaccccttacacgtgacgagatgcgtcaggtgcaaggtgttttatccacgattaaccgcctgccttactttttgcgctcgctgtttacgtcacgctatgactacatccggcgcaataaaagcccggtgcacgggttttatttcctcacatccacttttcagcgtcgtttatggccgcgcattgagcgtgtgaatcagcgccatgaaatgaacaccgacgcgtcgatgctgtttctggctgagcgtgaccactatgcgcgcctgccgggaatgaatgacaaggagctgaaaaagtttgccgcccgtatctcatcgcagcttttcatgatgtatgaggaactcagcgatgcctgggtggatgcgcatggcgaaaaagaatcgctgtttacggatgaggcgcaggctcacctctatggtcatgttgctggcgctgcacgtgctttcaatatttcccctctctactggaaaaaataccgtaaaggacagatgaccacgaggcaggcatattctgccattgcccgtctgtttaacgatgagtggtggattagtcagcttaaaggccagcgtatgcgctggcatgaggcgttactgattgctgtcggggaggtcaataaagaccgttctccttatgccagtaaacatgccattcgtgatgtgcgtgcacgccgccaggcaaatctggaatttcttaaatcgtgtgatctcgaaaacagggaaacaggcgagcgcatcgaccttatcagtaaggtgatgggcagtatttctaatcctgaaattcgccggatggagctgatgaacaccattgccggtattgagcgttacgccgccgcagaaggtgatgtggggatgtttatcacgctgaccgcgccgtcaaagtatcacccgacacgtcaggttggaaaaggcgaaagtaaaaccgtccagctaaatcacggctggaacgatgaggcatttaatccaaaggatgcgcagcgttatctctgccgtatctggagcctgatgcgcacggcattcaaggataatgatttacaggtctacggtttgcgagtcgtcgagccacaccacgacggaacgccgcactggcatatgatgcttttttgtaatccacgccagcgtaaccagattatcgaaatcatgcgtcgctacgcgctcaaagaggatggcgacgaaagaggagctgcgcgaaaccgttttcaggcaaaacatcttaatcggggcggtgctgcggggtatatcgcgaaatacatctcaaaaaatatcgacggctatgcactggatgggcagctcgataacgatagcggcagaccgctgaaagatactgccgcggctgttaccgcatgggcgtcaacgtggcgcattccgcaatttaaaacggttggcctgccgacaatgggggcttaccgtgaactacgcaaattgcctcgcggcgtcagcattgctgatgagtttgacgagcgcgtcgaggctgcacgcgccgccgcagacagtggtgattttgcgctgtatatcagcgcgcagggtggggcaaatgtcccgcgcgattgtcagactgtcagggtcgcccgtagtccgtcggatgaagttaacgagtacgaggaagaagtcgagagagtggtcggcatttacgcgccgcatctcggcgcgcgtcatattcatatcaccagaacgacggactggcgcattgttccgaaagtgccggtcgttgagcctttgactttaaaaagcggcatcgccgcgcctcggagtcctgtcaataactgtggaaagctcactggtggtgatacttcgttaccggctcccacaccttctgagcacgccgcagcagtgcttaatctggtagatgacggtgttatcgaatggaatgacccggaggttgtgagggcgctcagaggtgcattaaaacacggactgagaagaccaaaccgtcagcaaagaaacggaagcccgttaaaaccgcatgaaatagcgccatcggccagactgacccggtcggaacgaatgcaaattacccgtatccgcgttgaccttgctcagaacggtatcaggccgcagcgatgggagcttgaggtgctggcgcgtggggcaaccgtaaattatgacgggaaaaaattcacttacccgctcgctgatgagtggtcgggattctcaacagtattagagtcaaactcagtgaagcgttaa

SEQ ID NO: 486623 - DNA, 1023 bp, Shigella sonnei
atgactgtaaaggtgatagaccttttttgtggtgctggcggattaactcatggtttgcagcttgcggggcttgatgtcgttgcaggcattgaccttgagggggaatgtaggtttccctatgaaagaaacaataaatctaagtttattgagcaagatatcgctaaagtaacaaaagaggaactgctgaggctttatggtgatgcgtctgtaaaagtattggcaggatgcgcaccttgccaacctttttcaaaatatactcaaggaaaagataaggctgatgataaaaaatggcctcttctttatgagttcgaacgtttaattcgcgaagtatctccagaaatcgtaacaatggagaacgttcctgatgtaactaaacataaagtttataatgatttttataattcattgttaaagttgggctattatgtttgggcgtctaagattgattgtgtcgaatatggaatcccacaaaaccgttcccgtcatgtattgttggcctcaaaattgggggcgattgagttagtaaaacgtgacgatgttattttgaaaacagttagagatgcaataggaaatcttcctccattagaagatggccaaacagatccaaatgatatattacatagagccagtaaattaaatccgattaataaaaaaagaattatacactctgttcctggtggtacatggaaggactggccgaaagagttggttgccgcttgtcatatgaaatccagcggtaaagggtatgctagtgtatatgggcgcatgtcttgggataagccaagtccaacaattacaactctttgttatggtttcgggaatgggcgttttggacatccagaacagcatagagcgatttctcttagagaggctgctttattgcaaactttcccgatggattatatttttgtagaagacaaaaacaagtttgttataagaagtattgggaaaatgataggtaatgctgttcctgtggaactaggaaaagcaattgggcaatcaatcaagaaccatttagaatga

SEQ ID NO: 486624 - DNA, 681 bp, Shigella sonnei
atggatcgttttcgtgaggattttgacgaaaggtcaggagagatcttggcctatttggatcttttgaaatttattgagtatgccggtgcagaactgatatcagctgatgataaagaacataagttctccattactgctcaatcacgaaaaactctaaagggagcagtatatatactgttatataacctcattgaatcaacaatgagagaagctatctgccttattcatgagactatttatgatagaaacgtagaatttgacaaactcaggaaaaatctcaggtcagaaatattaaaaagattaaaaaatgaatctgtaaatgttgaaagtttagttaatcaccttaccaaaggtatatcttgcggtatatcttatggcacgttcaacaaaaagaaaatattctcaggaaatattgatagagaggaaatcaaagaaaaatcgaaaatatatggtttttctacacattccgattacactcacactaaacatggtgaaaaattagccactgttaaacaacatcgtaatgatttatctcatggcaatgtatcatttgctgagattggaaaaaatgtttcatatcaggacttagagaatatttcattagaagtaatcgcctatcttgatgctatcgtgaataatatagagcactatataaataataatgaatatttagaacaatag

SEQ ID NO: 486625 - DNA, 1143 bp, Shigella sonnei
atggacattattgatttaaaatctcaactagaaaatgaagataatgccaagaaaagagcagagttgcttgctcagctagaggtgataaagcaaaacgctgaagagcaaattcgtgctgagcaaaaggatgtggattttgagaccaaagaatttaccgttgagttattagttaataagtatcataacggattagaggatgatactaacgaactctttgttcctgattatcaaagggattttgtttggagtgaaaaaagacaatcaaaattgatagagtctttgattttgggttttcctataccatatatatttatagcagatgttctctccgaagatcccgatttagatgggcgaattgagattgttgatggctcacaacgagttaggactatacacgcttttatccaaaatgaattagttttacaagacctgaaatctttagacgtccttaatggtttcaaattccaagatttaccattatcacgtcaacgtcgtttcatgagaattcctgtccgcgttatagaattgagttctaaatgcaatgaagaaacccgtagagatctttttgagcgtattaactctggcagcgatatattgaaagatatggaagtccgtaaaggatcagaacttggttcaacaaatttatatacacaggttattaagccatgctcaacaatacctaaatttaaagaattagcacctttatctcagactaaagaaaaacgagatgaacggttagaatttacattaagattctttgcctacgtagataagtacaagaactttgatcattccgtacgggattttctaaatgactatatgtcagaaaatcgagatatagacgaaactaaacaaaactcaatgaaacaagagtttgctaatgttctatcttttgttgaaaactatttcccagcaggattcaagaaaactattactgcaaaatctacacctcgagttagattcgaatctctcgctgttggcgcagcacttgcattacgtgaagtccctgaccttgttcccaagaacttagattggctaagctcagaagaattcaaacgattgaccacttccgacggagctaatagtcgcgtgaaggtaattgaacgaattgaatatgttcgggataaattattagaggattaa

SEQ ID NO: 486626 - DNA, 1035 bp, Shigella sonnei
atgagcaagaaaaaagggaaaacaccgcgacctgcggcaaaaacaatcaccgccagcgccccgaaaatggaagcattcacctttggtgagccggtgccggtactcgaccgccgtgacattctggattacgtcgagtgcatcagtaacggcagatggtatgagccgccggtcagctttaccggtctggcaaaaagcctgcgtgctgccgtgcatcacagctcaccgatttacgtcaaacgtaatattctggcttcaacgtttatcccgcacccgtggctttcccagcaggatttcagccgttttgtgctggattttctggtgttcggtaatgcgtttctggaaaagcgttacagcaccaccggtaaggtcatcagactggaaacctcaccggccaaatatacccgtcgtggcgtggaggaggatgtttactggtgggtgccgtccttcaacgagccgacagccttcgcgcccggctccgtgtttcacctgctggagcctgatattaatcaggagctgtacggcctgccggaatatctcagcgcccttaactctgcatggctgaatgagtcggccacgctgttccgccgcaagtattacgaaaacggcgcacatgccggatacatcatgtacgtcaccgatgccgtgcaggatcgcaacgatatcgaaatgcttcgcgaaaacatggttaagtcgaaaggccgcaataactttaaaaatctgtttctctatgccccacaggggaaagccgacggcattaaaattatcccgctcagtgaagtggcaacgaaggacgatttttttaatatcaaaaaagccagcgccgctgacctgctggacgcgcaccgcatcccctttcagttgatggggggcaagccggagaacgtcgggtcgctgggtgatattgagaaagtggcaaaggtctttgtccgcaatgagcttatcccgttacaggacaggatccgcgagataaacggctggctcggtcaggaggtcatccgctttaaaaactactcactggacactgacaacggctga

SEQ ID NO: 486627 - DNA, 1773 bp, Shigella sonnei
atgaccatcaccacagacaccactcttttacacgacccgcgtcgtcaggcggcgctgctgtactggcaggggttttccgtgccgcagattgccgccatgttgcagatgaaacgcccgacggtgcagagctggaaacagcgcgacggctgggacagtgttgcccccatcagccgtgtcgaaatgagtctggaagcgcggctgacccagctcatcatcaaaccgcagaaaaccggcggtgacttcaaggaaattgacctgctcggacgccagattgaacgactggcacgggtaaaccgctacagccagaccggcaacgaggcagaccttaatccgaacatcgctaaccgcaacaaaggcgggcgtcgcaaaccgaaaaagaattttttcagtgacgaggccatcgaaaagctggagcagattttctttgagcagtctttcgactatcagttgcactggtatcgtgccgggcttgagcaccgcatccgcgatatcctgaaatcccgccagattggcgcgacgttttatttttcccgcgaggcgctgctgcgcgccctgaaaaccggccataaccagatttttctgtcggccagtaaaacgcaggcgtatgtgttccgtgaatacatcatcgcctttgctcgtctggttgacgttgacctgaccggtgacccgattgtcctgggcaataacggcgcaaaactgatttttctcggcaccaactccaacaccgcacagagccataacggcgacctgtacgtcgacgagattttctggatcccgaattttcaggtactgcgtaaggtggcatcaggtatggcctcacagagtcacctgcgctcgacctatttctccaccccgtccacgctggcgcacgacgcctacccgttctggtcgggtgaactgttcaaccggggacgcgccagcgccgccgaacgtgtggaaatcgacgtcagtcataacgcccttgccggtggtcttctctgtgcggacggccagtggcggcagattgtcaccattgaggacgccctgaaaggcggctgcacattgttcgacattgagcagctcaaacgcgaaaacagcgccgacgattttaaaaacctgttcatgtgtgaatttgttgacgacaaggtatcggtgttcccgttcgaggagctgcaacgctgcatggtcgacacgctggaagaatgggaagactacgcgccgtttgccgcaaatccgttcggctcccgcccggtatggattggttacgacccgtcacaccgtggcgacagcgccggatgcgtggtgctggcaccgccggtggtggccggtagcaaattcagaatacttgagcgtcaccagtggaaaggcatggactttgccacccaggcggagtccatccgcaaactcaccgaaaaatacaacgtcgaatacatcggtattgatgccaccggcctcggtgtcggcgtgttccagctcgtgcgctcgttctatcccgccgcgcgcgatatccgctacacgccggaaatgaaaaccgcaatggtgctcaaggccaaagacgtcatccgccgtggctgtctggaatatgacgtcagcgccaccgacatcaccagctcgttcatggctatccgcaagaccatgaccagcagcggacgcagtgccacctatgaggccagccgcagcgaggaagccagccacgccgacctcgcctgggcaaccatgcacgccctgttaaatgagccactcaccgccggtatcagcactccgctgacatccaccattctggagttttactga

SEQ ID NO: 486628 - DNA, 855 bp, Shigella sonnei
atggcaaaaaaagtctcaaaattctttcgtatcggcgttgagggtgacacctgtgacgggcgtgtcatcagtgcgcaggatattcaggaaatggccgaaacctttgacccgcgtgtctatggttgccgcattaacctggaacatctgcgcggcatcctgcctgacggtatttttaagcgttatggcgatgtggccgaactgaaggccgaaaagattgacgatgattcggcgctgaaaggcaaatgggcgctgtttgcgaaaatcaccccgaccgatgaccttatcgcgatgaacaaggccgcgcagaaggtctacacctcaatggaaattcagccgaactttgccaacaccggcaaatgttatctggtgggtctggccgtcaccgatgacccggcaagcctcggcacggaatacctggaattctgccgcacggcaaaacacaaccccctgaaccgcttcaaattaagccctgaaaacctgatttcagtggcaacgcctgttgagctggaatttgaagacctgcctgaaaccgtgttcaccgccctgaccgaaaaggtgaaatccatttttggccgcaaacaggccagcgatgatgcccgtctgaatgacgtgcatgaagcggtgaccgctgttgctgaacatgtgcaggaaaaactgagcgccactgagcagcgcctcgctgagatggaaaccgccttttctgcacttaagcaggaggtgactgacagggcggatgaaaccagccaggcattcacccgcctgaaaaacagtctcgaccacaccgaaagtctgacccagcagcgccgcagcaaggccaccggtggtggcggtgacgccctgatgacgaactgctga

SEQ ID NO: 486629 - DNA, 549 bp, Shigella sonnei
atgcgccaggaaacccgctttaaatttaatgcttacctgtcccgtgttgccgagctgaacggcatcgacgccggtgatgtgtcgaaaaaattcaccgttgaaccgtcggtcacccagaccctgatgaacaccatgcaggagtcctctgactttctgacccgcatcaacattgtgccggtcagtgaaatgaaaggggaaaaaattggcatcggtgtcaccggctccatcgccagcaccaccgacaccgccggtggcaccgagcgtcagccgaaggacttctcgaagctggcgtcaaacaagtacgaatgcgaccaggttaacttcgatttttatatccgctacaaaacgcttgacctgtgggcgcgttatcaggatttccagctccgtatccgtaacgccattatcaaacgccagtcccttgatttcatcatggccggttttaacggcgtgaagcgtgccgaaacctctgaccgcaacagtaatccgatgctgcaggatgtggcggtcggctggctgcagaaataccgaatgaagccccggcgcgcgtga

SEQ ID NO: 486630 - DNA, 525 bp, Shigella sonnei
atgagcaaggtcactgacgaggaaggccgcaccacctctgaggttatccgcgtgggtaagggcggtgattatgtaagcctcgatgcactggtgatggatgcgaccaacaacctgattgaaccttggtatcaggaagaccctgaccttgtggtgattgtggggcgtcagctactggcggacaagtatttccctatcgtcaacaaggagcaggataacagcgagatgctggccgctgacgtcatcatcagccagaaacgcatcggtaacctgccggcggtacgcgtcccgtacttcccggcggatgcgatgctcatcacgaagctggaaaacctgtccatctactacatggatgacagccatcgccgcgtgattgtggaaaacccgaaactcgaccgcgtggagaactacgagtcaatgaacattgattacgtggtggaggactacgccgccggttgtctggtggaaaaaattaaggtcggtgatttctccacaccggctaaagcgaccgcagagccgggagcgtaa

SEQ ID NO: 486631 - DNA, 744 bp, Shigella sonnei
atgacgagtcccgcacagcgccacatgatgcgggtctcggcagcgatgaccgcgcagcgggaagccgccccgctgcgacatgcaactgtctatgagcagatgctggtcaagctggccgcagaccagcgcacactgaaagcgatttattcaaaagagctgaaggccgcgaaaaaacgcgaactgctgccgttctggttgccgtgggtgaacggcgtgctggagcagggcaaaggtgcacaggatgacattctgatgacggtcatgctgtggcgtctggataccggcgatattgccggtgcgctggagattgcccgttatgccctgaagtacggtctgaccatgccgggtaaacaccgccgcaccccgccgtacatgttcaccgaggaggtggcgcttgcggccatgcgcgctcacgctgccggtgagtctgtggatccccgcctgctgacggacaccctcgaactgaccgccacggctgacatgcctgatgaagtgcgcgcaaagctgcacaaaatcaccggtctgtttctgcgtgacgctggtgatgccgcaggtgcgctggtacacctgcaacgtgcgacacagctcgactgtcaggcaggcgtcaaaaaagagattgaacgactggagcgggagctgaaaccgaagccggagccgcagcccaaagcggccacccgcactccgcgtaagacccggagcgtgacaccggcaaaacgtggacgcccgaaaaagaaagccagttaa

SEQ ID NO: 486632 - DNA, 510 bp, Shigella sonnei
atgatgacgctgattattccgcgaaaggaggctcccgtgtccggtgagggtacggtggttatcccgcaaccggcaggcgacgagccggtgattaaaaacacgttcttttttcccgatattgacccgaagcgcgtccgggaacgtatgcgccttgagcagaccgtcgcccccgcccgtctgcgtgaggccatcaagtcaggcatggcggagacgaatgcggagctgtacgagtaccgcgaacagaaaattgctgccggtttttcgcgtctggctgacgtcccggcggacgacatcgacggtgaaagcatcaaagttttttactacgagcgcgctgtgtgtgcgatggcgaccgcgtcgctttatgagcgttaccgcggcgtggatgccagtgccaagggcgacaagaaggccgacagcattgacagcaccattgatgagctgtggcgggatatgcgctgggcggtggcgcgtatccaggacaagccgcgctgcatcgtgagtcaaatctga

SEQ ID NO: 486633 - DNA, 204 bp, Shigella sonnei
atgaagacctttgcgctacagggcgacacgctcgacgccatttgtgttcggtattacgggcgcactgagggcgtggtcgaggccgtgctcgccgcaaatccgggactggctgaactgggggcggtgctgccacacggcaccgccgtcgaactgcccgacgttcagaccgcgcccgtggctgaaactgtcaatctgtgggagtaa

SEQ ID NO: 486634 - DNA, 282 bp, Shigella sonnei
atgacagcagaagaaaaaagcgtcctgtcgcttttcatgattggggtgctgattgttgtcggcaaggtgcttgccggtggtgaacccatcactccgcgtctgtttatcgggcgcatgttgctcggtggttttgtctcgatggttgccggtgttgttctggtgcagtttcctgacctgtcactgcctgcggtgtgcggcatcggctccatgctgggtatcgccggttatcaggtgattgagattgccattcagcgccgctttaagggcagggggaaaccgtaa

SEQ ID NO: 486635 - DNA, 498 bp, Shigella sonnei
atgccggtaattagcacacatcagaatatcgccgcctttctcgacatgctggccgtgtccgaagggacggcgaatcatccgctgacgaaaaaccggggctatgacgtgatagtcaccggactggacgggaagccggaaatcttcaccgactacagtgaccacccgttcgcacatggccgaccggcgaaggtgtttaaccgtcgcggtgaaaaatccacggcctccggtcgctatcagcagctttacctgttctggccgcactaccgcaaacagcttgccctgccggatttcagtccgttgtcacaggacaggctcgccattcagttgatccgcgaacgcggtgcactggatgacatccgggcgggacgcattgagcgcgccatttcacgctgtcgcaatatctgggcgtccctgccgggtgccggttacggtcagcgtgagcattcactggaaaaactggtcaccgtctggcgcaccgctggcggcgtaccggcttaa

SEQ ID NO: 486636 - DNA, 426 bp, Shigella sonnei
atgaagaaattatccctttcactgatgctgaacgtgtcgctggcgctgatgctggcactgtccctgatttacccgcagagcgtggccgtcagttttgtcgctgcatgggcgattctggcgacggttatctgtgtgattgccggtggtgtcggcgtgtatgccgcggagtatgtgctggaacgctacgggcgggagctgccgccggaatcgctggccgtgaagattgtcacgtcgctgtttttgcagccggtgccgtggcgcagacgggcagcggctctgatggtgatggtggcgacgtttatctcgctggtcgctgccgggtggatttttaccgcactgatttatctcgtggcatcgctgtttttccggctgatacgtacggcctgccgtcagcgtcttgaggggcgggaaccatgtcaaaactga

SEQ ID NO: 486637 - DNA, 426 bp, Shigella sonnei
atgtcaaaactgatgattgtgctggttgtgttgttatcgctggcggtggccggtctgtttctggtgaaacacaaaaatgccagcctgcgcgccttgctggacagggcgaacaacgtcgccagtgaacagcagacgaccatcaccatgctgaaaaaccagcttcatgttgccctcaccagggcagacaaaaacgagctggcgcaggtggcactgcgtcaggaactggagaacgccgcgaagcgtgaagctcagcgcgagaaaaccatcacgaggttacttaatgaaaacgaagattttcgccgctggtacggtgctgacctgcctgatgctgtgcgccggttgcaccagcgcacagcctgcgcagacgccagtgattgtccacaacgcctgcccgaaagtgagcctttgcccgatgccgggcagtga

SEQ ID NO: 486638 - DNA, 159 bp, Shigella sonnei
atgccgggcagtgacccgcagacgaacggcgatttaagtgctgatatccggcagcttgagaacgcgctggcacgctgtgccagccaggtaaaaatgattaaacactgtcaggacgaaaacgatgctcaaacccgacagcctgcgcagggcgctgactga

SEQ ID NO: 486639 - DNA, 468 bp, Shigella sonnei
atgctcaaacccgacagcctgcgcagggcgctgactgatgccgtcacggtgctgaaaacaagccccgagatgctgcggatattcgtggataacgggagtattgcctccacactggcgacgtcgctgtcattcgaaaagcgttacacgctcaacgtgattgtgaccgactttaccggtgattttgacctgctcatcgtgccggtgctggcgtggctgcgggaaaatcagcccgacatcatgaccaccgacgaaggccagaaaaagggcttcacgttttatgcagacatcaacaatgacagcagctttgatatcagcatcagcctgatgctgaccgagcgcacgctggtcagtgaggtggacggcgcgctgcatgtgaagaatatcccggaacctccgccgccggagccggtcacccgcccgatggagctttatatcaatggcgaactggtgagtaagtgggatgaatga

SEQ ID NO: 486640 - DNA, 453 bp, Shigella sonnei
atgaatgagtttaagcgttttgaagacaggctgaccggacttattgagtcgctgtcaccgtcagggcgtcggcgactgagcgccgaactggcgaaacgtctgcgtcagagtcagcagcgtcgggtgatggcacagaaagccccggacggcacaccctacgcaccacgccagcagcagagcgccagaaaaaagaccggtcgcgttaagcgaaaaatgtttgcgaaacttatcaccagtcgttttttgcatatccgcgccagccctgaacaggcatcaatggagttttacggcgggaagtcaccgaaaatagccagtgtgcatcagttcggtctgtcggaagaaacccggaaagacggtaagaaaattcattatccggcgcgtcccctgctcggctttaccggtgaggatgtgcagatgattgaagagattatcctggctcacctcgaccgttag

SEQ ID NO: 486641 - DNA, 636 bp, Shigella sonnei
atgaacactctcgcaaatattcaggaactcgcgcgcgcactgcgcaacatgatccgcaccggcattatcgtcgaaaccgaccttaatgccggtcgctgccgtgtgcagaccggcggcatgtgcaccgactggcttcagtggctgacccatcgcgccggacgttcgcgcacatggtgggcaccttccgtgggggaacaggtgctgattctggccgtaggcggtgaactcgacacggcgttcgttctgccggggatttattccggtgataaccccgcgccgtctgcgtcggcggatgccctgcatatccgtttccctgacggggcggtgattgagtatgaacctgaaaccagtgcactcacggtaagcggaattaaaacggccagcgtgacggcttctgattctgttactgccacggtgccggtggtcacggtgaaagcatcaacccgcgtcactctggacacgccggaggtggtctgcacaaacaagctgatcactggcacgctggaagtgcagaagggcgggacgatgcgcggcaacattgaacacaccggcggtgaactctcatcaaacgggaaggtactgcatacccataaacaccccggcgacagcggcggcacaaccgggagtcctctatga

SEQ ID NO: 486642 - DNA, 348 bp, Shigella sonnei
atgacagcgcgttatctcggaatgaatcgcagtgatggcctgactgtctctgaccttgagcatatcagccagagtatcggcgatatcctgcgcacgccggtcggctcacgggtgatgcgtcgtgattacggctcgttgctggcgtcaatgattgaccagccgcagaccccggcgcttgagttgcagattaaggtcgcctgttacatggccgtgctgaaatgggaagcccgcgtcaccctgtcatccgtcaccacggcgcgcagctttgacgggcgaatgacggtcacgttaaccggccagcacaacgacaccggccagccactttcgttaaccatccctgtgagttga

SEQ ID NO: 486643 - DNA, 909 bp, Shigella sonnei
atgccgattatcgacctgaaccagctacccgcaccggatgtggtcgaggagctggactttgaaaccattcttgccgaacgcaaggcgacactgatttccctttacccggaagaccagcaggaggcggtcgcccgtaccctgacgctggaatccgagcctctcgtcaaactgctggaggaaaatgcttatcgtgagcttatctggcgtcagcgtgtgaatgaggccgcacgggcggtaatgctggcctgtgccgccggtaatgaccttgatgtgattggtgccaattacaacaccacgcgcctgattatcaccccggcagatgattcgaccctcccgccgacaccggcagtgatggaatctgacacggattatcgtctgcgtattcagcaggcgtttgaaggtttaagcgtcgccgggtcggtgggggcctatcagtatcatggtcgcagtgccgacgggcgtgtcgcggatatttctgtaaccagtccgtctccggcctgcgtcaccatctctgtgctgtcacgtgaaaataacggtgtcgcatccgaagacctgctggcggtggtgcgtaacgcccttaatggtgaggacgtcaggccggtggccgaccgcgtgaccgtgcagtctgccgccatcgttgaataccagataaacgccacgctttacctttaccctggtcccgaaagcgaacccatacgcgctgctgccgtgaaaaaactggaagcgtacatcacggcacagcaccggctggggcgcgacatccgtctgtctgccatttatgccgctttgcatgtggaaggcgtgcagcgtgtcgaactgactgcaccgctggccgacatcgtgctcaacagtacgcaggcgtctttctgtaccgaataccgcgtcgtgaccggaggctcggatgagtga

SEQ ID NO: 486644 - DNA, 531 bp, Shigella sonnei
atgagtgattcgcgactgctgccgaccggctcatcaccgcttgaagttgccgccgcaaaagcctgtgcggaaattgaaaaaacgccggtcaggattcgtgaactgtggaacccggatacctgtccggcaaatctgctgccgtggctggcgtgggcgttttcggtcgacaggtgggatgaaaagtggccggaagcgacaaaacgcgccgttatccgcgatgcctatttcatccactgtcataaaggcactatcggcgcaatccggcgtgtggtggagccgctcggctatctcatcaacgtgacggagtggtgggaaaacagtgacccgcccggcaccttccggcttgatattggtgtactggaaagcggcatcacagaggcaatgtatcaggaaatggaacggcttattgctgatgccaaacctgcaagccgtcatcttattggcctgaacattacccgggacattcccggctacctgttcgccggtggtgtggcttacgacggcgatgtaattacggtttaccccggataa

SEQ ID NO: 486645 - DNA, 2187 bp, Shigella sonnei
atgagcacaaaattcagaaccgttatcaccactgccggtgcagcaaagctggcagcggcaaccgcaccgggagggcggaaggtcaacattaccacgatggccgtcggggatggcggtggtaaattgcctgtcccggatgccggacagaccgggcttatccacgaagtctggcgacatacgctgaacaaaatcagccaggacaaacgaaacagtaattatattatcgcagagctggttattccgccggaggtgggcggtttctggatgcgtgagcttggcctgtacgatgatgcgggaacgttaattgccgtggcgaacatggccgaaagttataagccagctcttgccgaaggctcagggcgttcgcagacctgtcgcatggtcatcatcgtcagcagtgtggcctcggtggagctgaccattgacaccacaacggtgatggcgacacaggattacgttgatgacaaaattgcagagcacgaacagtcacgacgtcacccggacgcctcgctgaccgcaaaaggttttactcagttaagcagtgcgaccaacagcacgtctgaaacactggccgcaacgccgaaagcggtaaaggccgcctatgaccttgctaacgggaaatataccgcacaggacgctaccacagctcgaaaaggtcttgtccagctcagtagtgccaccaacagcacgtctgaaacgcttgcggcaacaccaaaggcggttaagacagcgtatgaccttgctaacgggaaatacactgcacaggacgccactacagcgcgaaaaggtcttgtccagctaagtagtgccatcaacagcgattctgaaacgctggccgcaacgccaaaagcagtgaagtctgcctatgacaatgctgaaaaacgtcttcagaaagatcagaacggtgcggatattccgggaaaggataccttcacgaaaaatatcggtgcctgtcgtgcttatagcggcgctttgagcactgaagccggaaactggacaaccgctcagtttattgaatggctggattcccgtggtgcatttaatcatccgtactggatgtgcaaaggctcctggtcatatgcaaataacaaaatcattacggataccggatgtggtgatatccacctggctggttgtgtcgtcgaggtcatgggaactaaatctgcaatcactatccgagtgaccacgccaacaacatcaagcggtggcggtacaaccagcgcgcaattcacttacataaatcatggggacggctactcccccggctggcgtcgtgactggaatcgtcagggcgactcaatgaccggaacgattaatcaggatggcggaagccagaatgcctatatgtctacggccttatgttcaggcaccagaggcggcaaaaaatatctcagaaagtttcgtggtggagaaggagatactatctggcatgaaacagttcagggcggggtaattcgctgggcgacaggaaacaatgacgctcaggaagaattatcactcagctccgcttatggtctccgttcaagaggtgaaattacatcactcagtgctaatggtctgcgcattgcttatggcaattatggattctttatcaggaatgatggcggcagcacatatttaatgctgacggcctctggcgataaatttgggacatggaacggcttaagaccgctgactatcaataacgccaatggcggagtgtcaatggggcatggcctgagtgttacaggtgatattgtctcaagtaccaaagtacgtgccggtagcgggaaaaagttcacggtcagcagcagcaatacatccacgaaggaagccgcattcaatttgtggggaaactcaagtcgtcctgtggtggctgaattaggtgatgatgcaggctggcatttttacagtcagagaaatacagataacagcatcacttttgctgttaacgggcaggtatcaccatctaactatggcaactttgattcacgctatgtccgggatatccggcttggtggtgctgccacatacaaacctgcgaacaatggtatgacatggacacatcaggcaccgtccgggtgtgtatattccggcattattgttcaggataccggctcaaactctgccgataacattggtggcgtatattacagaccggtgcagaaatacattaacgggacttggtataacgtggcacaggtataa

SEQ ID NO: 486646 - DNA, 1137 bp, Shigella sonnei; identical to SEQ ID NO: 484761

SEQ ID NO: 486647 - DNA, 315 bp, Shigella sonnei
atgttgaccactgacgaatggggtagttacgctagagagttaccgaaggagaagcatctgactggtaagatttttactcagcacattgagcgtaacaatctgaccctgagaacccgaatcaaacgtctggcccgcagaaccatctgtttctcgcgttctgtagaacttcatgaaaaagtcatcggtgcttttatcgaaaatatatgttctactaattggagtcatcacccttctgataagctttccttggatgattaccagactgaatacacagccaaagatttttacctcattctgctcttttttctcaaatga

SEQ ID NO: 486648 - DNA, 207 bp, Shigella sonnei
atgaattttattcgacagggattaggcatcgccttattaccagagttaacgctgaaaaccattgcaggtgaattgtgttccgttcctcacgaaccaaccttctatcgacagatttcgttgttggctaaagaaaagccggtagaaggcagtccactgtttttactacaaatgtgcatggaacaattagtggcgattggaaaaatttga

SEQ ID NO: 486649 - DNA, 1086 bp, Shigella sonnei
atgcggattatctttctacgcaaggagtatttatctctactcccgtcaatgattgcatctcttttctctgctaacggtgtcgcggcggccattgatttatgccagggatatgatatcaaagcgagttgtcacgccagcaggcaaagcctttcaggcattacgcaggactggagtatcgccgatgggcaatggctggttttttcggatatgaccaataatgccagcggtggggccgtatttttgcaacaaggagcggaatttacattatcaccagaaaacgaaactggaatgactctgtttgccaataacaccgttacaggagaatattataacggcggggccatatttgctaaagaaaactcaacgctgaatcttactgatgtcattttttccggtaacgtcgcaggcggctatggtggcgcaatctattcttctggtactaacgatactggtgccgtcgatttaagtgtcactaacgccatgtttcgcaataatatcgctaatgatggcaaaggtggcgcaatttataccattaataatgacgtctatttaagtgatgttatttttgataacaaccaggcatatacatcaacaagttacagtgatggcgatggcggggcaatcgatgttaccgataataatagcgacagcaagcatcctccaggttatacgataataaataacactgcctttacaaataacactgccgaaggttatggcggggcgatatataccaatagcgcgacggctccctatcttattgatatttctgttgatgacagctacagccagaacggcggcgtgttagtggatgagaacaacagcgcagcaggctatggagatggtccttccactgcggcgggtggctttatgtatctcggcttaagtgaagttacctttgatattgctggatttgcccctatatttccagacatctgttatcacttaacccattacaagcccgctgccgcagatattcccgtggcgagcgataacccagcgcactatgcggatgccattcgttataatgctcgaacgcctctgcaaggttctttgctgccgttaacccgtctggtttgggcatga

SEQ ID NO: 486650 - DNA, 381 bp, Shigella sonnei; identical to SEQ ID NO: 458903

SEQ ID NO: 486651 - DNA, 189 bp, Shigella sonnei; identical to SEQ ID NO: 463227

SEQ ID NO: 486652 - DNA, 1212 bp, Shigella sonnei
atgtcgactcgtaccccttcatcatcttcatcccgcctgatgctgaccatcgggctttgttttttggtcgctctgatggaagggctggatcttcaggcggctggcattgcggcgggtggcatcgcccaggctttcgcactcgataaaatgcaaatgggctggatatttagcgccggaatactcggtttgctacccggcgcgttggttggcgggatgctggcagaccgttatggtcgtaagcgtattttgattggctcagttgcgctgtttggtttgttctcactggcaacggcgattgcctgggatttcccctcactggtctttgcgcggctgatgaccggtgtcgggctgggggcggcgttgccgaatcttatcgccctgacatctgaagccgcgggtccacgttttcgtgggacggcagtgagcctgatgtattgcggtgttcccattggcgcggcgctggcggcgacactgggtttcgcgggggcaaacttagcatggcaaacggtgttttgggtaggtggtgtggtgccgttgattctggtgccgctattaatgcgctggctgccggagtcagcggttttcgctggcgaaaaacaggctgcgccaccactgcgtgccttatttgcgccagaaacggcaaccgcgacgctgctgctgtggttgtgttatttcttcactctgctggtggtttatatgttgatcaactggctaccgctacttttggtggagcaaggattccagccatcgcaggcggcaggggtgatgtttgccctgcaaatgggggcggcaagcgggacgttaatgttgggcgcattgatggataagctgcgtccagtaaccatgtcgctactgatttatagcggcatgttagcttcgctgctggcgcttggaacggtgtcgtcatttaacggtatgttgctggcgggatttgtcgcggggttgtttgcgacaggtgggcaaagcgttttgtatgccctggcaccgttgttttacagttcgcagatccgcgcaacaggtgtgggaacagccgtggcggtagggcgtctgggggctatgagcggtccgttactggccgggaaaatgctggcattaggcactggcacggtcggcgtaatggccgcttctgcaccgggtattcttgttgctgggttggcggtgtttattttgatgagtcggagatcaagaatgcagccgtgtgccgatgcctga

SEQ ID NO: 486653 - DNA, 1110 bp, Shigella sonnei; identical to SEQ ID NO: 484748

SEQ ID NO: 486654 - DNA, 561 bp, Shigella sonnei; identical to SEQ ID NO: 484751

SEQ ID NO: 486655 - DNA, 984 bp, Shigella sonnei
atgaatagtaacgtactgacacaaactatcgttaccggcagtgacccgcgcgggctgccggaattcagcgccatccgcgaggaaataaacaaagccagccacccgtcacagcctgagctgaactggaaactggtggagtcgctggcgctggcgatttttaaagccaacggtgtggatttacacaccgccacctactatacgcttgcccggacacggacacagggactggcgggattctgcgaaggtgcggaactgctggcggcaatggtaagccacgactgggataagttctggccgcagggcggcccggcgcgtactgaaatgctggactggtttaactcccgaaccggcaatattctgcgtcagcaaatctcctttgcggaatccgacctaccactgatctaccgcacagagcgggcattgcagcttatctgcgataagctccagcaggtggaactgaagcgcgttccgcgcgtggagaatctgctctattttatgcagcacacgcgtaaacggcttgaaccccagccgaagagtaacgctgagaacgccgcacagaccacggtcagaacgctgatttatgccccggaaacactggcatcttccacaccagaagcggtagtgcctcccctgcccggcctgcctgagatgaaagtggaagtgcgcagtctgacagagaatcccccacaggccagtgtgataaagcaaggcagtacggtaagagggtttatcgcagggatcgcctgttcagtggctgtcgcctcagcattgtggtggtggcaggtctatccggtgcagcagcaactgttacaggttaacgacaccgctcagggcgcagcaacggtgtggatggcctcacctgaactcgaaaactatgagcgcaggctgcaacaacttcttgatacctccccggtacagccgctggaaaccgggatgcagatgatgcgtgttgccgacagtcgctggccggaaagcctgcaatag

SEQ ID NO: 486656 - DNA, 1110 bp, Shigella sonnei
atgaccgacaccaccatgcaattgctcagtcagggcacagaccccgtgaaaatgccggattttgatattctcgcggagggtaaaacgctgtcaggcgtggcagagcgcctgatgagcctgtcactgaccgacaaccggggatttgaggcggaccagctcaccatcacgctggatgatgcggatggtcagttgcagctaccgccacggggcgcgcgcctgacggttctcattggctggaagggagaaccgctgacagaaaaaggcacttacattgttgatgaaatcgctcacgaaggaccgccggacaggctgactgtttcagccagaagcgcagattttcgggctgaatttaacgttaaacgtgaggtgtcctggcatgatgtgaccgttgagcgtgtggtatccgccatcgctcatcggtatggtctgaaaccgcaaatcagcgaaatgctgatggatatcgaaatcgaccacgccgaccagaccgaagaaagcgacatgtccttccttacgcgcatggcggaaatgctgggcgcaatcaccacggtaaaaagcggtaatctgttattcatcatgcccggtggtggcgtgaacgcacagggccagccgttgccctcgttcgccatcacacgcagcagcggcgatcgccatcagttccgcattgctgaccgcgaagcgtatacgggggtacgcgcttactggcttgatcttaattacgggaaaaagaaaaaagtcagcgtgaaacgccgcaaaccgtcaaaaccaaaaaaggagaaaagcagcagccgggaaggcgactatatggaaggtgcggaaggcaacgtgtttgtgttacgcaaaacttatcagaacgagcaggcagcaagacgtgcagcggcggcaaagtggcagcagctacaacgcggagccgcatcattctccatcacactggcgcatggacgtgcagaactctaccccgaaatgcatggcacggtaacaggatttaaaagcgagattgataatcaggactggattattgcaaaagccgagcacaccattgataacagcggctttaccacgcagcttgagcttgaggcaaaaatcccggaatggatagcagaaacagagtga

SEQ ID NO: 486657 - DNA, 1185 bp, Shigella sonnei
atgagtgaaactcgttttcatggtgcccgtgttacggaaaataccgacctggtaacagcgattaacgatgttgattccagcgttatcggtatcgtggcaacggcggatgatgcggacgcggagctgttcccgctgaacaagcccacactgctgccccgcgtcaatgacgtgctgggaaaatgcggaacaacggggacgctttatcgtgcgcttaaggccatcgcagaccaggtgagcacaaaggtgatcgtcgttcgcgtggctgaacacaaagaagaagacggaaaaacgcaggatcaactggttatcggtggttctgaatctgacggcagctatacggggatgtatgcgctgcttgttgcagagcaggatgaaagcatcggataccgtccgcgtattctggccgcgccggagctggacacggaggcggtgacaaaatccctgtgcgtgattgcgggtaaactgcgcgcgtttgtgtatgcctcatgtcatgactgtaacacgatggctgaggcaattacctaccgccagaaattcaacgaacgtgaggtgatgctcttatggccggacttcatcgcctacaacccgaaaagtggcaaaaacgaaacgttccccgcgcctgcctatgcgtgcggccttcgtgcgtacattgaccatgagcagggctggcacaaatcgctgtccaacgttccggttaaaaatgtgctggggatgtccaggcatgtgttctggtcgttgcaggccgaagacagtgatgccaacagcctcaacaacaaagaaatcacgaccattattcgtcgcaacgggttccgcttctggggcaaccgcacaccggaaacgaacgcctacatctttgaggtgtatacccgaaccgcacaggtgctggctgattcaattgcggaagcgcagtttgaaaccatcgacagtccactgacgcctgcgaacgtgaaggatgttatcggtgccatcagggcaaaactggattcactggttactgccgggaaactgattggggcgtcgtgctggtatgacgtggtggataacggcaccacgaatttacgtcaggggcgcgtgcgtattcgctacaaatatacgcctgttcccccgctggaagacatggagctttaccagtcgtttactgatgaattctttggtcccgcatttgcggtgctgggaggtgcctga

SEQ ID NO: 486658 - DNA, 513 bp, Shigella sonnei
atggctgtaccaaaacatcttcgcttttttacgctgtttgtggatggtgaaaacgaagtgggtaaggtgacgtccgtcactctgcctaagctgacgcgcaaaaccgacagctaccggggtggtggcatgatgggagcggtaagtattgatctcggcctggatgactccgcgcttgatgcgagctttgtcatggggggcgcagttcgtgagctgttccttaagtatggcggcacgattgacggtacgctgctgcgttttgcgggtgaatactacaccgacgctgaaagcgacctgtatgaagtcgaaatgcgcggacgtgtgacggaaattgatatgggggaagccaaacagggcgaagccacatcacacacttacgccattaaaaacacctactacaagctgagtgttaacgatcgcccgttgtgggagattgacctgctgaacttcatttaccggaaggacggcagggacattgtgcccgatcgcatccgttccgcgctcgggcttggctga

SEQ ID NO: 486659 - DNA, 366 bp, Shigella sonnei
atgaaagagacgaaaaacatcgataccgaaaacacggtcgttgctgacactgtgaaagaaaccagtgagcgtggcgtaaaacttacccaaccaattgagcgaggcggcgaaaaaatcacgtatgtggagatcaccggggctattgagcaggctggatctctgcgagatttgtcgctgtctgatgtgctgaatttgaaagcggaatccatgtttacgctgctgtcacgcgtgacatcaccgcgactggatgaagtgacgatcaaaaaaatggcatcccgtgactttattcagttatgtgtggttgccgtaaattttttgagcggtgcggactctggcgagaagaacgaacaggcgacggaagcctga

SEQ ID NO: 486660 - DNA, 2808 bp, Shigella sonnei
atgaagactcttgatatccgggtcgctttcagcgccgttgacaggctgacccggcctgccgaaaacgcccgccgcctgatggggcagtttggtgactccatccagcgaacgcagggggcgatcaaaaatctcgagcgtcaggcgcgttcatttgagcgcgcccgtgacgctgtcagtaaagcggatgcgggcatcgtgaaagcacgacgccagcttaacgcccttaatcagttacaacgcacgggtacagtgctcagcgaaaaacaacaaaagctgatgcagcagttaagcacccggcttgaacgcctgaatgaatcgcgcacacgggaaattcagaaaatgcgggaacttggcggagagctgaaacgccacggcatttccctgacaggcagcgataacaccatccagcaggccatcagacgcaccggacaatacaacaaccagcttgaacgcgaacggcgggcgcttgcgcgtgtaacgcaggcgcgtgagcggtattcacgcgcgcaggaaacagcgggaaaactgaaaacaggtggtgcgctggcaacaggtgcggcggcagcgggcggctatgctgccgggcgttttttgcagcccgctatcgggttcgggaaagagatgtcccgtgttcaggcactgacgcgaatcgataaaaacagcccgcagtttaaggcgctgcgtgagcaggcgttaaaacttggctctgaaacgcagttcaccgcaggcgatgccgccagtggacaggcatttcttgcaatggctggtttcacaccgcaggccattcaggctgcgcttcccggcgtgctgagcatggcaacggctggcggtatggacctcggcgagacggcggatattggttccaatatcctgacgcagttcggcctctctgctgaccagatggaccgggtcggtgacacacttaccgcagcgtttacccgtaccaacactgaccttcgcgcactgggcgaaaccatgaaatatgcaggtccggtggcgggtaagctgggaatatcgctggagcaggccgcagcgatggcgggcgtgctggcgaagatgggtatcagggggagtgatgcaggtacagcgttgcgtaaaagcctggccaatctgtcatcaccgccaaaggcagcggcagaagcactgaaagagctgggggtgtcagttgctgacgccaaaggcaaaatgcgcccgatggagaatgtgctggccgatctctataaagccacccgcaaatacggggaggttgaccgggtatcgttctttaaggacattgccggagaagaggctttcacatcatttatgggcctcgttgatgcggcaggtgacggcttcttagccaaactgagaaaagaacttgaaggcgcgcgcggtgaggcagaacgcacggcaaaggttatggccaataaccttgatggcaacctgaaatcactcggcagtgcatgggaaggtctgcgtattcgcatcagtgatctggttgacggtccgctgcgttctgtcacgcagtggctcacgcgggttgtctcaaaggtgacggcgctggcgcaggcccacccggcactgacgcgccagttactgatagcgggaggcgcactgctggcgacaacagcaacggttggttcgttgtctctggttattggggtgcttcacgggaagctggctacgttgcgtctcggtttttctctcctgaccgaatcaatgaatgttgtcagggttctgcctgcattatggggaatggtgacgggttccgtttctttacttggtggcgctatcggggcgctgttcagtccggttagtcttatcgtggctgcgcttgccggagctgccgttcttatctggaaatactgggatcccatcagggcattttttgccggggtgttcagcgggattatggaaaggctgaccccgttgcgcgaaacctttgaacggtttggccctgtttttgatgtcgtgcgcgatgggattattcaggtctttaactggtttaaatcgctgctgtcaccgatggagtccagcaaggaaacgctggataaatgtgccagtgctggcgagatattcggtaacgttcttggcggtgcgttacaacttgttctgacacctgcaaaaatgctactggatacgctggcgtggatacttgaaaaacttggcgtccttccggatgaagcggaaagggcgcgcaagaaaatcgaagacgcacagcgtgcggccattcttcaggacaaggttgccttgcttcagggggacctggcgaaaatcaatccgccgaagcctgtggaaaatggcaatggcaccggaggtgataaacccaaagacaacaaaccgctcacagacagcaataccgggacgctacgcagactcagcaaaattgctgataacacaggtaagctggttgatgagacgaaaaaacgcattggccccggcgatattgtctttaagaacctgccccgcgcacttgctgttcgtggggagtggcaggagcggaagattgcgcaggtcagtaagcctgcccccgcaattaatatcacacccgtggtcccggctccgctgcctccggcgctggtccctgttgttgcggccagctcccgcccggtggcggaggccatacgctctccagtggcatcagttcctgtaacttcccgtaaccgggagcctgttgcctccggatttggtggtgaaattcatgttcatctgcataacgttgttacgcagaatccccgcgaactggcgaaactggtcggtgaaatggtcagggcagaaatggaacggcgcgcccgtgccgggcgtggcagtttttacgataaagattga

SEQ ID NO: 486661 - DNA, 489 bp, Shigella sonnei
atgatgatgatctacggcatgtttgtttttgagctgcgtacattgccgcatcagcagttacagcaaaacaaaagctggcggcatgtgaaaaatgaacgcgttaaccgttcggcaagctggcagtatatcggtgcaggtgatgagcgcatcgttctttctggtgtgctttatcctgaaattacaggtggcgaagtgtcgctgtcgctgctgaccacgcaggcgtatacaggacgaccctggcctctgattgatggcgtcgggcagatttacggcatgtatgtcctgaccgaaacgaatacgacccgctccgagtttgatcgctacggtaaggcgaaaaagatagaattttcactgactcttgaacgctgtgatgaggatttgcgggagcgcctgcaatcctcatcgttcagcgatatgctgtccggcttcaaagataaggtaacatcatcccttaacagcgcggccagttcagttaaagggttgttctga

SEQ ID NO: 486662 - DNA, 588 bp, Shigella sonnei
gtgctgattggctatgtaagggtatcaacaaatgaccagaatacagacctgcaacgaaacgctcttgtttgtgcaggatgtgaacaaatatttgaagataaattaagcgggacaaagacagaccgaccgggattaaaacgcgctttaaagcgccttcaaaaaggtgacacgctggttgtctggaaactggatcgcctcgggcgaagcatgaaacatctgatttctctcgtcggggaactacgggagcgaggaattaattttcgcagtctgaccgacagcatagatacatcttctccaatggggcgttttttcttccacgtgatgggtgccctggctgaaatggaacgtgaattaattgttgaacgtacactggccggactggcggcagcacgcgcacgggggcgcacaggcggacgtcgaccgaagctgacaaaagaacagcatgagcaaatagcaaggctgatcaaaaacgggcacgacagaaaacaactggcaataatttacggcattggtatatcgacgatttatcgttaccaccccgcaggagaatcaatcggaacaatagagaagagtcaggaaacaaaataa

SEQ ID NO: 486663 - DNA, 534 bp, Shigella sonnei
atgatgcacttaaaaaacatttctgctggtaatcctgaaacaaaagagcaataccagctaacgaaacaatttaacatcaaatggctttatacagaggatgggaaaaactggtatgaggaacaaaagaactttcagcctgatacgttgaaaatggtctatgaccacaacggcgttattatttgtattgaaaaggatgtttcagcaattaatccggaaggcgcaagcgtcgttgaggttcctgatattacagcaaatcgccgggctgatatttcaggtaaatggatgttcaaagatggcgtagtgataaagcgaacttataccggggaagagcagaggcaacaagcggaaaatgaaaagcaaagcctgctacagctcgtcagggataaaacccagctatgggactcacagctacggctgggcattatttccgacgagaataaacaaaaattaaccgagtggatgctctatgcgcagaaggtcgaatccacagacacctccagcctgccagtaacgtttcccgaacaaccagaatga

SEQ ID NO: 486664 - DNA, 528 bp, Shigella sonnei; identical to SEQ ID NO: 469185

SEQ ID NO: 486665 - DNA, 531 bp, Shigella sonnei
atgagtaattcactgttaccaccatcagccagcaatttcatgcgttgtgccgaagccgtcggaacacgcattacagacattccggcagacctcaacacgctgtggtcgccggacacctgcccggtgcatctgctgccttatctcgcctgggcgttttccgttgaccgctgggatcgcaactggccggaagagacaaagcgacaggtgattcgtgatgcatggctgatacaccgacacaaaggaaccatcagcgccctgcgacgggccattgagccgctgggatacctcattcgcgtgtctgagtggtgggagttcaacggcgaacccggaacattcaagattgatgttggcacgctggacagtggcgtgacggaggaaatgtatctggaaatggagcggttgattgctgatgcccgcccggtcagccgccacatgacagggctgaatatcattcaggagattcagggagatattttcgcggcagcagcaacttacgacggtgaagtcattaccatttatccggacgattaa

SEQ ID NO: 486666 - DNA, 897 bp, Shigella sonnei
atgcctgccgttgacctttcccagttaccggaacccgccatcatcgcggagcctgactttgaggcaattctggctgacacaaaggccatgatgattgcagcttatcccgccgaacagcgtgaagtcgtctccgccgcactggaactggaatcggaacccctgaacgttatcgctcaaaccatgtcgtttcgtgaaatgctgttacgccagcgggtcaatgaggccgcacgcgcctgcatgttgagccacagcgccggaacagacctggacaacctcgcgggcaatatgaacacaaagcgcctggttatcactccggcaacggataccaccgacgtggtgatggagaacgacacctcgctgagactgcgggcgcagcgggcgtatgacggcctgagtgttgcaggcccgtcaggcgcatacgagtattttgcccgcagcgccagcggtctggtgcgcgatgcgcgggccatcagtccgtctccggcaaatgtgacggtttccatcctgtccactgagggcgacggcacagcaacggaggcgttgcttaataccgttcgcgccgttctgaatgcagaggatacccgcccggtggccgaccgcctgaccgtacagagtgccagaatcgtgacatggcggctgaatgcaaaactgtacttttaccccggtccggaatccgaacctattctggctgcggctgaatcgtcgttcaggaagtggctggctgagcaggggcttatcggtcaggacgtggcgttgtccgccattgctgccgcactgcatgtgcacggtgtgcaacgcgtggagataatcgaacccacacagaatatggccatcagcgacatacaggcggcgcgctgtgagtcattcaccatcagcgaaggtgggcgtaatgagtaa

SEQ ID NO: 486667 - DNA, 351 bp, Shigella sonnei
gtgacaacccgctacacaggaatgaacccggacgggacgggaaacctgaacgatatggcgcacctgaaacagtcagtcagggacatcctgaccaccccgctggcaagccgggttatgcgacgggaatatggcagccttgtgcctgatttgattgacgaacccatgaataacaccacgcgtctgcaatgcatgagtgctaccgtgattgcactgacacgatgggaaccacgcattgccctgaacgccatcgacgttgtctggaaggcaggaggccacgccggggtgacgctgtcgggcactgtcatgcagaccatgcagaatgttgaattaaccatcacgctgagggagtaa

SEQ ID NO: 486668 - DNA, 582 bp, Shigella sonnei
atgagcgcagaactcatgcgactgctgagcaatatcatccgcaccgggatcatctctgaagttgatgaggaatcctggtgcgtgcgcgttcgcagcggcgaactggaaacaggctggctgcgctggaacaccacgcgcgcgggagacttcaacgtgtggtttccgccatcaccaggcgaacaggtggcaattgcctgcatcggcggcaacccggaaaccgccatgataatcggcagcctgtggagtgatgccattccggcacccggcaaaagcctgaaagaaatcgtggtcagcgcgccggacggcgcggtgttccgctacgacgcggacgcaggcgcactgagcgcaagcggcatgaaaacggccactttgcaggcatccatcagcgtgacactgaacacgcctgtcgtggaatgcacagaccttctgagaacagcgacgcttgacgtcacaaaagggggaacgatgagcggcaatatcacgcacagcggcggcgatttcacctcaaacggcatcacagtgcatacgcataagcacggtggcgttaaaggtggcagcgattcgacaggaggcccgcagtga

SEQ ID NO: 486669 - DNA, 636 bp, Shigella sonnei
atggataaggcattcacccgcgtggatgaaacctttgaggctatccgcgacagcctgaatcagcaggccattaataacatcgccagaaagctggcacaggatttacgccgcgcccagcaggcgcgtatccggtcacagaaagcgccggacgggaccgcatggacaccacgcagacgccgcgtaacccggatacaggagcgcattcgctttatctggaataacgaagcacgcacgctgaaaaactggcatcacgacacggggaaatacgggcgaaccatcaccgggtgggatgaggataaaaacaatatccgcacgttttaccgggatgacatcgaccgttttctggaaatacgcacccggcgcatcaaccaggacagcaccaggcgcgtctccatgttcgtaaaactgcgcaccgcccgctacctgaaagcccgtgcagatgcttccggtgtgacggtgggttacagcggcgtggccgcacgtattgcacgcgttcatcagttcggtgagcgcgatcaggttgcgccgggcattttcaccgattacccggtacgtgagctgctgggtatcagccaggcagatgagcgcctgatttataacacggtgctgggccggattgcggaggctgtacgatga

SEQ ID NO: 486670 - DNA, 468 bp, Shigella sonnei
atgctgaaaactgattccctgcgtgaagccatgacccgttcatgccggtggtgtcatgccaacccggaaaaattcaccattttcgtggagagcggcaacattgaaacgaccggagaaaccccatcgtttgtttaccgctatcagatagtgatgtttgtcatggattacgccggagagctggacgacctcacgctgccgctgctggcgtggttatccgaaaatcagccacagttgttgctcaatccggagcgtaatcaggacatcaaattttccgccgttatcaatgacgatgacagcgccgatctcctgtttacgctccccctgcgggaacgcgttcgcatcacgcgcagcagtcagggcacaccgcaggcagaacacctgccggagccaaaaccccgcctgccctcttccgaaggcgactggtcgcatgtattccaggatgtgacgtggggggaaagcgatggataa

SEQ ID NO: 486671 - DNA, 474 bp, Shigella sonnei; identical to SEQ ID NO: 469064

SEQ ID NO: 486672 - DNA, 549 bp, Shigella sonnei; identical to SEQ ID NO: 469063

SEQ ID NO: 486673 - DNA, 303 bp, Shigella sonnei; identical to SEQ ID NO: 469062

SEQ ID NO: 486674 - DNA, 198 bp, Shigella sonnei
atgaaagtgaagacactggaaggcgacaccgtggattcgctctgtttccggtactacggcacgacgcagggcgtcaccgaaaaggtgctggatgccaaccccggactctgccgacaggtatttctggaagccggacaggaggtggaaatgccggagccggagaagaaaaaacaacgagagatgatacagctatggtaa

SEQ ID NO: 486675 - DNA, 495 bp, Shigella sonnei
atgagtatggttgccagaactgaacccggacccgcagaggacgacatcaccgacaccgaagatggcgatacccgtatttcagcgggtgcattctggccggatattgtgctgcgcgagctgcgtctggcggtacgactgccgggccgcgtgaccacctcccgcctgctgcataccgccaccggggccgtggcacacgttacccgcgagctggaagcatggcagcaggaacagcaggcggctggccatcagacgctggccgatgttccggcacctgtaattaacggagaaagcgtcaatctctggcactggcgcaatgctgtttataccgccacacgcgccctgattctggagcgttaccgcgatgcggacacaacggacaagggcgaccgccgggcggacgcactggatatacagacatcggatttgtggcgcgatgtgagctgggccatctctgacattctgtgccgcccgcgaatctttgcggagttgtgctga

SEQ ID NO: 486676 - DNA, 801 bp, Shigella sonnei
atgattactcctgcacagcaacactggcagaacgtgatggcacagcgcgcaggccgggcgaatgaaggtgtggaccacgccgcgcgtaccgcgcatgaagaggtgctgtatcgtctgcgtctggcacaggcccggcttaagggcgtacaggccagaagcgcgaaagccgacatcaaaaaagcgttgttgccggacttttccggctggattgagggaacgctggaggctgacggcgggcaacaggacgaagtgattgccacgctgatggtgtgggcgattgactgcggcgatcttccgcttgcgctgcgtattggtgcgtatgcggtccgtcacaacctcatcatgccggataactttggccgtactgctgccacagtgctgaccgaagaaatctgcaatccggtactgacgcaggccgggacggatgccgacgcggatttgtccgtctttatcgaaccactggacacactttgggaaattgtcgccaaccaggatatgccggacgaagtgcgcgccaaattatgcaaggcgtgcgcctttgcccgccgtggcctgagcgatgcggacagcatggcctcatcactgaagctgctgcgcgaagcgatgcatctgaaccagaacgcaggtgtgaaacgcgagattgcaaccctttcccgcgccctgaaaaaagccgattccgcagccgcaccagaagacgccagcgcacagcaggcgcaggacgaaagcagcgaaagtaaaaagacaacgcggaagcctgcaacacgaaaaaccaccgcgacgcagaaggcgaagcgcggttaa

SEQ ID NO: 486677 - DNA, 1053 bp, Shigella sonnei
atgaatctggtgatgtcagatattacccgcaacaagctgggttgctatatggcgcagcaggcgtcgcttaacaatatcccggtttctgcactggtatcgcgatttaccgtggaacctgcggtgcagcaacgttttgaaaacgcctcaaaggatagcaccgaacttacaaaaaaaattaacgtgatcggcgtgaccgaccagaaaggcgaaaaaatcctcctggacaccacaggaccgattgcacgcacaaataccagttatgacggaacaaaacgccgtaacccgaataacgtggttgatctgaaaaaccgcaaataccagtgcgaacaggtgaactacgacacgtttatttcgtatccgcagcttgatgcctggtcggcacacagcgattttcagtcccgcatcagcgcacagattgcccgacaggtggcacttgaccgcatcatgatcggtttcaacggcacatctcacgcggatgagtccaacttcagcaccaacaagctgcttcaggacgttaacgtggggtggctggagcacatcagaaccaatgccagcgagcgcgtaatgaatgacgtgacgctgacttcccgcaacatggacaacaccgtggcgcacgcgggtaaatacgcgaaccctgatgcactggtacaggacgcgcgctcatctctgctggatgaatggcacaaggaagctgacgacctcgtggtgattatggggcgcaacctgtttaactcgctgcgtctgccagtgctgaacagcatcagcggccagaatcccaatgcggaattacttgccgggcagctcatcctgtcatcgcgcaccattggcgggctgggtgtgttccttgcaccgttcttcccggatgcaacgatgctgatcacctcattcaacaacctgtcgatttactggcagaaaggttcaatgcgtcgtctgatgaaagacgaaccggaatacaaccgcatcgccacctaccagtccatcaatgacgcttatgtcgttgaagactatggcaagtgcgcgatggtcactggcctgaagttcgccgacagctaa

SEQ ID NO: 486678 - DNA, 837 bp, Shigella sonnei
atggctaatgaaaaaaagacatcccgcaaaaagtttcgcgtggctgtctccggatcaactgttgatggccgtgaaatcagtccggtgcatctgcgtgaagccgccgagaacttcaacccggatgtttacgctgcccgcgtgaacgttgagcactatctctcgccatgcccgtcaagcgaattttccgcaatgggcgatgtcaccgcactgagtacggaagacattacggaaggtccgctggccggacgtactgcgctgtatgcagaaatcgaaccgaccgagcgcatgaagcagcttgtcgcggacggcaagaaaatctattccagtatcgaactgcacccgcagttctccgttaacgggcgcgcctatctggtcgggctggcgatgaccgacaccccggcaagcctgggcactgagcgcctgaaattcacggcacagcaacgtcaggcggtgatgacgttcaacagtatccagggtgaagcaccgcttatctccgaagccatcgagtctgaaatcatcgaaatggcagaacaacgccaggaagaaggcacccagtggtttaaccgcgtaatggggattattggtcgtggccgcaaagcggatgacgccagtttctcccgtattcaggaagcggtggaaagcgtcgcaacgtcacaggccgacattatcgaccgttttaatgcgctggaaacacgccatcagcaggacagccagaaaatcactttactgaccacggagctgacagcactgaaggaaaaactgcgcacgcaggacggcgatccgcagaaccggttcaccgcaacgggcgcagcctccgaccagctggctgacttctga

SEQ ID NO: 486679 - DNA, 1752 bp, Shigella sonnei
atgattcaggacgcttttgtgcgccagcgtgcgcggcaactttactggcagggttatccgcccgcagaaatatcacgtctgatgggaataaacccgaacacgatttatgcgtggaaaaaacgcgaccagtgggatgaaacgccacccgtgcagcgtgtcacgcagtccatcgatgcgcgcctcatccagcttactgaaaaacagaataaaacaggtggtgactttaaggaaatagacctgctgacccggcagcttaaaaaactgcatgatggccagccggatgcgacggccacaggaaagaaaggccgggcgaaaaaactcaaaaatcatttcacgccggaacagattgccgcactgcgggaaaaaatcatcagcaggctggagtggcatcagcggggctggtttgactccctgacgctttgcagggaagccgggatacgtaacaggatgatcctgaaatcccgacagattggggcgacctggtattttgcacaggaagcactgctgatggcgctgcgtgacgatgtggcacaaccttaccagcgtaaccagatttttttgtctgcgtcgcgtcgtcaggcgttccagtttaaaagcattattcagaaggccgcggctgaagtcgatgtggagctgaaagggggcgataaaatcatcctctccaacggcgcagagatgcattttctcggcacttctgctgcgacggcgcaatcttacacgggcaatttttattttgatgaatttttctgggtcagtcgctttgctgaactgcgcaaggtggctggcgctatggcaaccctcagcggactgcggcgcacctgcttctccacgccatccaccgaaacgcacgaggcatacgcctactggaacggcgaccgctggaacgagaaaaaggccgcgcataaacgccagcgtttttctgtggactggaaaacgctgcataacgggcttatctgccctgaccggacgtggcggcaaattgtcacgctggaagatgtggttaatcacggctggaaacacaccgatattgatgaaattcgtgatgaaaacaccgaagacgagttccgcaatctctatatgtgtgagtttgtccgcgaaggggaatcggcatttaacctgaatatcctgattggctgcggtgttgacggatacgacgactggaaagactggaaaccctttgccccccgcccgatggggaatcgtccggtatggattgggtatgacgcaaacggcagcagtggtaacggcgacagcggcgctgtgtccgtggtggttcctccggctgttcctggtggtcgtttcagaacggtggagacgcgacgcgttcaggggctggaatttgaagagcaggccagagttattgaagagttcacgtatcgctacaacgtggaacacatcggcattgatgcgacgggagggcacggggatgccgtctatcagatagtgaaacggttttttcccgccgccatcccttacaccttcacgctgtcatcaaaacggtcgctggtactgaaaatgctgcaaataatgcgtgccgggcggtgggaatacgatcgcgccgaacgcgagctggttgcggcctttaacgccgtgcgtaaggtgaaaacaccgggcggttttatcacttacgaaacggaccgcgcgagggggatcagccacggcgaccttgcgtgggcaaccatgcttgctgtcattaacgaaccgattggcggcgaaggagaaaacgagcgtttcacggttatggagttctga

SEQ ID NO: 486680 - DNA, 1047 bp, Shigella sonnei
atgagcagaaaaaataaaaaagtgcgcatgagttcacgcattgatctcgctgatgcgctcaggaaagaatcgtcgctcagtgcattcacatttgatggtccttaccgcctgaccgggcatgacctgctggacaatatgtactgtgctgataacgggcggtggtatgaaaccccggtggactggtacggtctggcaagagctgcccggcaaacgtcctggcatcagtctgcgctttactttaagcgcaatgtattgctcggctgctatattccgcacccgctgctttcccggcaggatttctcggcgctggcgctggactggtttgtgttcggtaacgcattccttgagcttcggagcaatatgctcggcgaaccgcttaaattacggcacgccctggcgaaatacatgcgacgcggaagcgatcttgaatcatggtggtatgtgcaggatggcaaggatgcgtttcagtttcgtcctggcaaagtgtgccacctgatgaatccggatattaaccaggaaatctacggcatgccggaatatcttggcgcattactctcggccagcctttctcattcggcggacatgttcagaaaactgtactacgacaacggatcccacgccgggtgcatcatctacatcggtgcagcgcaggtaaaccgcgaaagcatggactccctgaaagaaacgctacagggggcacgtggtggtggtgcgtttaaaaacgtgctcattcatgcgcccaacgggggcaaagagggggtgcaaattttgccgttccagcagatcaccgcaaaggatgagttcatgaatgttaaggcggcatcccgtgatgatgtgctggctgcgcaccgcgttccgccgcaactgatgggggcgatgccgggcgaaaaaagtgcgtttggtgatgtggagaaggccgcgcgggtttacgcaattaacgagctgatgcccgtcatggaggccatgaagcacatcaatgactggcttggcgaagaggtgatccgctttaacccttacgcactgttagacacccagcccacatcctga

SEQ ID NO: 486681 - DNA, 186 bp, Shigella sonnei; identical to SEQ ID NO: 469161

SEQ ID NO: 486682 - DNA, 240 bp, Shigella sonnei; identical to SEQ ID NO: 469160

SEQ ID NO: 486683 - DNA, 525 bp, Shigella sonnei; identical to SEQ ID NO: 469159

SEQ ID NO: 486684 - DNA, 312 bp, Shigella sonnei
atgacgacaccaaccagacggataagtttctatctgaagcctgcggccgtcaagaacgaaagcgaagcatgcgcctggctgggcagccttacaccagaagcccgcaaaagcggccaacgcgtggcttttctggccgggctggcacttctgaaaatgaatccagcagaggcttaccgactggctgcatgggctgacgatgaggcgttatcggtgacacaaaccaggacagaacgccccgtgccacagccagtaccaaccgcacagataaccagtcagatagcagggaatatccgggcattatttcctgaatga

SEQ ID NO: 486685 - DNA, 960 bp, Shigella sonnei
atgaaaatttgtatcgacgacggctccaccaacatcaagctggcatggactgagaacggcgaacgccgcaacgccatcagcccgaacagcttcaagtcggaatggtctgcgccgttcggtggcatgcagcccgcgaactacatgcttgatggcgtgcgctatggttttgatccggtcagcgatcgctttgtccagacaaccgacacgcaataccagtacagcgatgtaaatgtcattgccattcatcacgcgctggtcaaatcaggcatcacgccacaggaggtggatgtggttgtcaccctgccactgagcgagtatttcgacacaaacgcacagccggacatggccaacatcaaccgcaaaaaagcgaacgttatgcgcccggtggagtaccagaacggcgaagcattcactatccgtaacgtgcgggttatgcctgaatccattccggctggctttaaggcactggctgacatgagtccgtttgaatccctgctgattgtggatttgggcggaaccacgctggatgtggcaaaggttcaggggcaactggcaggtatcagccaggtgttttgcgatccacacgtaggcgtttctctgatggccgatgccgtactgtcggtgatggccactaacggtatgcgcaccagtcaccacatcgccaataccattatcgaacatcgccatgatgaagcctggctgcgccagcacatccacaatgacgcgcattacgccagcctgatggcggttattcgtgaaaaggaagaaacactgaaacaacgcgtgatccgcgcgctggcgggtttttcgggttacgggcgggtgatggttgtcggtggaggggcggagattgtggcacccgctatccgcgaagcctgcggagttaatgcgactttcatcgcggacggggtgccacagtttgctctggttaatgggctgtacgcaatggacaaggagtaa

SEQ ID NO: 486686 - DNA, 2823 bp, Shigella sonnei
atgacggcagagtacatcagggactggcaacaaccgcgccacgcagtggggcgtgaaggaacggggatccccgctcctgaatccgcgctttcctcctggctggatgcccaccgggcagagaacgagcgccgccaggaaatggctgatgcggcgttctccgccacgccactgggcaacctgattaataaaagcctggacgcacaggaaaaacaggacaaaaccatcacactggcaggagacgccagaaaacaggcacgcggcgcggtggatgaagccatggcctcgctgcgcctgctgccgtcctatctgcgcgatccgcttattcgccacctctccttcctgcgcaaaaaacaggaagccgatcgccggaaaggcaaaaagagctggcaggcggaacgctatgcacgcggaaccctgcgcaaaatattcgaacgtctggatcgcactgacggacactggctgacaccgggttatcgctcccttgccggacgtgaacgcctggacgatttgctttacctgccgcaactcaacaaacaccagatacagacgctggccaccatgacggcggcgatgttcagcagcaccttcgaaaaactctgcgatggttttggcgcgactgatggcgagctgaccatggatgtaacgctgaaggcgtatcagatgctggcccgcatggcgttacacttacacgccatgcctccgcattatgacgcactgacaacagacaaagaccggaggcacgaaccggacacagaactgctgccgggcgcaatccttcgcctgacctgtgcggaatggtggaaacgcaaactgtggctgttacgttgcgagtggagagaagaacaacttcgcgccgcctgtctggtttccagaaaaacatcgccctatctgagccaggacgcgttaagcgagtttcgcgcacagcgcgagaaaacacgcgatttcctgaaaagtttcatgctggaaaatgaagacgggttcacgattgatctcgagacggtgtattacgcgggagtaagtaacccggttcaccgtaaggcagaaatgatggccaccatgaaggggctggaacttctggccgaagcccgtggcgacaaagcggtgtttctgactgtcacctgcccgtcaaaataccacgccacaacggagaacggtcatccgaatcccaaatggaacggggccacaatgcgcgactccagcgattacctggttaacacgttttttgcgacggtccgcaaaaaactgaaccgcgacggcctgcgctggtatggcatccgcacggcggagcctcaccatgacggcaccgtgcactggcatatgatggtctttgctcatccggaagaaatcgacaccattgtgtcccacacccgcgatattgccattcaggaagatcgtcacgagctgggcgatgacataactccgcgctttaaggcggagtatgtagacggctcaaaaggcacgccaaccagctacatcgccacctacatcgggaaaaacctggacagccgcgccgtggatggcatcgacccgaaaacgggcaagccacgcgttgaccacgaaaccggaaaatcaatggccgagagcgtggaacgcgccatcggctgggcgcgccttcaccgggtccgccagttccagttctttggcatcccctcccgccaggtatggcgtgaactgcgccgccttgccagccagatggcacgcaacccggaaggcccgcaacggctgaaggatgacgcaatggatgcggttcttgccgccgctgatgccggatgttttgccacctacatagagaaacagggcggcgtacttgttccacgcaaagactacctgattcgcaccgcctacgacctcgccgatgagctgaacgattacggcgaacagagcgtacagatttacgggatctggtcaccactcatcggggaatcctcccgtgtgtgcacgcatccggataactggaagctggtaagacgcaaaccggaagcggaagacagcgcccgcgaaaatggttttgaccttcagggcggccctgccgccccttggactcgtggcaataactgtccccgtgtacaggaaacggacaacaacgggacagaacagccggaagaacggccagcaccgtggccgcagctccctgacggcgttgatgtggatgaatggatgcgctcactgaaacggcacgaacgccgggcgctgatgcgttcgcttcgtgacaaacaggcaaaaaacagcagtgatgaaatgcagagctggacacagagccgcaaacagcagcggcctttgcctgataaccacgaattactcgctaaagaatggcgggagtctgctgaatctctcggcctgcatatcggtgaacaacagatgcagcacctgttacggggcggcagtctgtacgttgacggcagcatcattgcaccgcagggatttgaaattgtacgcaaaccggatacccgcccggacagccgaatcacgcagctctggcagcgcctgagccgtaatcatggcgtaagcagcacggagatccgccataacccggtcgccagctatctgacacagctgggggcatcagaccctgaagccgccgcacgcctggcatccacacttcagcaggaccagaacaccatgaaaacacccgttaccgtgctttctgacatgctgcgcgccatccgcgacgcagagcacgcacagagaatcagtgaaaccactgaacgcgcccgccgcaaagcagacctgctgcggggtggcctgaccagtggaaacaaaaaacagacagaaacgggactcacgaatcccgtaaatgagcaaaaaacgcgcagcgatatatga

SEQ ID NO: 486687 - DNA, 366 bp, Shigella sonnei; identical to SEQ ID NO: 469195

SEQ ID NO: 486688 - DNA, 246 bp, Shigella sonnei; identical to SEQ ID NO: 469043

SEQ ID NO: 486689 - DNA, 204 bp, Shigella sonnei; identical to SEQ ID NO: 469042

SEQ ID NO: 486690 - DNA, 243 bp, Shigella sonnei
atgggcaaagaatataaaactctcattaacaaagcacttgagcgtttttattttcgcttaagtgcatcaggcgctcatgctgaacgtgcggcccgtgactcattgaccagagcaatccgaagtctgtatgacgtggctttttacgctgatgatctggatgcacttaacgaactttccgagctgatctgtgccgcagaatgcggggaacatattgaaccgtataagctgggaaatatcgcatga

SEQ ID NO: 486691 - DNA, 288 bp, Shigella sonnei
atgaccaaagacaatgcacaaggtgtatttatccgttttattgattttcgcggtgaactgttattacgtgcatccgctattgacggagtgactccggcgggtaaaaacggagccgacgaagccacttacgtttatctgaacggcacgcgactgcttgtggaacttccgtaccagaccgtacgagaaatcatcagcgaagatgaaaaggcacgccaggttaatggcgatgaaccctatatcgaaattatttgtatggattcagaagctgaaatacagaaagcagattaa

SEQ ID NO: 486692 - DNA, 339 bp, Shigella sonnei
atgctgaagcaacgccgtaatttttgtaccggaacagaacgccacgctaaccgtttcactaccagtgcatcacgcagcaacatccgctacagcctgagtgatacacacgcaacgccggatggctacccagtaaaacaaatcggcgagcacgcctggctgattgagaaagctggaatcgtgatccacaaatgcccacgcaatccgtttaccggaaaccgcatttttgcactgagctgtggcgacaatcagttcgggcaggatttcacattatacgaagcacttcgcacggttgatcgtctgcttcgcgggcaaagttttattaaacaggctgatttataa

SEQ ID NO: 486693 - DNA, 279 bp, Shigella sonnei; identical to SEQ ID NO: 469041

SEQ ID NO: 486694 - DNA, 312 bp, Shigella sonnei; identical to SEQ ID NO: 469040

SEQ ID NO: 486695 - DNA, 939 bp, Shigella sonnei
atgcgtcctgaggggcgtaaaggcaaacgcattcgcaaaaaatttaaaacgaaatcggatgcagttttatatgagcggtgggtgctggcgcaacagcataacaatgagtggaaaggaaactccattgatcgccgtccgctgtcagtgcttattgacttgtggtggaaataccacggccagctaatgaagtcagggcataacacgcgccttaaattgctgcgcttgagtgaggcaatggatgacccgtgcgtgcataaacttaatacaacgatgctcaccgagctacgtgtgtccaggatagagcaggggatacagcccagcaccataaatcgagagattggggcgttaagcgcgatgtttaccgcactcatctcatccggccattttcttaacgataaccccgttcaaggccttaaaggaatgaaggttaacgagcgtgaaatgggatatctgagtaagtctgaatgtgttcagttgctggatgcactggctgaaaatcccgatgaacggctggccgtcgaaatccttctgtcgaccggggcgcgatggggcgaggtagcggcactggagcagcgccgtgttcttcattgtcgaatcactttttcaaaaacgaagaacagcaaaaaccgtaccgttcctatttctgaaagcctgtttgaaaagatcaaaaaacggggcgggaaactggtgtttccgacgctggattattcattggttcgcgatgtcatcaaaacggtcgcacctgatgttcctgacggccaggctgttcatgcgctgcgccacaccttcgccagtcatttcatgatgaacggcggcaatattctgacgctccagaaaattctggggcacgcaaagattcagacaacgatgatttatgcccatcttgcgccggattacttgcaggatgcggtgaggtttaatcccttgggaggaatgtaa

SEQ ID NO: 486696 - DNA, 501 bp, Shigella sonnei; identical to SEQ ID NO: 469039

SEQ ID NO: 486697 - DNA, 546 bp, Shigella sonnei; identical to SEQ ID NO: 469038

SEQ ID NO: 486698 - DNA, 1341 bp, Shigella sonnei; identical to SEQ ID NO: 483060

SEQ ID NO: 486699 - DNA, 663 bp, Shigella sonnei; identical to SEQ ID NO: 483348

SEQ ID NO: 486700 - DNA, 198 bp, Shigella sonnei
atggcaacggggattgccgtgcaaattcttgatgcgcaaagtcagcaagaaatcccgctcaatcaggtccagcctcttacgcccttaaaagccggggataacacactcaaatatcaacttcgttataagtccacaaaggcgggagcaacgggcggtaatgcgacggcggttctctattttgatctggtttaccagtga

SEQ ID NO: 486701 - DNA, 1071 bp, Shigella sonnei; identical to SEQ ID NO: 483325

SEQ ID NO: 486702 - DNA, 321 bp, Shigella sonnei; identical to SEQ ID NO: 1408

SEQ ID NO: 486703 - DNA, 1359 bp, Shigella sonnei
atgagtaatgttattgcatcgcttgaaaaggtactcctcccttttgcagttaaaataggaaagcagccacacgttaatgcaatcaaaaatggctttattcgcttaatgccgttaacccttgcgggggccatgtttgtattaattaacaacgtttttctaagctttggggagggggcgtttttttattccttaggtattcgcctcgacgcctcaaccattgaaacacttaatggcctgaaaggtattggcggcaacgtatataacggaacattagggataatgtctttaatggcaccgttctttattggcatggcgctggcagaagagcgtaaagtcgatgcgctggcggctgggttgttatccgttgcagcatttatgaccgtcaccccatatagtgtcggtgaggcctatgtggttggcgcaaactggttaggtggagcgaatatcatctccgggattattattggcctggtggtggcagaaatgtttacctttattgtccgccgcaattgggtcattaaattgcccgatagcgtacctgcttcagtatcgcgttccttctcggcattaattcccggctttattattctttccgtgatggggattattgcctgggcgttgaatacctggggcaccaacttccatcagatcattatggataccatctcaaccccactggcatcgttgggtagcgtggtgggctgggcctatgtgatctttgttccactgctctggttcttcggtattcatggcgcgctggcgctgaccgcactggacaacggcattatgacgccgtgggcgctggaaaatatcgcgacctatcagcaatatggttccgtcgaagcggcgctggcagccggtaagaccttccatatctgggccaagccgatgctggactcctttattttccttgggggcagtggtgcgactttaggcctgatcctggctatctttatcgcctctcgccgtgctgattatcgtcaggtggcaaaactggcgctgccgtccggcatcttccagattaacgaaccgattctgtttggtctgccaattatcatgaacccggtgatgtttatcccgtttgtactggtacaaccgattctggcggcaatcaccctcgcagcgtactacatgggcatcattcctccggtgaccaatattgcaccgtggaccatgccaaccggtctgggagccttctttaacaccaacggtagcgtcgccgcattgctggttgcactcttcaaccttggtatcgcaacgttaatttatctgccctttgttgtggtggctaacaaagcacaaaacgcgattgataaagaagagcgcgaagaagatatcgctaacgccctgaaattttaa

SEQ ID NO: 486704 - DNA, 141 bp, Shigella sonnei
atgtcgcaaaaatcgcttacgaccatcacgttctgcgtgacggcaatcctcatcatctggatgttgcacggttcgctgtgtgaaatacggatgagcttctggggagcggagtttgcggcgttcttacagtgtaagcagtaa

SEQ ID NO: 486705 - DNA, 261 bp, Shigella sonnei; identical to SEQ ID NO: 469036

SEQ ID NO: 486706 - DNA, 1503 bp, Shigella sonnei; identical to SEQ ID NO: 469035

SEQ ID NO: 486707 - DNA, 381 bp, Shigella sonnei; identical to SEQ ID NO: 458903

SEQ ID NO: 486708 - DNA, 519 bp, Shigella sonnei
ttgataaatataacggcaggtaatccaaaaacggttgaacaatatcaattgacaaaggactttgatgttgtctggtttttttcagaagatggtaagaactggtacgaagaacaaaagtattttgctgatgacacgataaaaatagcgtacgacaaagataatattatccgctatgtggaaaaggatgtgacagctatcagaccggatggattaagtgttgttgaagtgccggatattactgctaaccgacgggcggacatttcagggaactggatgtttaaggactgtacagtgattaaacgaatttatacggcagaggaattgcagcagcaggcagaaaatcggaaagccagacttcttgcagatgctgaatccgtgattttgccgctggagcgcgctgtcaggctgaatatggcaacagatgaggagcgcagtcgactggaggcatgggaacgctacagtgttctggtcagtcgtgtggatcctgcaaatcctgaatggccggaaatgccgcaataa

SEQ ID NO: 486709 - DNA, 1419 bp, Shigella sonnei
atgacatacgcactgattgataattcaactctaactgcagtccaaagaatcgaggggaaagtaaaaacaagatcgaaggactcagtagatacagacataatagcatttgagaactatatacagtctattttgttctatgatcacgttatcgcggttgatgattatattccagagtaccgtgggagtaggatttcaagtttcagagagatattatttcttgataaagcacaatatgggttggatgaaattgaaagtgaagcaaaaaaaatatctgatgcattgaaacctaaaattcgtggtggaacatttgttaatgacgattttaaaaaactaattgaacttcttcagacacatatcatatgtacatgggacattagttcaagtgtttatcatctaacactgaagaacttatctgatggaggtaaggagtttgaaaaatatggtaacattgctgctgccattttttcagaactgcgtgatgctgctgagtctggtaatagaacaaatggcgatgttgaacttctcgatcgatttggcaaccctattcgcaaggggtacaaagttcccggagcaaaatggggggatggcacatctgctggtgaagcatcagatgcaatcaaagcattcgtggcttcgcttgtatggctggctaatcgggcagtattttattctctcacagctaagtaccttcaagcagatacttttttatatccattacgtcaggcgtatcaacagacatatttaagccaaaactgtcagtatggttttgactatgctaaacatattgtagaaaacttttccacttcgttaagtcatgatctcattgatattcattctggtggtaaagctgtagcaacagcaacttcgcttcctttattttcggcatggctcgcaaaagaaactggtgatccaagttgtattgttgaagctgcttataacataagggacaacaacgaatttgtaagggcccgtgagaaaatgcgagaaataaagcgcttgtttgatgaaaatgaattgcctcaagctaataagtcagtaagagcattgcttactgaagtatcgaaagaatcagattatattcgaactaagtatgggctcaagactagacaaggtgtacctgtaactaagcttgtacatgtatacaatactgttgcggctattaattcccttccgaaactaccgacctttaattttaaagttaaagttcctgatttcttatatgatcttaaaaaacccaaggggtttcgtgctctctatcgaaatttgactaatgatctttctactgtgtggtcgttaggagaagctcgagatattcttggaagtaaagttgtgatagataatcatgcaagaatttacagtccgaagcatgaagaaccgcgtttcaaaaactctcattccccatataagagcccgatgtag

SEQ ID NO: 486710 - DNA, 1191 bp, Shigella sonnei
atgagtgactatcatcacggcgtgcaggtgctggagattaacgacggcacccgcgtcatttccaccgtatccactgccattgtcggcatggtctgcacggccagcgatgcggatgcggaaaccttccccctcaataaaccggtgctgattaccaatgtgcagagcgcaattgcaaaggccggtaaaaaaggcacgctggcggcatcgttgcaggccatcgccgaccagtcaaaaccggtcaccgttgtcgtgcgtgtggaagacggcaccggcgacgacgaggaaacgaaactcgcgcagaccgtttccaatatcatcggcaccaccgacgaaaacggtcagtacaccggactgaaagccctgctggcggcggagtcggtaaccggtgttaaaccgcgtattctcggcgtgccgggactggacaccaaagaggtggctgttgcactggcatcagtctgtcagaagctgcgcgctttcgggtatatcagcgcatggggctgtaagaccgtttccgaggtgaaagcctaccgtcagaatttcagccagcgtgagctgatggtcatctggccggatttcctcgcatgggatacggtcgccagtaccaccgccaccgcgtatgccaccgcccgtgcgctgggtctgcgcgctaaaatcgaccaggagcagggctggcataaaacgctgtccaacgtcggggtgaacggtgttaccggcatcagcgcgtccgtattctgggatttgcaggagtccggcaccgatgctgacctgcttaacgagtcaggcgtcacaacgctgattcgccgtgacggtttccgcttctggggtaaccgtacctgctctgatgacccgctgttcctctttgaaaactacacccgcaccgcgcaggtgctggccgacacgatggctgaggcgcacatgtgggcggtggacaagcccatcaccgcaacgctgattcgcgacatcgttgacggcatcaatgccaaattccgtgagctgaaaacaaacggctatatcgtggatgcgacctgctggttcagcgaagaatccaacgatgcggaaaccctcaaggccggaaaactgtatatcgactacgactataccccggtgcctcctcttgaaaacctgaccctgcgccagcgtattaccgataaatacctggcaaatctggtcacctcggttaacagcaattaa

SEQ ID NO: 486711 - DNA, 519 bp, Shigella sonnei
atggcaatgccgcgcaaactcaagttaatgaacgtctttctgaacggctacagctatcagggcgttgcaaagtccgtcacgctgccaaaactgacccgtaaactcgaaaactatcgcggtgcggggatgaacggaagcgcaccggtagacctcggccttgatgacgatgcgctgtcaatggagtggtcgctcgggggcttcccggattcggttatctgggagctttacgccgcaaccggtgtggatgccgtgccgattcgttttgcaggctcttaccagcgtgacgataccggcgaaacggtggccgtagaggtggtcatgcgtggccgtcagaaagaaatcgacaccggcgagggtaaacagggagaagacaccgagtcgaaaatctccgtggtctgcacctatttccggctgacgatggacggtaaggagctggtcgaaatcgacaccatcaacatgattgagaaggtgaacggcgtcgaccggctggagcaacaccgccgcaatatcggcctgtaa

SEQ ID NO: 486712 - DNA, 276 bp, Shigella sonnei
atgaacaaagaaaatgtgattaccctggacaatccggtcaagcgtggtgagcaggttatcgaacaggtcacgctgatgaaacccagtgcggggacgctgcgcggtgtcagtctggctgcggtcgcaaactcagaagtcgatgcactgattaaggtgctgccgcgcatgacggcaccgatgctgaccgagcaggaagtcgccgcgctggaactgcctgaccttgtggcgctggccggtaaggtggtcggttttttgtcgccgaactcggtgcagtga

SEQ ID NO: 486713 - DNA, 2448 bp, Shigella sonnei
atgagtaacaatgtaaaattacaggtattgctcagggctgttgaccaggcgtcccgcccgtttaaatccatccgcagagcgagtaagttgctgtcgggggatatccgggaaacacaaaaatcactgcgcgagctgaacggtcacgcatcccgtattgagggattccgcaagaccagtgcacagctcgccgtgactggtcatgcacttgaaaaggcacggcaggaggccgaagcccttgccacacagtttaaaaacaccgaacgcccgacccgtgctcaggcgaaagtgctggaatccgcaaagcgtgcggcggaggacttacaggcgaaatataaccgcctgacagattccgttaaacgccagcagcgggaactggccgctgtgggaattaatacccgcaatcttgcacatgatgagcagggactgaaaaaccgtatcagtgaaaccaccgcccagcttaaccggcagcgtgacgcgctggcgcgtgtcagtgcgcaacaggcaaaacttaacgcagtcaaacagcgttatcaggccggaaaggaactggccggaaatatggcctcagtgggcgctgccggtgtggggattgctgctgcgggaacgatagccggagttaagctgctgatgccaggttatgagtttgcgcagaaaaactcagaattgcaggctgtgctcggtgtggcaaaagactccgccgaaatggctgcactccgcaagcaggcgcgccagctcggtgacaacaccgccgcctcagcggatgatgcggccggtgcacagattatcattgcgaaagcgggtggggatgttgatgccattcaggcggcaacgccggtcacgctgaatatggcgctggcgaaccgccgcacaatggaagaaaacgccgccctgctgatggggatgaaatccgcctttcagctttcaaacgataaggtcgctcatatcggggatgttctctccatgacgatgaacaaaaccgccgctgattttgacggcatgagcgatgcgctgacctatgccgcaccagtggcaaaaaatgccggtgtcagcattgaagaaaccgccgcaatggtcggggcgctgcatgatgcaaaaatcacaggctcaatggcggggacgggaagccgtgccgtgttaagtcgcctgcaggcaccgactggaaaagcatgggatgcactcaaagagcttggcgtgaaaacctcagacagtaagggaaacacccgaccagtatttaccattctgaaagaaatgcaggccagctttgagaaaaaccggctcggtactgcccagcaggccgaatacatgaaaaccattttcggggaggaggccagctcagccgccgctgtgctgatgactgccgcgtcaaccggaaagctggacaaactgaccgctgcgtttaaagcctcagacgggaagaccgcagagctggtaaatatcatgcaggacaacctcggcggtgactttaaggagtttcagtccgcttatgaggcggtggggacagacctgtttgaccagcaggaaggcgcgctacgtaagctcacgcagacggccacaaagtatgtgttaaaactcgacggctgggtacagaaaaacaaatcactggcgtcaaccattggcctcattgccggtggcgcgctggcgctgactggcatcatcggtgcaattggtcttgtagcctggccggttatcaccggcatcaatgccatcatcgcggcagcaggcgcaatgggggcaatcttcacgacggttggtagtgccgttatgacggccatcggggcgattagctggccggttgtggctgtggtggccgccattgtcgccggggcgttgcttatccgtaaatactgggagcctgtcagcgcattctttggcggtgtggttgaagggctgaaagcggcatttgcgccggtgggggagctgttcacgccactgaaaccggtgtttgactggctgggcgaaaagttacaggctgcgtggcagtggtttaaaaacctgattgccccggtcaaagccacccaggacaccctgaaccgttgccgtgacacgggcgtcatgttcgggcaggcactggctgacgcgctgatgctgccgcttaatgcgttcaacaaattgcgcagcggcattgactgggtactggaaaagctcggggtcatcaacaaagagtcagacacacttgaccagaccgccgccagaactcatgccgccacgtatggcaccggtggttatattccggcgaccagctcttatgcaggctatcaggcttatcagccggtcacggcaccggctggccgctcttatgtggaccagagtaaaaacgaatatcacatcagcctgacgggtggtactgcaccggggacacagcttgaccgccagttacaggatgcgctcgaaaaatacgagcgggataaacgtgcgcgcgcccgtgccagcatgatgcatgacggttaa

SEQ ID NO: 486714 - DNA, 480 bp, Shigella sonnei
atgatgctcgcgttaggtatgtttgtttttatgcgccagacgctgccacaccagaccatgcagcgtgaatcagattatcgctggccgtcaaattcccgtatcggtaaacgggatgcctatcagtttctcggtgtaggtgaggagaacatcacacttgccggtgtgctttatcccgaactgactggcggaaagctgacgatgaccacgctcagactgatggcagaggaaggccgggcgtggccgttgctggatggcaccggcatgatttacggcatgtatgtcatcagcaaggtgagtgaaacagggagtattttctttgcagacggcacaccacggaaaattgattttacgctgtcgctcacccgcgttgatgagtcactggccgcgctttatggcgatatcggtaaacaggcggaatcgctcatcggtaaggctggcagtatggcgactaaattcacgggtatgacgggggcgggataa

SEQ ID NO: 486715 - DNA, 1164 bp, Shigella sonnei
atgctggatgcgctgacatttgatgcaggcagtacgctgacgccggattacatgctgatgctcgacagcagggatattaccggcaatatcagcgaccgtctgatgagcatgaccctgacggataaccggggctttgaggctgaccagcttgatattgaactgaacgatgccgacgggcaggtcgggctgccggttcgtggcgctgtcctgacggtgtatatcggctggaaaggttttgccctggtatgcaaagggaaatttaccgttgatgaggttgaacaccggggcgcgccggatgtggtcaccatccgcgcccggagtgcagattttcgcgggacgctcaattcccgccgtgaaggctcatggcatgacattacgctcggtgcgattgttgaggcgatagcctcccgtaacaggctggaagccagtgtcgctccgtcactggccggaataaaaattccacacatcgaccagtcgcaggagtctgatgcgaaattcctgacccgtcttgctgaacgcaacggcggcgaggtgtcggtaaaaatgggaaaactgctgtttctcaaagcggggcagggggtgacggccagcggtaaaaaaatcccgcagattaccatcacccgcagcgacggcgaccgtcatcattttgcgattgctgaccgtggagcttacaccggcgtaacggcaaagtggttacacaccaaagacccgaagccgcaaaagcagaaggtaaaactgaaacgcaaaaagaaagaaaaacacctgcgcgcactggagcacccgaaagcgaaaccggtcacgcagaagaaagcgccaaaagtaccggaagcgcgcgaaggtgaatacatggccggtgaagctgacaacgtttttgccctgaccacggtatatgccacaaaagcgcaggccatgcgcgccgctcaggcgaagtgggataaactgcaacggggtgtagcggagttctccatcagcctggctaccggtcgtgcagatatttacacggaaacaccggttaaagtgtcaggctttaagcgcgtcatagacgagcaggactggaccatcactaaggtgacacattgtctcaataatagcggcttcacgacgtccttggagcttgaggtaaggctttctgatgtggagtacgaaacagaagatgatgagtga

SEQ ID NO: 486716 - DNA, 219 bp, Shigella sonnei
atgtttcattgtcctttatgccagcatgccgcacatgcgcgtacaagtcgctatatcactgacacgacaaaagagcgttatcaccagtgccagaacgtgaattgcagcgccacgttcatcacttatgagtcggtacagcgatacatcgtgaagccgggagaagtccacgccgtaaggccgcacccgttgccgtcagggcagcaaattatgtggatgtga

SEQ ID NO: 486717 - DNA, 990 bp, Shigella sonnei
atgaacaagtggggcgtagggttaacatttttgctggcggcaaccagcgttatggcaaaggatattcagcttcttaacgtttcatatgatccaacgcgcgaattgtacgaacagtacaacaaggcattcagcgcccactggaaacagcaaactggtgataacgtggtgattcgtcagtcacacggtggttcaggtaaacaagcgacgtcggtaatcaacggtattgaagctgatgttgtcacgctggctctggcctatgacgtggacgcgattgcggaacgcgggcggattgataaagagtggatcaaacgtctgccggataactccgcaccgtacacttccaccattgttttcctggtgcgtaagggcaatccgaagcagatccatgactggaacgatctgattaaaccgggtgtttcggtgatcacgcctaatccgaaaagctctggtggcgcacgctggaactacctggctgcctggggctacgcgctgcatcacaacaacaacgatcaggcaaaagcacaggattttgttcgggcactgtataaaaacgtcgaagttctggattctggcgcgcgcggctccactaacacctttgtcgagcgcgggattggcgatgtactgatcgcctgggaaaacgaagctctgctggcagcgaatgaactggggaaagataaattcgaaatcgtcacgccgagtgagtctatcctcgcagagccaaccgtgtcggtggtcgataaagtggtcgagaaaaaaggcaccaaagaggtggcggaagcctacctgaaatatctctactcgccagaaggtcaggaaattgccgcgaaaaactactaccgtccgcgcgacgctgaagtagcgaaaaagtacgaaaatgcgtttccaaagctgaagttattcaccattgatgaagagttcggcggctggacgaaagcgcaaaaagagcattttgctaacggcggtacgttcgatcagatcagcaaacgctga

SEQ ID NO: 486718 - DNA, 225 bp, Shigella sonnei
atgctggcaaaatctgtcacagcacaaacacatatggcgtggagtgatgcggataatcagcaggtgcagctgacgacgcaggaacttgaggaactggccacagcgatgatgcaggccattgttgagcgcaacgatgagatttatcgctgtcagcgggagatgaaagaacaactttctctgttgcccacactggacgaggtgagagcgttcagaccaggcgattaa

SEQ ID NO: 486719 - DNA, 696 bp, Shigella sonnei
gtgggaaaagagaagaaatcacgcattctgacaaaaccctgcgttattgagtatgaaggccggattgtcggctatggttcaagggagctgcgcgttgaaaccatatcctgctggctggcccgcacaatcattcagacaaagcattattcccgccgttttgtgaataactcctggttgcatctgggcgtattcagtggacgtgatctggttggtgttcttcagtggggatatgcccttaaccccaactcagggcgtcgcgttgtgcttgaaacggataaccggggctatatggaactgaaccgcatgtggctacacgacgacatgccccgcaactctgaatcacgggccatcagctacgcgctgaaaaccatcaggttactgtatccgtcagtggagtgggttcagtcctttgcagacgaacgttgcgggcgtgcaggtgttgtgtatcaggcgtcaaattttgattttattggcagccatgaaagcacattctacgaactggacggtgagtggtatcacgaaataacgatgaatgcgattaatcgtggagggaagcgcggcgaatatttacgagcgaataaggagcgggccgtggtacacaaatttaatcaatatcgctacatcagattcctgaacaagcgagcaagaaagcgactaaatactaagctattcaggattcagccttacccgaagtga

SEQ ID NO: 486720 - DNA, 456 bp, Shigella sonnei
atgagttctcaatttacgacgtctgttgttactgaaatgcaggtcatcccggtggcgggtcatgacagtatgctgatgaatctgagtggggcacacgcaccgttctttacgcgtaatattgtgattatcaaagataattccggtcacactggcgtaggggaaattcccggcggcgagaaaatccgtaaaacgctggaagatgcgattccgctggtggtaggtaaaacgctgggtgaatacaaaaacgttctgacgctggtgcgtaatacttttgccgatcgtgatgctggtgggcgcggtttgcagacatttgatttgcgtaccactattcatgtagttaccgggatagaagcggcaatgctggatctgctggggcagcatctgggggtaaacgtggcatcgctgctgggcgatggtcaacagcgtagcgaagtcgaaatgctcggttatctgtaa

SEQ ID NO: 486721 - DNA, 1341 bp, Shigella sonnei; identical to SEQ ID NO: 481894

SEQ ID NO: 486722 - DNA, 1023 bp, Shigella sonnei; identical to SEQ ID NO: 484481

SEQ ID NO: 486723 - DNA, 897 bp, Shigella sonnei
atgatgctaagcgaggaaacgtccgccgtacgcccacaaaaacaaacgcgatttaacggtgcaaaactggtatggatgctgaaaggcagtccgctcaccgtgaccggcgcagtcatcattgtattaatgctattgatgatgattttttcaccgtggcttgcgacgcatgatcccaacgccattgatttaaccgcccgccttttgccgccttctgcggcgcactggtttggcaccgatgaagtgggacgcgatctgttcagccgcgtactggtcggcagtcagcaatcaattctcgccggattagtcgtggttgccattgcgggtatgattggttcgctactcggatgtctatccggtgtgcttggcggacgcgcagacgccatcatcatgcgcatcatggacattatgctgtcgattccttcgttggtactgacaatggcactggctgccgctctcgggccgagtttatttaacgccatgctggcgattgctattgtgcgaattcccttttatgtgcgcctggcgcgggggcaagcattagttgtacgccagtatacctatgttcaggcggcgaaaacctttggtgcgtcgcgttggcatctgatcagctggcatattttacgtaactccctgccgccgctgatcgtgcaggcatcgctggatatcggtagcgcgattttaatggccgccacgttgggatttattggcctgggtgctcaacaaccgagtgctgaatggggcgcgatggtagctaatggtcgcaactatgtactcgatcagtggtggtattgcgcatttccgggggcagcgattttgcttaccgccgtcgggtttaatctctttggtgatggtattcgcgatctgcttgacccgaaagcaggaggaaagcagtcatga

SEQ ID NO: 486724 - DNA, 690 bp, Shigella sonnei; identical to SEQ ID NO: 484484

SEQ ID NO: 486725 - DNA, 216 bp, Shigella sonnei
atgtttacttattatcaggcagaaaattcaacagcagaacccgctctggttaatgccattgagcaaggccttcgggcagagcaaggtgttgtcactgaagatgacattctcatggagctgaccaaatgggtggaagcttctgataacgacatcctcagtgatatctaccagcaaacgatcaattatgtggtcagtggccagcaccctacgctttaa

SEQ ID NO: 486726 - DNA, 288 bp, Shigella sonnei; identical to SEQ ID NO: 469192

SEQ ID NO: 486727 - DNA, 525 bp, Shigella sonnei
atggctaaacccgcaaaacgaatcaggaacgccgcagcggcttatgttccgcaatcccgcgatgccgtggtatgtgatatccgccggattggggacctgcaacgcgaagcagcacgacttgaaacggaaatgaatgacgctatcgctgagattacggagaaatacgcctcacagattgcaccgcttaaaaccagtatcgaaaccctttcaaaaggcgttcagggatggtgtgaagcgaaccgtgacgaactgacgaacggcggcaaggtgaagacggcaaacctggtaaccggtgatgtgtcatggcgtcagcgcccaccatcagtaagtattcgcggtgtggatgcagtgatggaaacactggagcgtcttggccttcaacgctttattcgcacgaaacaggaaatcaacaaggaagcgattttactggagccgaaagcagtcgcaggtgtcgccggaattacagttaaatcaggcattgaagatttttctattattccgtttgaacaggaagccggtatttaa

SEQ ID NO: 486728 - DNA, 549 bp, Shigella sonnei; identical to SEQ ID NO: 469203

SEQ ID NO: 486729 - DNA, 540 bp, Shigella sonnei
gtgattgatgcaaaagttctgaacggtgtcagcacattattacgggcttacggacgtctgacctgtggtgttctggcggacaaaatgaggatgccggtctctgcaatggtgtatttcctgcgtgatgcggttgatgccggagtgctgactgaactgaacggcttttacgacgttccgcgctcccgggcagagccgcctgccgggcgaaattcaacggagcaccccgatgttgatggtgcgcaatggtgcacgttccgccgctctttgccctggctggaaggcaatgccattccggcactggcaaaagaatttgcgacaggcgtactgacctgcgagtcggtttacatcgttgctgaagtggatgacgagatgtgtaaacagggaatgccccattttgtgatggcttatatcgatatccggctgggtcgttttatttgtggctccagtggctggaatatcaccgaccacgtcctgcgctatctcattcttgattattcaccggttccggcggaaacacaggaaatcagcgagcatgattaa

SEQ ID NO: 486730 - DNA, 147 bp, Shigella sonnei; identical to SEQ ID NO: 468964

SEQ ID NO: 486731 - DNA, 315 bp, Shigella sonnei; identical to SEQ ID NO: 468965

SEQ ID NO: 486732 - DNA, 267 bp, Shigella sonnei; identical to SEQ ID NO: 468966

SEQ ID NO: 486733 - DNA, 552 bp, Shigella sonnei; identical to SEQ ID NO: 468967

SEQ ID NO: 486734 - DNA, 450 bp, Shigella sonnei; identical to SEQ ID NO: 468968

SEQ ID NO: 486735 - DNA, 588 bp, Shigella sonnei; identical to SEQ ID NO: 468969

SEQ ID NO: 486736 - DNA, 228 bp, Shigella sonnei; identical to SEQ ID NO: 468970

SEQ ID NO: 486737 - DNA, 411 bp, Shigella sonnei; identical to SEQ ID NO: 468971

SEQ ID NO: 486738 - DNA, 609 bp, Shigella sonnei; identical to SEQ ID NO: 468972

SEQ ID NO: 486739 - DNA, 228 bp, Shigella sonnei; identical to SEQ ID NO: 468973

SEQ ID NO: 486740 - DNA, 306 bp, Shigella sonnei; identical to SEQ ID NO: 468974

SEQ ID NO: 486741 - DNA, 294 bp, Shigella sonnei; identical to SEQ ID NO: 468975

SEQ ID NO: 486742 - DNA, 300 bp, Shigella sonnei
atggcccgaaaactgaagccgttaagtcgtggagaacgggccgtcgtgcggcagctggcgtactgccttgtgctggcagacattgagcaaaacgccattgtccgtgcatacgaaaaacatacaggaaagccctggaacccggatgcaccggatacccccatgaaacgcgccctgcggtcatcaccggcatgtgcgcggctgtggaagctgttaagtaaggatattcagtccgttcgtgaagaaatatacgccggtctgaaaacaccgggaactgaagacgggggccgtcgtgaaccgtaa

SEQ ID NO: 486743 - DNA, 582 bp, Shigella sonnei
atggaaaatgaacaacgccccacccgtggccgtctttccaaagtggatttactcccggacagcatccgggagcagttgcatcagatgctgcgggaaaagcggcacacgcaggaagaaatccgcgaagccatcaatgccctgattgacgaacacaacctgccgggggagatgcagttaagccggacgggcttaaaccgctatgccatccgcatggaaaaagtcggggcaaaaatccgcgcctcccgcgaaatggccgaagtctgggcggcaaagctgggttccgcgccgacgtcagacgtcggcaagctgctgatggagtttgtaaaaacgctggcctttgaaacgtccatgtcgatggcagaagatgacaaacctgttgcaccgaaggcgctggggcaactggcgctggttgcccagcgtctggaagcggcagccatgaccagccataaacgcgaaaaagcaatccgcgatgcgtttgcgcaggaaatggcagagaaaaccgaagagctggtcagagcgggcggtctgtcaggcggtgcggctgacaccatcaaacgtgaaattctggggattagtgtatga

SEQ ID NO: 486744 - DNA, 1536 bp, Shigella sonnei
atgacacagatgaacgcattcagtgaatccgatgttctgctgccgtatcagaaacgttgggtggcggatgattcaaaactgaaaatcgccgaaaaatcccgccgtaccggtttaacctgggcagaagcggcagatgcggcactgaccgcatcactgaagaaggaaaacggcgggcgcgatcacttttacatcggttcgaataaggagatggcccgcgaatttatcgacgccgtggcgatgtgggcgaaagcgtttaatgcagccgcggaagaaatccgcgaggaagtgatcaccgacgaagacaaggacattctgacgttcgtcgtgtacttcgccagcggatttaaggtcaaggcgctgtccagtaatccgggcaacattcgcgggatgcaggggaatgtcaccatcgacgaagcggcgtttcatgaaaagctggatgaggtactcaaggcggtcacaccactgaccacgtggggcggtaaggttcgccttatctccacccatgacggcgtggacaacccgtttaaccagctgattcaggaaagccgcgcaggcaaaaaagattaccgtattcacaccatcacgctggatgacgcctgcaatgacggtctgtaccggcgtatctgtcaggtgcgcggcatggtgtggtcaccggaagccgaggcggaatggaaagaaggcctgctgcgaaataccgccacccgcgaagatgcgctggaggagtattactgcgtcccgaaaaacggcggcggcacgtatatcccccgctcactgcgtgaacgtgcggcccgtggcaccggaaaagtgttgcgctttaccggcacgccggagtttaacgcactgacggaaagccagcgccgggcagatatccgggaatggctggaaacggtggtgcgccctgaactggaaaaactcccgcagagcctgcgccactgtctgggggaagactttgcgcgttcgggtgacctgaccgtgctggccccggtaacggtgaacgacgacaccacccgcgaggtgccgttcctggttgagcttgccaatgtgccgtttaaacagcaggagcaggtgctgttctggctttgcgatcgtctgccccgtcgtgacggtatcaaaatggatgcgcgggggaatggtcagtatctggcagaacaggcggcggagcggtacggcgatgaggtggaacaggtgatgctgtccgtggcgttctaccgcgaaaacatgccccgtttccgtgcagcgtttgaagatgatgagctgatccttccgaagcatgaagacgtgatcaatgacctcggggccattcagttactgcgtggtgttcccggcattgacgatgcccgtactaaaggcagtgatggccgcaagcgtcacggcgacgccgctgtggccattttcctgggcttccttgccagcaaggatgactgccaccgttacgagctgcaccgcctgaaccgcccggcgaaaccggaagaaggcaacgcgcgccgccagatgaagctgacacgcggcctgaaaaatgagggaggtttactgtga

SEQ ID NO: 486745 - DNA, 1572 bp, Shigella sonnei
gtgaacctgaaacaactggccggggccgttcgccgtctgctgaatccggcaaccggtgaggaagacacgctgaaaaaagaggcgctcaacgaagcacaggcccgtccgcgtcatgccggtgtgcgtccggcctcgccgggtatcagcgtcgcctccgggctgaaccccggcaggctggcaggcattctgcgcaatgccgccgacggcatcacgcgtgatttttttatccttgccgaagagatggaagaacgtgatttgcattacgcctcggtgctgcgcacccgcaagctgacagtggcaggtatcgaaccggtggtggtggccgccagtgatgacgatgccgacgtgcagctggcggacgccatccgtgcgctgatggaagccccgcaaatccccgaactgatgtttgatttgctcgacgggctgggaaaaggcgtggcggtctgtgaaatcctgtgggacacccgcaacaaccactggatgccccgtgattatgagtgggttgatccccgttttctgaaagccgaaaagcccacactgcgccagttccgcctgctgacggacgatgaaccggtggatggcgtaccgctgacaccgggaaaattcattgttcaccagccgcgtctgaaatccggtctgccgctgcgtaacggtctggcccgtctggtggctgtgatgtacatgctgaaatcatttaccgtgcgcgactggtgggcatttgcggaaaaattcggcattccggttacggtggggaaatacggtcccaacgccacggaggagcaaatccgcgtgctgattgatgcgattgcctccattgcctcggatgccgggtgtgccattccgcagtccatgcaactggagatgcaggaaaccgccagccggaataacggcggcgcactgttccgtgaaatggcggaatggtgcgatgcgcaaatcagtaaggctgtgctggggcagaccatgaccacggataacggcagttcgcgttcacaggcggacgtgcacaatcaggtgcgcatggacattgtgcgctgggacgcgcgacagctggctaacacgctgaatgaatatctggtgcggccctacatcgaggccaactacgggccacaggcgcactacccccgtgttgttctgcgtatcagtgaagccgaagatctgaaggcgctgacggatgctctggtgccgctgattgaccgggggatgcgggttcaggaatcggagctgcgggaccggttcggcctgactgagccagacgaaggggctgatgttctgcatccggtttccgccgggatgccgggtgatatggcgatgaaccgcgagcgcgtcgccctgaacagggaacaccccgacgaactggcacagatggtggatgatgccctgcgtgactggcagaaaaccggcgaggcgttcacgaacccggtgctgacactggcgcaggagtgcgacagttttgatgactttctgaaacgcctgcctgagcttcaggaaacgctgaacgcggacgactttgccctgcaactggcggaggtgtgctttaaggcgcgtgcgctgggagacactgctcatgcgtga

SEQ ID NO: 486746 - DNA, 765 bp, Shigella sonnei
atgcgtgaaaccctcatcccgaaagaggcgctggcgtggctgaaggcgaagaagctgcgtcccggttttgattaccgggatgtgtggcgggaagagtaccggtacagcttccccgtggccagaatgctgcaactggatttgttgtcggatgtgaaagcccttgtggaagacgccctgcaaagcgggcagacgttcagcgagttccgggagatgctgcaaccgttgctgataaaacgcggatggtggggcgtacaggagatggatgatccgctgacgggtgaaacccgcaccgtgcaactgggcagcgaccgccgcctccgcacgatttttgataccaacatgcgcaccgcccgcgcggcgggccagtgggaacgcattcagcggacaaagcaggccatgccgtatctgatgtacgagctggggccatcccgtgagcaccgggtggagcatgtgaaatgggcgcgtctgtgtctgccggtagatcatccgttctggcagacgcattttgcccctaacggctggggctgcaaatgcaccatccgtcaggtcagccgtggtgagtatgcgcaactggcggcacagggcaccattcacaccgaagcgccggaaatcagaactgtccgctgggtgaacaaacgcacgggcgaagaggaagatgtgccggaagggattgatccgggctggaactacaatcccggtataaaccgtgagcaggagctggcgcgccagctggcggccagacaggcccgttttaacagtgaataa

SEQ ID NO: 486747 - DNA, 957 bp, Shigella sonnei
atgcaaccggaactgctggcgctgtgtttttccctgccagaacccatccctgagctgacacccgctcaactgccggaatggcttgaactcgttcctgcgggtgagttcaccgggcgcgatggccggacgtggatgaaccgcaatccacatgaggtggttgcccgttcgtccgacatcaacattccggtggacattgaacatgccaccgaaattaaaggcccgcggggtgaagaggctccggcgtatggctgggtggaagcactgcgggtgacggacagcggcaccattgaagggcgtgttgtctggagtgagtccgcccggtggatgctgagcgagcgccgctaccgctattacagcccggcgtttttccatgacgcagacggtgcggtgacgcgcctgtccagcgtcgggctgaccaacaaacctaacctggattttcctgcactgaatacggagaaaaacccgatgacagtacctgtgcaaatcaccggcctgcttggactggctgaatccgccacggtggacgataccgtggccgccattaaacaacttcaggagaacgaacaggtggcgctgaaccgcgcacagacacctgacctgacgaagtttgtgccggtggaaacccacaatctggcactgaaccgtgccgaaaccgcagaaaaacgccttcagcaactggaagagaaggaagccgaggcgcttgtggatgcggccatcggggccggaaaagtcgccccggcaaaccgtgacatgttccttgccacctgccgcacggaagaaggccgcaaacagtttgcggagtacaccaaaggtgcacagccgctggttaacaacgacaagcccagccagggcaaggataaacccgcgcagacactgaccgatgccgaactggcgatgtgtcgcagcatggggattaccggggaagagttcctcgccgctaaaccgaaacaggagtaa

SEQ ID NO: 486748 - DNA, 906 bp, Shigella sonnei
atgtcacagactatcagttctgaaatccttcatgcactgaccacctgcctgagcgccgcctttacccgtggactgagtggtgtcgaaccgcagtggaatcgtattgcttctgaggtgccgagttcgtccgcctccaacacttacggctggatgaaagatttaccggacatcaaagaatgggtcggtgagcgtcagctggcaacgctggacggttatggttacaccatcaccaacaaactctgggaaagttccattcgcgttaagcgtgaacacattgaagatgaccagattggtcaatacagcattaccgccgaacgctatggccgtatgactgctgtgttcccggacaagctgtgttacgccctgttgtgtgccggttttaacaccctgtgctttgacggccagaacttctttgatgaagaccacccgctgggtgacggtacgtacagcaacgttgtcggcaccccggcatcagacaagggcgaaccgtggttcctgattgatgagtcgcaggtgctgaaacccatcatctggcagacgcgacgcgcctttaagtttgaagccctggacgatctgaacagcgagcacaccttcaagaaccacgagttcctgtacggcgtggacggtcgctgtaatgcgggcttcggcttctggcagaccgccgtcggttcccatgcagcactgacggtggagaactacaaaaaagccaatgagttgctgcggggcatgaagggcaccaacggtgagccgctgggcatccgcccgaccacccttgtggtggggccgaaaaaccgtgcggacgcgaagctcattattgacgccatgctggttaacggcggcgattccaacatctggtacaaggatgtgaagatcgtggacagcccgtacatcaccaccccggcataa

SEQ ID NO: 486749 - DNA, 312 bp, Shigella sonnei; identical to SEQ ID NO: 468983

SEQ ID NO: 486750 - DNA, 438 bp, Shigella sonnei; identical to SEQ ID NO: 468984

SEQ ID NO: 486751 - DNA, 543 bp, Shigella sonnei; identical to SEQ ID NO: 468985

SEQ ID NO: 486752 - DNA, 612 bp, Shigella sonnei
atgacagaacaacgccctgaactgcgcacaccggggagcaccgttgcggccgcagagcgcattgtggcctggctgcagacggcccttcagggggacacccccgaccgggctgatgtggtggagcgtcacatcggccagttcaacagcacggatgaagtgaaacgctatctgtccggtcgcaccggctgtatccgggtagctgccctgcgtgtccgggatatcaacccgcgcggcgggctgtccggtctggttacctgggtggcttacatcatggcgacggattcgtgggggtactcccgcgacgtgcgctgtgaagtgctggccgggaaggtgatcaaacgcctgctgtcgtcggatgccaccgggggcatgggggctgaacgtatggccgctgatgtgcgggcagacaacatttactccgtcagcctcgacgggctgggtgtcaccatgtgggcggtgacgtgggagcaggaattccggctggatgaagagattgatctcgccgcgctccctgatttcctgcgcctcggggcaacgctgcgctgcggcgaacacactgaaattaacgacgtgatccatgtacggggtgacgatggaacagaaactgattaa

SEQ ID NO: 486753 - DNA, 201 bp, Shigella sonnei; identical to SEQ ID NO: 468987

SEQ ID NO: 486754 - DNA, 1476 bp, Shigella sonnei
atgtcgctgggttccattcctgatgatatccgcgtcccgcttgtctggatcgatatcgacaattcacaggcgctggagggtgcatccgcgcaaagccgaaaaattctggtcatgggccatgcggtatcgtccggcagcgcagacgccctgtcactgacccgcatcaccagtgacagccaggcagaccagctttatggcaaagggtcgatgctggctgaaatgctcaaaatgctgcgtcgtgccaacacgtacacggaaacctgggcgatgccggttgccgctcctgaaggcgctgccgcaaaagccacgctgaccgtgctgggtacagcgaccgaagccggaacggtggcactgctgattaacggtgtgtccgttcaggtgagcgtgagcgccggggatacgaaggaaaacattgcaaaagccattgctgatgcggtgacgaaaaagcctgccacgcaggtggccgctgcggtgaaggatgatgccacggataccgtggagctgaccgtgaactggcacggcgtcaccggcaacggtgccgacgttcgcctgaactaccacaccggtgaagccttcccggcaggtgtgaaggtgaccgcaaccgcgtttaccggcggcaccgggacaccggaaatggcagacgccgttgcggccatcggcccggagtggtttaccgatatcatcgccccgttcaccgacacgaaaagcctgaacaccctgcgtgatgaactgctgaaccgctgggggccgctcaaaatgatggaagcgcagctgtggacggcgtttcgtggcacacacggggaaaccggcacgtttggtgaaacccgcaatgactggctgattagctgtatcggcaccaacctgtcaccgcacccggcgtggatgtgggccgcgtcatacggcgcaacggcagcgtatcaccttgccattgacccggcgcgaccgcttcagacgctggtcctgaccggcattctgccgcctgcgcgtaatgttcgctgggatatgccggagcgtaatctgctgctgcatgacggcattgccacgcacatggtggacgccggggataacgtctgcatcgagcgcgaaatcaccatgtaccgggttaaccagtacggtgatgcggatgtgtcgtacctggatgtgcagtcacccgccacgctgggccgtatccgttacatcatcaagaaccgtttcacgaaccgttatccgcgccacaagctggcggatgatgacgtgctggactcgctggatgcggggcagccggtgatgacgccgaagctgtgcaccgcagaactgctggatatctgccagaccgaacttctcccggcgggccttgtggagaacttcagcgattacaaagacacgcttcaggtgacacgtgacagcagtgataaaaaccgcctgaactttatctgccacccgaatctggtgaaccagctgcgtgtgctggcaggcctgattcagttcaagctttaa

SEQ ID NO: 486755 - DNA, 357 bp, Shigella sonnei; identical to SEQ ID NO: 468989

SEQ ID NO: 486756 - DNA, 396 bp, Shigella sonnei
atggccgcaatggaatttgaactgaaacacgggcttctgaccggcaaaggcacggcagatgaaaccctgcataaaaccgtgaaactgcgcgaactgaccgccagtgatgtgattgatgcacaactggccgcagaacgcgtcgtcatgggcgggaacggaaaggcggtggcctactgttctgaggtgctgatgggactggagatgatgcgccgtcaggttgcgtcaatcggtaatatccccggcccgctggacatgaaacagctgcgaatgctccacccggcagaccttgagcttatcagcacgaaagcggctgtgctggatgacatgcttgaggaggtggcaacgcgggggcgaactgatgccgctggcggcggcactgatgaacctgctggttaa

SEQ ID NO: 486757 - DNA, 138 bp, Shigella sonnei
atgccgctggcggcggcactgatgaacctgctggttaacctgtcttcgcgattcagcattcagtacctggaacaactgcccctgcggcagttgttccgcctgataaagcaactggagaaacagtatggcaacaggtag

SEQ ID NO: 486758 - DNA, 1794 bp, Shigella sonnei
atggcaacaggtagccgtctcagcacggaaatcatgatcaaccttgccgggaacctgaccgccaaagcccggcagtatggcgcgaatatgtcgcagttcgcccggaataaccagaaagccatgcgccttgtcaaagccacaacggaggccgcaggacgcggccttgatacgcttggtaaccgctacacggcaatgatagccgggcttggcagtagtcttaccatcaaacaggttgccgattttgatgcgcagatgcgccggatgggtacggatgcccagttaaccactgaacaggtaaagacgcttcacgacaaaatcagggatgtatcgaaccagaaagatattcgtattgatgcttctgcgcttggtcagggggccagcgaacttctggggaaaaccggtgattatcagtatgtggtggacaacctccgcaacatggggttgatgatgcaggcgttcggtgttgacggacaggttgcagccgggctgatggcccagttctgggaaaaaaacgtccggggtgctgatgcggtcaataacatgatggacaggctgtattcgcagttcgcagtggggtctgtaagcgttgccgatgttgccctcgctgccccgaaactgttttccatcattcaggatcagggaccggaagccattgcccagatgggggcatttgctcaggtgttcgccaaaaacaaaggcagcattgatgagacggtaaccagtattcaggccatgtatgcttccctgtcggacaaaaagaacatcgagttcctgaaaaaaaacggcattgacgtttttgtcaaaggcacaaaagacatcaaaaagccctatgagctgatgatggaaatccttaaacgggccaaatacgacccgctgaaacttcaggatgtgtttgatctgaccggaatgcaggggattaaggcgctgcttaaccctgaaaaccggcaactgatggaacaaatgatttacggcacgattgagctgggttccacgcaaaaggccgcacagaccaatgccgaaggctttaatgccgcaatacagtcactgaataacgaatggcaacgttttgctgaagggcaactggcaaagcccgttcaggacctggcggatgcgctcaacagcgtggaccagaacactgcccagaactggttgcaggtcggtaaatatatggcgatcgcgctgggcggcattatcgccatcagaaagacgtatcagttcggtaaaaccatccacgacatcatgaatcccaaagggaaaggcaaagggatacccggcagcattacggatgttttcggctccggtgtgatgccggtttatgtggtcaatatggacagtggcgggatgaagggtaataccggcggtctgccggatgcgccggattcatcgcgcaatccccgtaactcccgcaacccacgtgggccaaagacgccagcgctggttacaccacaaactgcatcaggatttaatctccttgacatggtgctctctgctttccctaagaacaaagaggaagcagatgcgttaatcgcacgggttcaggaaaacaacaaccgcccgacggtatggacggatatcaggaactggtttaactctctggaaaaaaagaatattgccgacccgcgaccgtgggctggtatgcaacccactcagaattatcctttccttccgcaacaattgcagggggaaatccgtgtggtggtggaaggtgatgcccgcgtgaaaagcgtcagagtggatcaacccggcgtcagactcagtgcgcaggctggcgtcaccagcgtggagcagggttaa

SEQ ID NO: 486759 - DNA, 1275 bp, Shigella sonnei
atgacaacgagcaacggtaaatgggacgggctgcgcgacgcctcgtttcgtggcgtccccttctttctggtggatacggagggcaccggtggtcgtcgtgccattccccgtgcttatccccggcgtgaaaccgcctggacggatgataacggggccgttccggggcaacagcagattaacgcaaagctgccaggtaaaaacttccgggatgatttaaacgcccttttagatgcgctcaatacccccggccccggcgagcttgtccacccgtggttcgggatacagaccgtacaggttggcaaggtcacccatcgcctcagcacggaggaagacggcattgcgtatgtcacctttgaagtgtttgaggcaggcgagcgcctgttcccgtctgcggcggataacacgcagcaggaagtgctgacaggcattgatgcggtgaaagccgccattgacgatggcgactggttcggcgcactcgacgggctgggtgacatggccgacagttttctggccgatatggaaaaccttgtggctaacctgcccacgttaccggcagcactgaatcagtggatggacaggctgaagcattttaaggcgatggccggaaccctcattgccacaccggggcgtctggtcagtgagctgtcagcacgggtggaagatattgcgggccttgtgacggaaccacccgaagcactggcggtttacacgacattacgcaaccagtgggccggagaacgtgccaggcagattgccaccggcgcactgccggaagatatcaccgtgaagcccggcagcgtggcagacggcaaccccggctttgccatcgggctgtcaccggattatcagccggtatctgacagcctgcaaaagaacattgacgacttccgccaggtggttgtgctgggagccctgctgggacaggccagtgccgtggcctcgatgacgttcgatacccgtgatgcggcgttatctgccggtgacacgctggcggctgaactgcatgagcaggcggtggcggcggtggaaaacaaccagcggacattgtggcgaacgctgcgcgatttacggcaggccgtgattacggatgcccgcgagcgtgccgcccgtctgccggaaacccggcaggtgacgctgaccacaaccacctctgccgcattgctggcatggcgcgagcatggtgacacacgccgacgggatgaaatcgtgcagcgtaaccgcctgcgtcatccgtcattcatcctgccgacgcaacctgtggagatcaccgactga

SEQ ID NO: 486760 - DNA, 1071 bp, Shigella sonnei; identical to SEQ ID NO: 468994

SEQ ID NO: 486761 - DNA, 537 bp, Shigella sonnei
atgggattaaacgcaattgcccgccgcctgcgactgatggttgaccgcgctgttgtccgcctggtgtctgacggtctggcacggcagaacctgcaaattcagacgctggcagatgccaccgatgacgacgtggaacgcttccagaactacgggtttacgtccgttccgccggaaggttctgaagccattgtgctggccgttggcggacggcgtgacgggctggttgccatcgcggtggaagacaagcgatgtcgcccgaaaggactgtcccccggcgatgtcagggtgtatcaccgggacggcaaatcacacatcaccctgaaggaaaacggcgtcattgaaatcacaggagaacaggtagacgtttcagggaaaacggtaaatctcaccgccgacgaattgctgaatattatcggtaaacaaatgaaattcgtcggtccctgtgaatttactgaagatgtcagaatcaagggtaaatcattcagcgaacacattcataaggacggcgacaatgagaatacatcaccgcccgtatga

SEQ ID NO: 486762 - DNA, 453 bp, Shigella sonnei
atgacgacagaaatccgctggaataacatgctctcacggggtgacatcaccgtcacccataacggcctctcacgggatgaggggctggtcactcaggttcttatctgccttttcaccgatgcccgcgctgatgacgatgatgtcattcctgacggctccggcgacccgcgcggctggccgggcgacacgtacagcgatttttcgtggggttcccgcctgtggctgcttgagcgtgaaaagctgacggaagatgtccgcctgcgcgtggaagattacgcgcggctgtccatgcagccgcttctgcgtgccggttacgcccgtaacgccaccgtcacggccagcatcatcattcctgaccgtattgcctttctggtggtgttaacccgcccggacaaaaccacactcagaatcgaaatcacccgtcgatgggaggccaccattaatgccgtatga

SEQ ID NO: 486763 - DNA, 1077 bp, Shigella sonnei
atgccgtatgaaatccccacgctgggcaaactgattgccgacggcgaaaaagatattgcgtatgaactcggcctgcaaaagctgccgcctgtcagtgttgagcaggcgctgaacgtgtcattcagcagtcaggtccgggatttatacgaccatcagagctggattaaggaccagataatcccgtccaccacgtctgatgatgaaaccattatcaaaacagcaaagtatgaaggcgttatccgcaagcaggccacctttgccagcgggcgggtgaccttcaccagtcagtccccccttccggcagaaacccggatgcagtccgacacgaaccaggtgtatcaggtactcacgtccggcgaggtgcaggacggcgaggtcaccgtcatcgtgcaggctgaagaagccggtgtggcgggcaatcttgctgccggtgccgtactcaccctgctgtccccgctgcccggaacggccagcacaggcgcggtggctgaaggtggcatcaccggtggcgcagacactgaatccatcgcagcgctgctggaccgtctgctgtatgtgcgccgcaatccaccgacaggcggcgcgttgcatgactacgtgatatgggtgcgtgaagtgccgggcgtcagccgcgcgtgggcgtgggatgcatggcacggccccggcacggtcgggctggcatggctttatgatgaccgggaaaacatcgtgccaacccgcgaagacctgaagacaatggagcagtatctgttctgccacaaacacccggccacgggcgtgatggtgggtaaaccgggcggcattgaggtctggccggtacaggtcaggctgaagaaagtcagcatatccatccgtctgacaccggacagcctggcgaacaggagcgccgtccgggcaaacctgaccgcgttacagaagacactggcacccggtcagacgctgccggtgtcctcgctgcgcacggccatcggtatgacgtccggcatcacggattacttccttaacatcggggaggacaccaccagtgatgtggatgagcttatcaccatcggggaggtgacatggctcacagcgtga

SEQ ID NO: 486764 - DNA, 585 bp, Shigella sonnei
atggctcacagcgtgacggaatggctggacgcactgcaacaggtcatgccacggggtaaggcatggccgcgtgataacgacgcggatttaaaccgctttttaagggcgcttgcagaacgtttaaaccgcactgaatacgacgcctcgcgtctgcatgtggagatgcgaccggaaaccacgctccggctgctgccggagtgggagcagtatctggcgctgccggaatgcggaattgcccccaccaccagggaagcccgccgccgtgccgtggtggagaaataccgtcgcaggggcgggctggcaacctggcagactgaagccgcagcagcggcgctgggcttcaccattaaggtggcagccgttctgccgcaccactgtctgcgcgactgcatgtatccgctgcatccggcgcggtatcgctggatgctgaaagtgaacgtcccgggtaaagatgccgggcggtttacctgtattgatggcgtcatgacaccattaatcagcgaacgcacccgtgagctggaatgcctgctgaagcattaccggctggcgggcacggaatatgaatattattacaccggagaataa

SEQ ID NO: 486765 - DNA, 189 bp, Shigella sonnei; identical to SEQ ID NO: 463227

SEQ ID NO: 486766 - DNA, 537 bp, Shigella sonnei; identical to SEQ ID NO: 485223

SEQ ID NO: 486767 - DNA, 1563 bp, Shigella sonnei
atgaactcgttttcacttctgacaaccccgtggttgcccgttcgttttaaagacggaacgacaggcaaactggcgccagtcgatctggcggatgaaaatgttgtcgatatttctgcgccgcgggcagatctccagggtgcggtatggcagtttttgctggggctactacaaaccagcttcgcgccaaaagatcatcgtcgttgggatgatatctgggaagacggactggaagctgaaaagctacgggaagcattgctgtcattagaacatgctttccagtttgggccagattccccttcatttatacaggatttcgaggcgctcaccggagataaagttccggtcgcttcgctactgcctgagattcccggcgctcaaacaacgaagtttaataaagaccactttatcaagcgtggtgtaacggaatacctgtgcccacattgctctgcgttagctctgttctccctacagttgaatgcgccgtcaggtggcaaaggctaccgcaccggtttacgcggcggtgggccgatgaccactctgattgaattacaggaatatcagggtaatcaacaaactcccttgtggcgcaaactgtggatcaatgtcatgccgcaggatgaagccgatttaccgctacccaaaaaatttgacgatctggttttcccctggcttggcccgacgcgcatcagcgaactggccggtgcggtggtaaccgatgagcaggtcaataaactccaggcgtactggggaatgcctcgccgtattcgtattgattttaataccaccacagtcggcaactgcgatatttgcggtgagcagagcgacgcgcttctgagcctgatgacgaccaaaaattacggcgctaactatgccatgtggcagcatcccttaacgccttaccgtgtactacttaaagagggcggcgagttttactcggtcaaaccacaaccgggcggtttaatctggcgcgactggttaggccttatcgaaacgggtaagtcagaaaacaatacggaacttcccgcgctggtggtgaaactctttaatgccagcagtctcaagcaggcaaaagtgggcctgtggggatttggctatgatttcgacaacatgaaagcgcgctgttggtacgaacatcatttcccgctgctgctcaataaaaaagaaggccagataccgaaactgcggctggctgcgcaaacggcttcacggattctaagtctgttacggagtgcattgaaagaagcatggttctccgatccaaaaggtgcaaggggtgattttagttttgtggatatcgacttctggaacaaaactcagcatcgcttcctgaggttagtgcgccaaattgaagaaggtcaggatgcggatgaattactcagcaaatggaataaggaaatttggttattcgcgcgtcaggattttgacgagcgtgtattcaccaatccttatgagcccgttgatttggaacgcatcatgaccgcgcgcaagaaatattttacaacatcggcggagaagcaaagtgctaaagccgccagggagaaaaagcaggaggctgctgaatga

SEQ ID NO: 486768 - DNA, 2700 bp, Shigella sonnei
atgcgtaaatatcctttaagtttactgaaggataaaaatattgtgactttttttgatttctggggaaaaacccgacgcggcgagaaagacgggggcgacgactatcaccttctttgctggcattcgctggatgtagccgcgatgggctatttaatggttaaaagaaattgcttcgggctggctgattattttcgtcaattagggatttctgacaaggaacaggcggctcaatttttcgcctggttgctgtgctggcacgatattggaaaatttgcccgctcttttcaacaactttacctgccccctgaactcaagattcaggaaggtgccagaaaaaattacgaaaaaatctctcattcaacgctgggctactggttgtggaatcattatttaagtgaatgtcaggagttacttccttcatcttcgctctctccgcgcaaacttaggcgagtgatagaaatgtggatgcccgtgacgacagggcatcatggtcggccccctgatcgtatggatgaattggataattttctgcctgaagacaaagctgcagcacgagattttctccttgaaatcaaaccactgtttccgctcatagagatccccgcattctgggatgatgatgagggcattgaacttataaaacacctttcctggtatatctctgcaaccgtcgtgctcgcagactggacgggttcgtcaacgcgattttttccacgcgtcgcacacccaatggatattaaaggttactggcagaaaactttagttcaggctcaaaacgccttaaccgtctttcctctaaaagcaaaagtcgcgcctttcaacggaattaatacgctgtttccttttattgagaatccgacaccgttacagcaaaaggtgctggatctggatatcagccagcaaggaccgcagttatttattctggaagatgtgactggcgcaggtaaaacagaagcggcgcttatcctggcgcacaggttgatagctgcggggaaggctcaggggctgttttttggtctgccaacaatggcaacggccaatgccatgtacgatcggctggtcaaaacctggcttgctttctattcgccagaatcccgccccagcctggtgctggcacatagtgcccgcacattaatggaccgctttaatgaatcactctggtctggtgatttagtcgggtcagaagaaccggatgaacaaacgttcagtcagggatgtgcggcctggtttgccgacagtaacaagaaggcgttgctggctgaaattggcgtcggcacgctggatcaggcgatgatggcggtgatgccgttcaaacataataatctgcggcttctggggctgagtaacaaaatcctgctggctgatgagatccacgcctgtgacgcttacatgtcgtgcattcttgaagggttgatcgagcggcaggcgcgtggcggaaacagcgttattttgctttctgccacgttatctcaacagcagcgcgacaaactcgtcgctgcctttgcgcggggtacagagggcctgcaagaagctccgttcctggaaaaggatgattacccctggctgacgcatgtcacgaaatccgatgtgaactcacaccgggtagcgacgcgcaaagacgttgagcgtagcgtcagcgtgggttggcttcatagtgaacaagagtgtattgcgcgtatcgaatcggcggtaagtcaggggaaatgcatcgcctggatccggaattctgtcgatgacgctattaaggttcatcgtcagctgcttgcccgcggcgtcattcctgcttccagcctttcactttttcatagccgctttgcttttagcgatcgccagcgaattgaaacggagacactggcacgctttggtaaagaagatagctcacagcgtgccggaaaagtccttatttgtactcaggtattagagcagagtgtcgattgtgacctggacgaaatgatctccgacctggcccctgttgatttgctgattcagcgagcaggacgattacagcggcatatccgcgatattaatggtcagttaaagcgtgacggaaaggacgagcgttccccccctgaattgctgattctggctcccgtctgggacgactctcctggcgacgaatggtttggcagtgccatgcgtaacagtgcatttgtctatcccgatcatgggcgaatctggctgacgcagcgtgtgctgcgtgagcaaggtgctattcagatgccacacgcagcccggcttcttattgaatccgtctacggtgaggacgtggtaatgccggaaggatttgcccgcagcgagcaggagcaagtgggcaaatattactgtgatcgcgcaatggctaaaaagtttgtgctgaacttcaggcccggctatgccgccaatatcaacgattacctcccagaaaaactgtcgacacgtctggctgaggagtctgtttccctgtggctggctacctgtattgacggtgtggtgaagccttatgccaccggtgctcacgcatgggaaatgagcgttgtcagagtgcgccgaagctggtggaaaaaacatcgggatgagttttctttactggagggagaggcgttcaggctgtggtgcattgaacagcgacaagatccggagatggcaaacgttattttagtcaacgatgacgaaagttgcgggtattcggctacggaaggattgattggcaaggttggttga

SEQ ID NO: 486769 - DNA, 192 bp, Shigella sonnei; identical to SEQ ID NO: 484083

SEQ ID NO: 486770 - DNA, 1644 bp, Shigella sonnei; identical to SEQ ID NO: 483786

SEQ ID NO: 486771 - DNA, 255 bp, Shigella sonnei
ttggttgtttcactaaacaacgagaatgcggatatttcgtcgctgcgagaacgcattcagcagcaaatacgtggagaatatcacttaggtgatgttgatttgtattatcccggtgccagtcttggcatagtagaagtcgatcctgaaacaaccgatgcagacagtgccctgcatgctgccgatattgcgatgtatcaggagaaaaaacacaaacagaaaacaccttttgtcgcgcattcagcgccacattgctga

SEQ ID NO: 486772 - DNA, 381 bp, Shigella sonnei
atgctgggagcggtggaacgccgcttcggcaacgatcttccgtcgtctccagtggagtggctgacggataatggttcatgctaccgggctaatgaaacacgccagttcgcccggatgttgggacttgaaccgaagaacacggcggtgcggagtccggagagtaacggaatagcagagagcttcgtgaaaacgataaagcgtgactacatcagtatcatgcccaaaccagacgggttaacggcagcaaagaaccttgcagaggcgttcgagcattataacgaatggcatccgcatagtgcgctgggttatcgctcgccacgggaatatctgtggcagcgggcttgtaatgggttaagtgataacagatgtctggaaatatag

SEQ ID NO: 486773 - DNA, 537 bp, Shigella sonnei
atgagactccctgatttggaatcacttgagcatttcggagccagaggagcagtatcaggaagaccatttaatcccgagcttgccggtggtccaatagaaaacctgacgacagatggcgtaacaatcaacagggaaggtatcgctattgttgaaaaacatatagccagatttggtcatgatcctgtaaatgaagtgatgatcaatagactgaaagacattgagaaaggaaaaatccccccagaacaagtagatcttaacttctatactcatgagtgtcgggaatatcagcgttactgtaatcttggttgggaaacaggacaacctgatggtgacgcaggctatgcactctggaatcatactggatttgcccctatatttccagacatctgttatcacttaacccattacaagcccgctgccacagatattcccgtggcgagcgataacccagcgcactatgcggatgccattcgttataatgctcgaacgcctctgcaaggttctttgctgccgttaacccgtctggtttgggcatga

SEQ ID NO: 486774 - DNA, 1428 bp, Shigella sonnei; identical to SEQ ID NO: 483898

SEQ ID NO: 486775 - DNA, 612 bp, Shigella sonnei
atgaacaaagaaccaaatggttcttttcctgatgagaaaaaagaacctttaattcagcggctgttttctctggtggagcggtatccatctcgatcagaagcggccagagcttggggaattaacatatcaaccctgaacaactactataaacgcagacacttgaatccaatccccagacccaatcagctacaaaaaattgcagataaagaaggtgtatcattggagtggttaacaactggtcaaggccaaaaaccaagttttgatgcgaatagcagcaaagaacaaaagaacaaaagagcaaaagagcaaaaggctatgactggtgagcccccatcaaccaaaggggctaacattgattcaagtttattaactctcattgagattttgtctgacgatgaaaaaaatgcactttttgaagtattagcaagaaaaggcgtagaaactttattacgcttgttagataaggaaacacaagaattgctgcaactggagggccgtaaacgcctagctgcgttgatgctagtcgatatgcccgacgagcaagtcagagagattttggaagagattgaagctagtattctctcagagagtgtaaaagcgaaggtgggctag

SEQ ID NO: 486776 - DNA, 393 bp, Shigella sonnei; identical to SEQ ID NO: 460046

SEQ ID NO: 486777 - DNA, 1242 bp, Shigella sonnei; identical to SEQ ID NO: 483107

SEQ ID NO: 486778 - DNA, 1053 bp, Shigella sonnei; identical to SEQ ID NO: 485704

SEQ ID NO: 486779 - DNA, 4908 bp, Shigella sonnei
ttgcataccgctggatttatcatcgacgccaacccgcagtcagcgaaaattgcgacattatctgccagcaataatggtgtactcgccaatgagaatgcagcaaacaccgtctcggtcaatgtcgctgatgaaggaagcaacccaatcaatgatcataccgtcacgtttgcggtattaagcggatcggcaacttccttcaacaatcaaaacaccgcaaaaacggatgttaatggtctggcgacttttgatctgaaaagtagtaagcaggaagacaacacggttgaagtcacccttgaaaatggcgtgaaacaaacgttaatcgtcagttttgtcggcgactcgagtaccgcgcaggttgatctgcagaagtcgaaaaatgaagtggttgctgacggcaatgacagcgccacaatgaccgcgaccgtccgggatgcaaaaggcaacctgctcaatgacgtcatggtcactttcaatgttaattcagcagaggcgaaactgagccaaaccgaagtgaatagccacgacgggatcgccacagctacgctgaccagtttgaaaaatggtgattatagggttacggcctctgtgagctctggttcccaggctaatcaacaggtgaattttatcggtgatcaaagtactgctgccctgaccctcagtgtgccttcaggtgatatcaccgtcaccaacacagctccgcaacatatgactgcaaccttgcaggataaaaatggcaacccactaaaagataaagaaatcaccttctctgtgccaaacgacgtcgcaagtaagttctcgattagcaacggaggaaaaggcatgacggatagtaacggggttgcaatcgcctccctgaccggcacgttagcgggcacgcatatgatcatggctcgtctggctaacagcaatgtcagcgatgcacagccaatgacgtttgtggcggataaagacagagcggttgtcgttttgcaaacatcgaaagcggaaatcattgggaatggcgtggatgagacaactctgacagcaacagtgaaagatccgtcgaatcatccggtggcggggataacggtaaacttcaccatgccacaggacgttgcggcaaactttacccttgaaaataacggtattgccatcactcaggccaatggggaagcgcatgtcacgctgaaaggtaaaaaagcgggcacgcatacggttaccgcaacgctgggtaataacaataccagtgattcgcagccggtaacatttgtggcggacaaagcctcggctcaggttgtcctgcagatatcaaaagatgagatcacaggtaatggcgtcgatagcgcaacgctaactgcaacggttaaagatcagttcgacaatgaggtgaataatcttccggtaacattcagctcagcctcttcaggactcaccctgaccccgggagtaagtaataccaatgagtctggcatcgcgcaggccactctcgcaggcgttgcctttggtgagcagacggtcactgcatcactggctaataatggtgccagcgacaacaaaactgtgcattttattggcgacacagcggcggcaaaaattatcgagttgacgcctgtcccagacagcataatcgccggtaccccgcagaacagctccggcagcgccatcaccgccacagtcgttgataataatggctttccggtgaaaggtgtgactgtgaacttcaccagcagaacaaactctgccgaaatgacgaatggcggccaagccgtaacgaacgaacagggtaaggctaccgtcacttataccaatacccgctcctcgatagaatcaggagcgagaccggataccgttgaggccagtctggaaaatggtagctccacgcttagcacatcaattaatgtcaacgctgatgcgtctacggcacatctcacctggctacaggcactttttgatacagtctccgcaggcgagacaaccagtctgtatattgaggtgaaggataattacggcaacggtgtcccccagcatcaggtgaccctcagcgtttcaccaagtgaaggcgtgacccccagtaataacgctatatatactaccaaccacgacggcaatttttacgcaagctttaccgctacaaaagccggggtttatcaagtgacggcaaccctcgaaaatggcgattcgatgcaacaaacagtgacctatgtgccgaacgtcacgaatgccgaaatcacgctggcaacctcgaaggatccggtgattgccgacaataacgatctcacgacactaacagcaacagtcgctgatacagagggcaatgcgatagccaacactgaagtaacatttactctgccggaagatgttaaggcgaacttcacgctgagcgatggcggtaaagcgattactgatgctgaaggcaaagcgaaagtcacgctgaaaggtacaaaagcaggcgctcatactgttacagcatcgataactggcggtaagagtgagcagttggtggtgaactttactgcggatacgctcactgcgcaggttaatcttaacgttaccgaggacaattttatcgctaataacgtcgggatgaccaggctgcaggcaacagtgactgatggaaacggcaacccgttagccaatgaggcggtgacattcacgctaccggcagatgtgagcgcaagctttactctcggacaaggcggttccgccattactgacatcaacggcaaggctgaagttacactgagcggtacaaaatccggcacctaccccgtgacagttagcgtgaacaattatggtgtcagtgatacgaaacaggtgactttgattgccgatgctggtaccgcaacactagcctccttaacctctgtatactcattcgtcgtcagcacgaccgagggcgcgaccatgactgcaagcgtcactgacgctaacggcaacccggtagaaggcataaaagttaatttccgcggaacctccgtcacgctaagcagcaccagcgttgaaacggatgatcggggtttcactgaaattcttgtgacaagcaccgaagtcggactgaaaacagtttcagcctctctggcagataaacctactgaagtcatatcgcgattactgaatgcaaaagcagatattaattctgcaacgattaccagtctggagatacctgaaggtcaggtcatggtcgcacaagacgtagcagttaaagctcacgtcaacgaccagtttggcaacccgattcttaatgaatctgtaacattcagtgcagagccaccagagcacatgaccatcagccaaaatattgtctctactgatacgcatggtatagccgaggtctccatgacgcccgaaagaaacggttcgtatatggtgaaagcatccctggcgaatggagcctcacttgagaaacaactggaggctattgatgaaaaactgacactctcggcgtccagcccgcttatcggtgtcaattccccaacaggtgcaactctgacggcaacgctaacttctgcaaatggcactccagtggagggtcaggtcatcaactttagcgtaacgccagaaggtgcgacgttaagtggcggaaaagtgagaactaactcttctggtcaggctccagtcgttctgaccagcaataaagtcggtacatatacggtgactgcatcgttccataacggcgtaacaatacagacacagacaaccgtgaaagtcactggcaactcaagcaccgcccatgttactagctttatcgctgatccatcgactatcgccgccaccaacagtgatttaagtaccttaaaggcaacggttgaggatggcagtggtaacctgatcgaaggtctcactgtgtactttgccttaaaaagcggctctgccacattaacgtcattaacagcggtgaccgatcaaaacggaatcgcgacaacaagcgtgaaaggagcgatgacaggtagcgtcacggtaagcgcagtcacgaccgctggtggaatgcaaacagtagatataacgctggtggcaggcccagcagacgcctcaaagtcagtccttaagaacaatcggtcatcattgaaaggagactttaccgatagtgctgagctacatcttgttctgcacgatatatcaggcaatccgatcaaagtttctgaagggctggaatttgtacagtcaggtaccaacgtgccctatgtgcaagttagtgcaattgactacagtaaaaatttctcaggcgagtacaaagccactgttacaggaggcggagagggtatcacaacgctgatccctgtattgaatggtgttcatcaagctggtctgagtaccacaatacaattcactcgcgcagaagacaaaataatgagcggtacagtatcagtcaatggtactgacctaccgacaactacattcccttcgcaggggttcaccggggcgtattatcagttgaataatgacaactttgccccaggaaaaacggcggctgattatgagttttcaagctctgcctcctgggtcgatgttgatgctaccggtaaagtgacatttaaaaatgtcggcagcaattcggaaaggattacggcgacaccaaaatcaggaggccctagctatgtatacgaaatccgtgtgaagagttggtgggtgaacgccggcgaggctttcatgatatacagccttgctgaaaatttttgcagcagcaatggctacacgctccccagagcaaactatttaaaccacagtagttcccgaggcatcgggtcactgtacagtgaatggggagatatggggcattacacgactgaagctggttttcaatcaaatatgtattggtcatctagtcccgcaaactcaagcgaacaatacgtagtttccctggcaacaggtgatcaaagcgtatttgaaaagcttgggtttgcttatgcgacatgttataaaaacctctga

SEQ ID NO: 486780 - DNA, 1413 bp, Shigella sonnei
atgcggcgtggcggttatctgaaaatagcccggcgtcagctcaatccgcgacagcgctgccggtgcggcaatccggaacgataccgacgccggatcgccctgctgcccccacgcatttactgcccggactgtcagcctgtagttccccagcgccagttgtgtgaagcggtaagtggtttccgtcgtccgggccgtgctgaccagccgctcactgccgtcatccgctgttacggtcagacggagcaggaagctcacgcccttcaccaccttcggcgtgtcccagcgcgccagcacctgatattccccgctgtctgcggtgacttcggcagtcaggtgctgcaccgctggcggcgtgacaccattcaccgtgccgctctggtcgccgtcaaagtgcgccccgttatccacgatggcttctttttccggcacatgctgcacggcggtgatggcatacgtgccgtcgtcgttctcacggatactcacgcagcggaacaatcgctggtgcagcgtcggcagcttcagcccccacacgctgtattcagcaacaccgtcaggaacacggctcacttttaccttcacgccgtcggtgacggactggacctccacgctgaccggattcccctgcccgtcaaccaggcttatcagcgtggtgccggaggatggcagcgtgatttcacggtcgagcgtcagcgtccgggtctggctgttcaccgccagcacgcgcccgccggtgcggataccggcatagtcatcatcgcagatttcaatgacatcgcccggtacatgacgaagcccttcagcacccacgctgaaatccacggtctgcgtctccagcagttccgttttaatcagccacagcccggcgcggtgtgcctgcccccggctggtacagccaaaggcatccatcttcgtgacgttacgaccgtaacggacaatggcctgcgtatcctccacaagctctgtcgccgtctcccagccgttatccgggtcaatccagttcacctcaacggcattatggcggtctttcagggcgctgaaactgtagcggaacggcgcgccatcatccggcatcaccacattactgcggttataggcccacaccttatccgactgtcggtcctgcacgaacgtcagcgtctgcccgttccataccggcatacagcgcatcgccgagcagaaatcactgagcacatcccacgccttgcgctgtgtggtcagccaggcattacaggtgatgcgcggctccgtgctgccaaagccgtccggcaccgactggtcacagtactggccgatgacatacagcgcccatttatccacatctgccgcaccaagacgtttccccatgccatagcgcggatgggtcagcatatcccacagacaccaggccatgttgttgctgtatgccggttttaa

SEQ ID NO: 486781 - DNA, 2562 bp, Shigella sonnei
atggctgaaccggtaggcgatctggtcgttgatttgagtctggatgcggccagatttgacgagcagatggccagagtcaggcgtcatttttccggtacggaaagtgatgcgaaaaaaacagcggcagtcgttgaacagtcgctgagccgacaggcgctggctgcacagaaagcggggatttccgtcgggcagtataaagccgccatgcgtatgctgcctgcacagttcaccgacgtggccacgcagcttgcaggggggcagaatccctggctgatcctgctgcaacagggtggtcaggttaaggactccttcggcgggatgatccccatgttcagggggcttgccggcgcgatcaccctgccgatggtgggggccacctcgctggcggtggcgaccggtgcgctggcgtatgcctggtatcagggcaactcaaccctgtccgatttcaacaaaacgctggtcctttccggtaatcaggcgggactgacggcagatcgtatgctggtcctgtccagagccgggcaggcggcagggctgacgtttaaccagaccagcgagtcactcagcgcactggttaaggcgggggtaagcggtgaggctcagattgcgtccatcagccagagtgtggcgcgtttctcctctgcatccggcgtggaggtggacaaggtcgctgaagccttcgggaagctgaccacagacccgacgtcggggctgacggcgatggcacgccagttccataacgtgacggcggagcagattgcgtatgttgctcagttgcagcgttccggcgatgaagccggggcattgcaggcggcgaacgaggccgcaacgaaagggtttgatgaccagacccgccgcctgaaagagaacatgggcacgctggagacctgggcagacaggactgcacgtgcattcaaatccatgtgggatgcggtgctggatattggtcgtcctgataccgcgcaggagatgctgattaaggcagaggctgcgtttaagaaagcagacgacatctggaatctgcgcaaggatgattatttcgttaacgatgaagcacgggcgcgttactgggatgatcgtgaaaaaaaacgcctggagcgggatgcagcccaaaagagggtagatcaacagcgtcaacaggacaaaaatgcgcagcagcagagcgataccgaagcgtcacggctgaaatataccgaagaggcgcagaaggcttacgaacggctgcagacgccgctggagaaatataccgcccgtcaggaagaactgaacaaggcactgaaagacggaaaaatcctgcaggcagattacaacacgctgatggcggcggcgaaaaaggattatgaagcgacgctgaaaaagccgaaacagtccggcgtgaaggtgtatgcgggcgatcgtcaggaagacagtgctcatgcggccctgctgacgcttcaggcagaactccggacgctggagaagcatgccggagcgaatgagaaaatcagccagcagcgccgggatttgtggaaggcagaaagtcagttcgcggtactggaggaggcggcacaacgtcgccagctgtccgcacaggagaaatccctgctggcgcataaagacgagacgctggagtacaaacgccagctggctgcacttggtgacaaggttacgtatcaggagcacctgaatgcgctggcgcagcaggcggataaattcgcacagcagcaacgggcaaaacgggcagccattgatgcgaaaaaccgggggctgactgaccggcaggcagcgcgggaagccacggaacagcgcctgaaggaacagtatggcgataatcctctggcgctgaataacgtcatgtcagagcagaaaaagacctgggcggctgaagaccagcttcgcgggagctggatggcaggcctgaagtccggctggagtgagtgggaagagagcgccacggacagtatgtcacaggttaaaagtgcagccacgcagacctttgatggtattgcacagaatatggcggcgatgctgaccggcagtgaacagaactggcgcagcttcacccgctccgtgctgtccatgatgacagaaattctgcttaagcaggcaatggtggggattgtcgggagtatcggcagcgccattggcggggctgttggtggcggcgcatccgcgtcaggtggtacagccattcaggccgctgcggcgaaattccattttgcaaccgggggatttacgggaaccggcggcaaatatgagccagcggggattgttcaccgtggtgaatttgtcttcacgaaggaggcaaccagccggattggcgtggggaatctctaccggctgatgcgcggctatgcggaaggtggttatgtgggcggtgccggaagtccggcgcagatgcggcgggctgaaggcattaattttaatcagaacaatcacgtggtgattcagaacgacggtacgaatggtctgccaggtccacagatgatgaaggccgtgtatgacatggcccgcaagggtgcccgtgatgaaattcagacacagatgcgtgatggtggcctgttctccggaggtggacgatga

SEQ ID NO: 486782 - DNA, 276 bp, Shigella sonnei; identical to SEQ ID NO: 484087

SEQ ID NO: 486783 - DNA, 276 bp, Shigella sonnei
gtggcttctgtttctatcagctgtccctcctgttcagctactgacggggtggtgcgtaacggcaaaagcactgccggacatcagcgctatctctgctctcactgccgtaaaacatggcaaatgcagttcacttacaccgcttctcaacccggtacgcaccagaaaatcattgatatggccatgaatggcgttggatgccgggcaactgcacgcattatgggcgttggcctcaacacgattttacgtcacttaaaaaactcaggccgcagtcggtaa

SEQ ID NO: 486784 - DNA, 189 bp, Shigella sonnei; identical to SEQ ID NO: 463227

SEQ ID NO: 486785 - DNA, 726 bp, Shigella sonnei
atggcaaggataagtaaaaaggaatctgctaatcacaataaagtgatggaattaatacattcagataagctcctaacacaagaagatagggaattcatattcaccaattataggggggatgggataggggctacaggtgccttcttcacacctgaaattttagcatgggattttgtacttgatgctgactgtactggtgactgtattgaactatgtgctggtatcggtcgcctcagctactaccagtacttaaggaataaaccaacgcatattacatgcgtggaactcaatcctgagtacgtaatgatcgggaagagggtactaccagaggcagaatggatcactggtaacgcactacagtactcaccagaccgtttctatgatgttgcctatggtaatccaccctttgggaagatcagtacctcaaaagcgtatacaggccgttataagggtagtgaatttgaatacaaggtgattgaacatgcaagtacctttgcgtcctatggtgcatggatagtaccgcaaggttccgcaggctttgtctacagtggggtacattgttatgagcgtagagaatcatgtaagtaccagaagtttgtgaaggatactggctatgagctacatccaggtgtaggcatcgatacaagtatctacagggatgaatggaatggtactaaggtgatatgcgaatcggtgttagtagatgatgacggtacaaatctgtaa

SEQ ID NO: 486786 - DNA, 456 bp, Shigella sonnei
atggacaagaaaggaatatttttaatcatagcgttacttatttttattttactaatgttgcttttattcgctaagctaaattttaatgtaaatactgccctcgctatattatcattaattttaacagtgctatcaggtacggacttagtcaaaaagtacactacggtcaaatcgacaaataaaagccctatagatatgtggatggttttcggtattgctatctccgctgtttctatgtatggattatatatagacccccaactatcacctttagaaggtttaactatttgtatagtatcacttatactttttgtttctgttttagtttcggctttattaaattacaaaaaaataaagaaaccagatgttagggaaataataaaacaaagccattcggtttttagagaaaacgaagaaaccattactattacaacaaccataaaaaaagccccataa

SEQ ID NO: 486787 - DNA, 795 bp, Shigella sonnei
atgagtgatgcaattactacagcagcaataaaaaaattgtatggactatccgctgggcaatgtaatatttgccgaacttctctttttaaagagcaggttcacatcggacaaatggctcatgtaatagccaaaagcccaaaaggaccaaggggcgatgacctgttagcaaatgacaattcttatgaaaatcttatcctgctttgtgcaaatgatcatattcttgttgatagagatccattcacttatacagtagaaaaattgcatcaaatcaaaagtgaacatgaggcttatatacagggtgcaaccgataatacattattttcagataaaaaaagacagtcagatgtggactttttaaacgcttacttccactttacaccgtttgcgagggtacgttcattagttgaaactttacctaattcttttcacatcaatcttcttatttttggagatcagtttgatagtattttaagggattttccagcgagctatcctttaaatgataaattactccacggtcatttccaaagttttattgattcgtataaaaatattgattttatcatatctggacatttgccgatttccgataatagaaacattcaggtgtttggtggtgcgaatcataatcttctttgtcatttcaattatgatgagctaccatccgataaagcactgataatagaacaagatttgatttcacataaaatatctcttcttaatgcttatgaaggtcttataaattaccttagagcttattaccctgaggtggaaatttactctcctattctatga

SEQ ID NO: 486788 - DNA, 294 bp, Shigella sonnei
atgattagtatattgattgagtttctgaagtcaggattggattttttcattaagaagaaaactattgaacaggaagtaaagaaaacgaatgtagaagggcagattgaaacgaataaagaagagattgaaaaggtaacattccactggcgtaatgccctcggttttgtactaacccttatcattctctataactggatcatagtaccagtacttgatgcttttggaattattgtgatccaagttccattaggacaacttttgcaagtgctattgattatggttggtggaagctga

SEQ ID NO: 486789 - DNA, 312 bp, Shigella sonnei
atgaattttgagcaacattatggtgatttaataagcaagattaagctaaatggcatgacaccagatggtaatagtatgccaattaacaaatgttttcttgataagaaatttcaaaaggtcgttaagaaaagtaattatcagattgatagctatatgaacgttatttatgagaagaagaaagatttcaaagttggtgaagtacttgaatgggaattacagggtgaaaagatgcctgtatttctaattgagagtaaaaagctctttgtgaagggtaaacatttttgggtatatgccgtggggattattgaatga

SEQ ID NO: 486790 - DNA, 579 bp, Shigella sonnei
atggcaagtggaataaatgggattggtagtataaggaactatatacaaacgcagggagttagattaaataatcaattccagaatgaaataattaaacgttccaagctactatcccaaagaatgcagggtgatttgaataatagcgttgaccgtggggcagtgggctttactcaacgttccatccttttcttctatagaaaggttgggagaaattcagttacatcgaccatcatggttaaagatattcaggctaagtacctttatcaagtactggtacagccaaaggcaattgataagtttatacctacttcatctacaagattaactaagcagggcaacatttcaggactgaaaaagaatcttttaagtgaacgatataaggtagtgaagggtaagaatggtaaagaacgattaattgataccgcaaagaaagataccaagaagaaaaccaaacgtgtaattggcttacgtgagaagaaacaacgtcgccttatctatgacttctataaggaagccaatgatggtgtaagggtaattatgagcggtattcagggaacattcaggataagtagacaatga

SEQ ID NO: 486791 - DNA, 435 bp, Shigella sonnei
atgatgagtgaatggaaatactcggatgattggagcgaggaggaaatgttatccggtgaatatgctggtttcgtttatatctttcagtttgaggatggttctaattatgtcggtgctaagcaaatctatcagcgggttaaggatgcgagaaagctaaagcccacttcaaaggaaaatggctggcgtgagtacctcagtagttccaatgtcgttaaaaacaaaattgaaaatggtgaacagtactcaaaaacgattctatggtgcttcgcaactatgcgagaggtaatgattgtagaggcaatactgatccttcatcagatgcttaaaccggaatgtttgaatctggcaatgatgagtaagattagatcaccaaatgcaaaggataaaaaaagactactcggaatagtacaggaactattggagtacttgaattga

SEQ ID NO: 486792 - DNA, 450 bp, Shigella sonnei
atgagcgatttaaaaacacgattaaaagaatatgaaggtactaaagagtatcaggcaaatttgaagtacttcagaaatgggaaattctatccatatgctgatagtttaggatgtagtactattggatatggtcacttaattcaggcgggagaagattttagtactggcattactgaaagcgaagcagacaagttactatctcgcgatttagccaaaacaattatgcaggtacagacattagggttaaatcttcccgatgactggaatgattttattattatcatgaccttccagttaggtattggcggggtgaagaaattccgtaagatgttagcagccctgaaagcacatgattaccttgaagcaattaaacaggctaagtgttctctatggtacaggcagacaccaaaccgtgtgaattccatgattgcagtacttaaaaacaaataa

SEQ ID NO: 486793 - DNA, 258 bp, Shigella sonnei
atgtctggaaatataggggcaaatccagtattcctttatactatctttagagataatacaaaggatacgaatgatctattaactcgcgttgctactcttgaaactaccattgctgtactggaaagtagtatttcccgtattgaggatgatcaggataagatgagagatacactaagtaaactggaaacacaaatccatgaacttgatgttaagattgaaaggattattgcaattcttcagcagaaacaacgaccataa

SEQ ID NO: 486794 - DNA, 795 bp, Shigella sonnei
atgcatgaactggagacactgctgagtcgtcttaaaatggaacatctgggctaccacgttgaaagcctgctggagcaggaggccaaaaaagaactgaactaccgcgagttcctgtgcatggcgttgcagcaggaatggaacgggaggcatcagcgcggtatggagtcccggctgaaacaggcccgcttcccgtgggtcaaaacgctggagcagttcgacttcggcttccagccaggtatcgatcgtaaggtcgtccgtgagctggccgggctggcgttcgtggagcgtagcgagaacgtgatcctgctgggtccgcccggtgtgggtaaaacgcacctggcagtcgctctcggggtaaaagcggcggacgctggtcatcgggtactgttcatgccactggataagctgatcgccacactcatgaaggcaaaacaggaaaaccggctggaaaaacagctacagcagcttggttatgcccgggtactgatactggatgagataggctatctgccgatgacccgcgaggaagccagtctgttcttccggttgctgaaccgtcgatatgaaaaagcgagcatcgtgctgacgtcaaataaagggttcgccgactggggagagatgttcggcgataacgtgctggcaacggcaatcctggatcgactgctccaccactcaaccacactgaacatcaaaggagaaagctaccgattaaaggaaaaacgcaaagcgggagtgctggcaaaaaacgccacgccaatcagtgatgatgaaatggcggaaagcggacaacattaa

SEQ ID NO: 486795 - DNA, 1149 bp, Shigella sonnei
atgataaagcaaatgcgccagcaaggtgcgtatattgttgatattgccactcaggttggttgctctgagcggaccgtcagacggtacctgaaatacccggaacctccggccagaaaaacacgccacaaaatggccaaactcaagccgttcatggactatatagatatgcgtctggctgagaacgtctggaacggcgaggtcatcctggcggaaatcaaagcgatgggttataccggtggccgttccatgttgcgctactacatccagcccaaacgtaagatgcggccatcgaagaaaacggttcgcttcgaaactcagcccggttaccagctacagcatgactggggagaagttgaggctgaggttgccgggcaacgatgcagggttaacttcgcggttaatacgctggggttctcacgtcgcttccatgtcttcgcggcaccaaagcaggatgctgaacatacctatgagtcactggtccgcgcctttcgctacttcggcggtagcgtgaaaaccgtgctggtcgataaccagaaagccgcagtgctgaaaaataacaacgggaaggtggtgttcaactccgggttcctgctgctggccgatcactatggcttcctgccacgggcctgccgtccacgaagggccagaaccaaaggtaaggttgaacggatggtgaaatacctcaaggaaaacttcttcatccggtaccgccggttcgacagcttcgcccatgttaaccagctactggagcagtggatggctgacgttgctgacaggcgagaacttcgccagttcaggcagacaccggaacagcgcttcacgcaggaacaggagcatctgcatccgctgccgggtacggacttcgataccagctatttcgatatccgtcatgtctcctgggatggctatatcgaggttggcgggaaccgttacagcgtgccggaaagcctgtgtggccagccggtatcaatacggatctcgctggatgatgaactacggatctacagtaatgagcaacaggtagcatcgcaccgtctctgttcggctgcatccagctggcaaaccgtgccggagcatcacgccccactctggcagcaggtcagtcaggtggaacacagaccgttgagtacgtatgaggagctgttgtga

SEQ ID NO: 486796 - DNA, 207 bp, Shigella sonnei
atgttgggtggagcggacaatccaaatggtgaattactgtcttatatcattggcgctgacaagagctactgttgctgttatcatggcgataagacaaagtttgtttccggtacgtctcatgagtgtctccctaccttaaagtatttattctcggtgagttattatccgaagattatcttatcatcagtttctgagcgcgttcagtga

SEQ ID NO: 486797 - DNA, 438 bp, Shigella sonnei; identical to SEQ ID NO: 5248

SEQ ID NO: 486798 - DNA, 1566 bp, Shigella sonnei
atggaaacagctgtagcgtactataaagatggtgttccttatgatgataaggggcaggtaatcattactcttttgaatggtaatccagacgggagtggctctggcggtggtggtggaactggaggtagcaaaagtgaaagttctgcagccattcatgccacagctaaatggtctactgctcaattgaagaaaacgcaggcagaacaggctgcccgagcaaaagctgccgcagaagcacaggctaaagcaaaagcaaaccgggatgcgctgactcaacatctgaaggatattgtgaatgaggcgcttcgccataattccactcatccggaggttattgacctggctcatgccaataatgcagcgatgcaggcagaagcagagcggttgcgccttgcaaaagcagaagaaaaagcccgtaaagaagcggaagctgcggaaaagtcttttcaggaagcagaacaacgacgtaaagagatagagaaggagcaggctgaaacagaacgccaattgaaactggctgaggatgaagagaaacgcctggcagcattgagtgaagaggcccgggctgtggaggtggcacaaaaaaatcttgctgctgcacaatctgagctggcgaaagtggatgaagagattaatacgctcaatacccgtttaagctccagtattcatgcccgtgatgcagaaacgaatacgctgtccggaaaacgaaatgagttggatcaggcatctgctaaatataaagaactggatgaaagggttaaacttttatctcctagggcgaatgatccgcttcagagtcgtcctttttttgaggccaccagactacgggcgagagctggtgatgagatggaggaaaaacaaaagcaggtaacagcatcagaaacgcgtcttaaccagattagctctgagataaatggaatccaagaggctatttctcaggctaataataagcgaagtacagcagtttcacgtattcatgatgctgaagataatttgaaaacagcacagactaatctcctgaactcgcagattaaggatgctgtggatgcaacagttagcttttatcaaacgctatctgaaaaatatggtgaaaaatattcaaaaatggcacaggaacttgctgataaatctaaaggtaagaaaatcagcaatgtgaatgaagctctagctgcttttgagaaatacaaggatgtattaaataagaaattcagcaaagcagaccgtgatgcaattttcaatgcactggaggcggttaagtatgaagactgggctaagcatttagatcagtttgccaagtacttgaagattacgggacatgtttcttttggatatgatgtggtatctgatatcctaaaaattaaggatacaggtgactggaagccgctatttcttacattagagaagaaagctgtagatgctggagttagttatgttgttgttttactttttagtgtgcttgctggaactacattaggtatctgggggattgctattgttacaggcattctatgtgcctttattgataagaataaacttaatactataaatgaggtgttgggtatttaa

SEQ ID NO: 486799 - DNA, 195 bp, Shigella sonnei; identical to SEQ ID NO: 5251

SEQ ID NO: 486800 - DNA, 324 bp, Shigella sonnei; identical to SEQ ID NO: 5250

SEQ ID NO: 486801 - DNA, 336 bp, Shigella sonnei
gtggaacaacatacccggcattacgtatatgcttctgatgacggttttgatcccaacttttccacccaaaaagccgacacaacacgaatgatggtgcctttttttcggcagttctgggatatgggagctaaagataaagcgacaggaaaatcacggagtgatgtgcaacaacgcattcaacagtttcacagccaggaatttttaaactcactccggggcacaactcaatttgcgggtactgattaccgcagcaaagaccttaccccgaaaaaatccaggctgctggctgacacgatttctgcggtttatctcgatggctacgagggcagacagtaa

SEQ ID NO: 486802 - DNA, 795 bp, Shigella sonnei
atgcatgaactggagacactgctgagtcgtcttaaaatggaacatctgggctaccacgttgaaagcctgctggagcaggcggccaaaaaagaactgaactaccgcgagttcctgtgcatggcgttgcagcaggaatggaacgggaggcatcagcgcggtatggagtcccggctgaaacaggcccgcttcccgtgggtcaaaacgctggagcagttcgacttcggcttccagccaggtatcgatcgtaaggtcgtccgtgagctggccgggctggcgttcgtggagcgtagcgagaacgtgatcctgctgggtccgcccggtgtgggtaaaacgcacctggcagtcgctctcggggtaaaagcggcggacgctggtcatcgggtactgttcatgccactggataagctgatcgccacactcatgaaggcaaaacaggaaaaccggctggaaaaacagctacagcagcttggttatgcccgggtactgatactggatgagataggctatctgccgatgacccgcgaggaagccagtctgttcttccggttgctgaaccgtcgatatgaaaaagcgagcatcgtgctgacgtcaaataaagggttcgccgactggggagagatgttcggcgataacgtgctggcaacggcaatcctggatcgactgctccaccactcaaccacactgaacatcaaaggagaaagctaccgattaaaggaaaaacgcaaagcgggagtgctggcaaaaaacgccacgccaatcagtgatgatgaaatggcggaaagcggacaacattaa

SEQ ID NO: 486803 - DNA, 1149 bp, Shigella sonnei; identical to SEQ ID NO: 486795

SEQ ID NO: 486804 - DNA, 873 bp, Shigella sonnei
atgacgccgctgaatgatgccctgtaccgttatgtgatgaatacccgcaagcttcacactgacgacacaccggtaaaggtactggcaccgggcctgaaaaagacgaaaacagggcgcatctggacgtatgtccgggatgatcgcaatgcgggttcgtcatctcctccggcggtctggttcgcgtactcatcgaaccggcaggggaaacacccggagcaacacctccgccccttccggggtatcctgcaggcggatgcgttcacaggttacgacaggttgttcagtgcagaacgtgaaggtggtgcactgacagaagttgcgtgctgggcccatgcccggcgaaaaatccacgatgtatacatcagcagcaaaagtgcgacggcagaagaagccctgaagcgaatcagtgaactgtacgccatcgaggatgaaatacggggattaccagagtcagagcgtcttgcagccaggcagcagcgaagcaaagcgttactgacgtcgctgcatgaatggatggtggagaagaatggcacgctgtcgaaaaaatccagactgggcgaagcgttcagctatgtactgaatcagtgggacgctctctgttattacagtgatgatggtctggcagaagcggacaataacacagcggaaagagcgcttcgtgcagtctgtctcggaaagaaaaattacgtgttcttcggtagcgatcacggcggcgagcgtggagcactgctgtacgggctgatcggcacctgccgtctgaacggtatcgatccggaagcgtatctgcgccatattctgagcgtactgccggaatggccctccaaccgtgttgacgaactcctgccatggaacgtagtactcaccaataaataa

SEQ ID NO: 486805 - DNA, 693 bp, Shigella sonnei
atgaaaacaattggtttgctgggaggaatgagctgggaatccaccattccttactatcgtctgataaatgaaggcattaaacagcggcttggtgggcttcactctgcgcaagtgctgctacatagcgtcgattttcatgaaatagaagagtgccagcgtcgcggggaatgggataaaaccggggacattctggctgaggcggcgcttggcttacagcgggcgggcgcagaaggtattgtgttatgtaccaatacgatgcataaagtggcggatgccattgagtcacgttgcactctgcctttcttacacattgcggatgccaccggacgtgcaattaccggggccggaatgactcgtgtggcgctgctgggtacgcgttacaccatggaacaggatttttatcgcgggcggctgacggaacaattttccatcaattgtcttattccggaagcggatgaacgggcgaagattaatcagattatttttgaagaactgtgtctggggcaatttaccgaagcgtcacgcgcttattatgcgcaagtgattgctcgccttgcagaacagggggcgcagggtgtcatttttggctgcacagaaattggtttattggttccagaagagcgcagtgttttgcctgtgtttgatactgcggcgatccatgccgaggatgctgtcgcttttatgctgtcgtag

SEQ ID NO: 486806 - DNA, 1194 bp, Shigella sonnei
atgagtgagtcagtgcacactaacacttcgttgtggtcgaaggggatgaaagcggttatcgtggcgcagtttctctctgcgtttggcgataatgccctactgtttgccactctggcgttactgaaagcgcagttctatccggagtggagccagcccatcctgcaaatggtgtttgtaggtgcttacattctttttgcgccgtttgtcgggcaggtggcggatagcttcgccaaaggccgggtgatgatgtttgccaacggcctgaagctgctgggcgcagccagtatctgctttggtatcaatccgtttctcggctatacgctggtgggtgttggtgctgcagcctattcaccggcgaaatacggtattctcggcgaattaaccacgggtagtaagttagtgaaagctaacggtttaatggaagcttctaccatagcggcgattttgctcggttccgtagccggtggtgtgctggctgactggcatgtcctcgtcgccctggccgcatgcgcactggcctacggtggtgcggtcgttgccaatatctacattcccaaactggcggcggcgcgtccggggcagtcctggaatctcatcaacatgacccgcagtttcctgaatgcctgcacctcgctatggcgcaatggtgaaacgcgtttttcgctggtgggcaccagtttattctggggagcgggtgtcacgctgcgtttcctgttggtgctgtgggtaccggtggcgctgggcattaccgataacgctacgcccacctatctcaacgcgatggtagcgattggtatcgtggttggcgcaggtgcggcagcgaagttagttacgctggaaaccgtgtcacgctgtatgccagccgggattttgattggcgtggtggtactgattttttccctgcaacacgagctgctgccagcctatgccttgttgatgctgattggcgtgatggggggcttttttgtcgttccgctcaatgcgttgctacaggagcggggtaaaaaaagcgtcggggcggggaatgcgattgcagtacaaaaccttggcgaaaacagcgccatgttgttgatgctgggcatttactcgctggcggtaatggtaggcatcccggtcgtgcccattggcattggcttcggtgcgctgtttgcgctggcaataacggcgctgtggatctggcagcgccgtcattaa

SEQ ID NO: 486807 - DNA, 1419 bp, Shigella sonnei
atgagccagtcactgtttagccaaccattgaacgttattaacgtcggcatcgccatgtttagcgatgacctgaaaaagcagcatgtagaagtgactcaactcgactggacgccgccggggcagggcaatatgcaggtggtgcaggcgctggataacattgccgattcgccgctggcagacaaaatcgccgccgctaaccagcaggcgctggagcgcattatccagtcgcatccggtgctgattggttttgatcaggcgattaacgtggtgccgggcatgacgccgaaaaccattcttcacgccgggccgccgatcacctgggaaaaaatgtgcggcgcgatgaaaggcgcggtcaccggagcgctggtgttcgaaggactggcgaaagatctcgacgaggcggctgaactggcggcctccggggagatcaccttctcgccgtgccacgaacacgactgtgtgggatcgatggcgggcgttacctcggcctcgatgtttatgcacatcgtgaaaaacaaaacctacggcaacatcgcttacaccaatatgagcgagcagatggcgaagattttgcgtatgggtgccaacgatcagagcgtgatcgaccgcctcaactggatgcgcgatgtgcaggggccaatgctgcgcgacgcgatgaaaattatcggtgagatcgatctgcgcttaatgctggcgcaggcgctgcatatgggcgatgagtgccataaccgcaataacgccgggacgacgctgctgattcaggcactgacgccggggatcattcaggcaggctattccgtcgagcaacagcgcgaagtgttcgagtttgtcgccagcagcgactacttctccggcccgacgtggatggcgatgtgtaaagcggcgatggatgcggcgcacggcatcgaatacagcaccgtggtcaccaccatggcgcgtaacggcgtcgagttcggcctgcgggtcagcggcctgccggggcaatggtttaccggcccggcgcagcaggtgatcggcccgatgtttgccggttataagccggaagattcggggctggatatcggcgacagcgccatcaccgaaacctacggtattggtggatttgctatggcgaccgcgcctgcaatcgtcgcgctggtgggcggcacggtggaagaggctatcgatttctcccgtcagatgcgtgaaatcactctcggtgaaaaccccaacgtcaccattccgctgctcggttttatgggcgtgccgtcggcaatcgacatcacccgcgtgggtagcagcggcattctgccggtgatcaacaccgccatcgcccataaagatgcgggcgtcggcatgattggcgcgggcattgtgcatccaccattcgcttgcttcgagaaagccattctcggctggtgcgaacgttacggcgtctga

SEQ ID NO: 486808 - DNA, 390 bp, Shigella sonnei
atgacaaatggtatctcaacttcgccacattgtctttataaatcaaatatagtagatgatgtaataataaataaaacaagacaaaatgagttagtaaaagtattttgcgagtataaaacagagttcttaattttgtttgatgacttttttagaagccataacttgcctaaaccatctccagtccttcatcatttttttcaatatactcatctgagagatgcatatttttatagatgtaaactcatagaacatacagttcaattttattttttaaacacaaaggtatcacattacttagattggatgtttttgatgacagaacaagcgaatgtctttctgaagagattaagatataccaagaatgccatgaaaaattcgttaattttttaa

SEQ ID NO: 486809 - DNA, 381 bp, Shigella sonnei
atgctgggagcggtggaacgccgcttcggcaacgatcttccgtcgtctccagtggagtggctgacggataatggttcatgctaccgggctaatgaaacacgccagttcgcccggatgttgggacttgaaccgaagaacacggcggtgcggagtccggagagtaacggaatagcagagagcttcgtgaaaacgataaagcgtgactacatcagtatcatgcccaaaccagacgggttaacggcagcaaagaaccttgcagaggcgttcgagcattataacgaatggcatccgcatagtgcgctaggttatcgctcgccacgggaatatctgcggcagcgggcttgtaatgggttaagtgataacagatgtctggaaatatag

SEQ ID NO: 486810 - DNA, 1740 bp, Shigella sonnei
atgctgtttgctggcgggatcggtatcgacctgatgttcttctccgtagccgaaccggtaacgcagtatatgcagccgccggaaggcgcgggacagacgattgaggccgcgcgtcaggcgatggtctggacgctgtttcactacggcttaaccggctggtcgatgtatgcgctgatgggcatggcgctcggatactttagctatcgttataatttgccgctcaccatccgctcggcgctgtacccgatcttcggtaaacggattaacgggccgataggtcactcagtggatattgcagcggtgatcggcactatcttcggtattgccactacgctcggtatcggtgtggtgcagcttaactatggcttgagcgtactgtttgatattcccgattcgatggcggcaaaagcggcactgatcgccttgtcggtgataatcgccacgatctctgtcacctccggtgtcgataagggcattcgtgtgttatcggaacttaacgttgcgctggcgctgggattgatcctgttcgtattgtttatgggcgacacctcgttcctgcttaatgcgctggtgctgaacgttggcgactatgtgaatcgctttatgggcatgacgctcaacagttttgccttcgaccgtccggttgagtggatgaataactggacgctcttcttctgggcatggtgggtggcatggtcgccgtttgtcggcttgttcctggcgcgtatctcgcgtgggcgtaccattcgccagttcgtgctgggcacgttgattattccgtttaccttcacgctgttatggctctcggtattcggcaatagcgcgctgtatgaaatcatccacggcggcgcggcatttgccgaggaagcgatggtccatccggagcgcggcttctacagcctgctggcgcagtatccggcgtttacctttagcgcctccgtcgccaccattactggcctgctgttttatgtgacctcggcggactccggtgcgctggtgctggggaatttcacctcgcagcttaaagatatcaacagcgacgcccccggctggctgcgcgtcttctggtcggtggcgattggtctgctgacgctcggcatgctgatgaccaacgggatatccgcgctgcaaaacaccacggtaatcatggggctgccgttcagctttgtgattttcttcgtgatggcggggttgtataaatctctgaaggtagaagattaccgccgtgaaagtgtcaaccgcgataccgcgccgcgaccgctggggcttcaggatcgcctgagctggaaaaaacgtctatcgcgcctgatgaattatccgggcacgcgttacactaaacagatgatggagacggtctgttacccggcaatggaagaagtggcgcaggagctgcggttgcgcggcgcgtacgtggagctaaaaagcctgccgccggaagagggacaacagttggggcatctggatttgttggtgcatatgggcgaagagcaaaactttgtctatcagatttggccgcagcaatattcggtgccgggctttacctaccgcgcacgtatcggtaaatcgacctactaccgactggaaaccttcctgttagaaggcagccagggcaacgacctgatggactacagcaaagagcaggtgatcaccgatattcttgaccagtacgagcggcaccttaactttattcatctccatcgtgaagcgccgggccatagcgtgatgttcccggacgcgtga

SEQ ID NO: 486811 - DNA, 588 bp, Shigella sonnei
atgcccaaattggggatgcagtcgatccggcgcagacaactgatcgacgccacactggaagcaataaatgaagtgggcatgcacgatgcaacgatcgcgcagatcgcccgccgtgcaggcgtttctacggggatcatcagccactatttcagggacaaaaatggtctgctggaagcaaccatgcgcgatatcaccagtcagctgcgtgacgcggttttgaatcgattacatgcacttccgcagggcagtgcagagcagcgattacaggcgattgttgccggaaacttcgatgaaactcaggtgagcagtgcggcgatgaaagcctggctggcgttctgggccagcagtatgcatcagccgatgctctatcgtttacagcaggtcagcagccgccgcttgctgtcgaatctggtgagcgagtttcgccgcgaattgccgcgcgaacaggcacaggaagcgggctacggccttgccgcgctgattgacggattatggctgcgcgcggcactaagcggcaaaccgctggataaacctctcgcacactcgctgacccgtcactttattactcagcatttacccaccgattaa

SEQ ID NO: 486812 - DNA, 1473 bp, Shigella sonnei
atgtcccgaatggcagaacagcagctttatatacatggtggttatacctccgccaccagcggtcgcaccttcgagaccattaacccggccaacggtaacgtgctggcgaccgtgcaggccgccgggcgtgaggatgtcgatcgcgccgtgaagagtgcccaacaggggcaaaaaatctgggcggcgatgaccgctatggagcgctcgcgtattctgcgtcgggccgttgatattctgcgtgaacgcaatgacgaactcgcaaaactggaaaccctcgataccggaaaagcatattcggaaacctcaaccgtcgatatcgttaccggtgcggacgtgctggagtactacgccgggctgatcccggcgctggaaggcagccagatcccgttgcgtgagacgtcatttgtttatacccgccgcgaaccgctgggtgtggtggcggggattggcgcatggaactacccgattcagattgccctgtggaaatccgccccggcgctggcggcaggcaacgcaatgattttcaaaccgagcgaagtcaccccgcttaccgcgttaaagctggctgaaatttacagcgaagcgggcctgccggacggcgtatttaacgtgttgccgggggtgggcgcggagaccgggcaatatctgaccgagcatccgggcattgccaaagtgtcatttaccggcggtgtcgccagcggcaaaaaagtgatggctaactcggcggcctcttccctgaaagaagtgaccatggaactgggcggtaaatcaccgctgatcgttttcgatgatgcggatctcgatctcgccgccgatatcgccatgatggcaaacttcttcagctccggtcaggtgtgtaccaatggcacccgcgtcttcgttccggcgaaatgcaaagccgcatttgagcagaaaattctggcgcgcgttgagcgcattcgcgcgggcgacgttttcgatccgcaaactaacttcggcccgctggtcagcttcccgcatcgcgataacgtgctgcgctatatcgccaaaggcaaagaggaaggcgcgcgcgtactgtgcggcggcgatgtactgaaaggcgatggcttcgataacggcgcatgggttgcaccgaccgtgttcaccgattgccgcgacgaaatgaccatcgtgcgcgaagagatcttcggtccggtgatgtcgcttctcacttatgaatctgaggacgaagtgattcgccgcgccaatgataccgactacggcctggcggcgggcatcgtgacggcggacctgaaccgcgcgcatcgcgtcattcatcagctggaagcgggtatttgctggatcaacacctggggcgaatccccggcagagatgcccgttggcggctacaaacactccggcattggtcgcgagaacggcgtgatgacgctccagagttacacccaggtgaagtccatccaggttgagatggctaaattccagtccatattctaa

SEQ ID NO: 486813 - DNA, 1671 bp, Shigella sonnei
ttgcaatttgactacatcattattggtgccggctcagccggcaacgttctcgctacccgtctgactgaagatccgaatacctccgtgctgctgcttgaagcgggcggcccggactatcgctttgacttccgcacccagatgcccgcagcgctggcgttcccactacagggcaaacgctacaactgggcctatgaaacagagcctgaaccgtttatgaataaccgccgcatggagtgcggacgcggtaaaggcctgggtggatcgtcgctgatcaacggcatgtgctacatccgtggcaatgcgctggatctcgataactgggcgcaagaacccggtctggagaactggagttatctcgactgcctgccctactaccgcaaggccgagactcgcgatgtgggcgagaacgactaccacggtggcgatggcccggtgagcgtcactacctccaaacccggcgtcaatccgctgtttgaagcgatgattgaagcgggcgtgcaggcgggctacccgcgcacggacgatctcaacggttatcagcaggaaggttttggtccgatggatcgcaccgtcacgccgcagggccgtcgcgccagtaccgcgcgcggttatctcgatcaggccaaatcgcgccctaacctgaccattcgtactcacgctatgaccgatcacatcatttttgacggcaaacgcgcggtgggcgtcgaatggctggaaggcgacagcaccatcccaacccgcgcaacggccaacaaagaagtgctgttatgtgcaggcgcgattgcctcaccgcagatcctgcaacgctccggcgtcggcaacgctgaactgctggcggagtttgatattccgctggtgcatgaattacccggcgtcggcgaaaatcttcaggatcatctggagatgtatctgcaatatgagtgcaaagaaccggtttccctctaccctgccctgcagtggtggaaccagccgaaaatcggtgcggagtggctgtttggcggcactggcgttggtgccagcaaccactttgaagcaggcggatttattcgcagccgagaggaatttgcgtggccgaatattcagtaccatttcctgccagtagcgattaactataacggctcgaatgcggtgaaggagcacggtttccagtgccacgtcggctcaatgcgctcgccaagccgtgggcatgtgcggattaaatcccgcgacccgcaccagcatccggcaattctgtttaactacatgtcacacgagcaggactggcaggagttccgcgacgcaattcgcatcacccgggagatcatgcatcaaccgacgctggatcagtatcgtggccgcgaaatcagccccggcacggaatgtcagacggatgagcagctcgatgagttcgtgcgtaatcacgccgaaaccgccttccatccgtgcggtacctgcaaaatgggttacgacgagatgtccgtggttgacggcgaaggccgcgtgcatgggctggaaggcctgcgcgtggtggatgcgtcaattatgccgcagattatcaccgggaatttgaacgccacgacaattatgattggcgagaaaatagcgtatatgattcgtggacaggaagcgctgccgaggagcacggcgggatattttgtggcaaatgggatgccggtgagagcgaaaaaatga

SEQ ID NO: 486814 - DNA, 1428 bp, Shigella sonnei
atgtcgatcaaaaccagtaatacagattttaagacacgcatccgtcagcaaattgaagatccgatcatgcgcaaagcggtggcaaacgcgcagcagcgtattggggcaaatcggcaaaaaatggtcgatgaattggggcactgggaggagtggcgcgatcgggccgcccagatacgtgatcatgttctgagtaatctcgacgcttatctgtaccagctctcagaaaaagtgacgcaaaacggcggtcacgtctggtttgcaaaaaccaaagaagacgctacccgctacattttacaggttgcccaacgcaaaaatgcccggaaggtggtgaaatctaaatcgatggtgaccgaagagattggtgtcaatcatgtgttgcaggatgctggcattcaggtgattgaaaccgatctgggtgaatatattctccagctggatcaagatccgccatctcatgttgtggtcccggcaattcataaagatcgccatcagatccgtcgagtgctacacgaacgtctgggctatgaggggccggaaacgcctgaagcgatgaccttattcatccggcaaaaaatccgcgaagatttcctcagtgctgaaataggtattaccggctgtaatttcgcggtggcagagacaggttcggtatgcctagtgaccaatgaaggtaatgcgcgaatgtgtaccacgctgcctaaaacgcatattgcagtgatgggaatggagcgtattgcccccacgtttgccgaggtagatgtattgatcaccatgctggcgcgcagtgccgttggtgcacgtttgacgggatacaacacctggctgacaggaccgcgcgaagcggggcacgttgatggtcctgaagagtttcatctggttattgtcgataacgggcgttctgaggtgctggcctctgaatttcgggatgtgctgcgctgtattcgctgcggggcttgtatgaatacttgtccggcatatcgccatattggcggtcatggatatggctctatttatccagggccaattggtgcggtgatttctccgctacttggcggctataaagattttaaagatttaccctacgcctgctctttatgcactgcttgtgacagcgtgtgtccggtgcgtattccgctgtcaaaactgattttgcgtcatcgtcgggtgatggctgaaaaagggatcaccgcaaaagcagagcaacgggcgataaaaatgttcgcttatgccaatagtcatccaggattgtggaaagtcgggatgatggccggcgctcatgcggcaagctggtttatcaatggcggcaaaacaccactcaaatttggcgcgattagcgactggatggaagcacgcgatcttcctgaagctgacggagagagtttccgtagttggtttaagaaacatcaggcgcaggagaaaaagaatggataa

SEQ ID NO: 486815 - DNA, 381 bp, Shigella sonnei; identical to SEQ ID NO: 458903

SEQ ID NO: 486816 - DNA, 204 bp, Shigella sonnei
atgactagtctaaaaactagtattaagactatcacttatttaagtgatactggttgtctggagattcagggggccagtctaatcattttccccatggttcttactggtggtatggcgattaaacgcctggcgaacgttgccagcaatgtgtgtggctgtaggcttgctgatgtgctggccgctgtggcaaaaacctcgacctga

SEQ ID NO: 486817 - DNA, 189 bp, Shigella sonnei; identical to SEQ ID NO: 463227

SEQ ID NO: 486818 - DNA, 2757 bp, Shigella sonnei; identical to SEQ ID NO: 481892

SEQ ID NO: 486819 - DNA, 564 bp, Shigella sonnei; identical to SEQ ID NO: 469005

SEQ ID NO: 486820 - DNA, 546 bp, Shigella sonnei
atgtacaacgagaaaggtgaaaacctgagtaacacacttatcgaaaaagaaatttacgcaccagccggacgcgaaatgtggcaacggatggaacaatcccactggatcctcgacggtaaaaaagatgcgccggtcattgtctacgtcttcgccgatccgttctgcccatattgtaaacagttctggcagcaggcgcgcccgtgggtagattctggcaaagtgcaattaagaacattgttggttggggttatcaagccagaaagcccggcgacagcagcggcaattcttgcctccaaagatcccgcaaaaacctggcaacaatatgaagcctctggtggcaagcttaagctaaacgtgcctgcaaacgtaagtacagagcaaatgaaagtgttaagtgacaatgagaaactgatggacgatctgggggcaaatgtcacgccggctatctattacatgagtaaggaaaatacgctgcaacaggccgtggggttgcccgatcagaaaacgcttaatatcattatgggggtaatgactccaacttattga

SEQ ID NO: 486821 - DNA, 732 bp, Shigella sonnei
atgtccagaaaaagttgtttaatcaggctctttaaaacaacagtttcatgtaagttatttaccgcgattatactcagagtttttttaggccaaccagcattaacttatgcaggcgttgtcattggtggtacgcgggtggtttacttaagtaataatgctgataaatctatttctgtatttagcaaagaagaaaaaataccttatctcatccaggcttgggtagatccatttaataaagaggataaaagcaaagcgccgtttaccgttattccgccagtatcacgattagaaccttcgcaagaaaaaatattacgcattattcacaccaaaggtgtgtcattgcctgatgatcgcgagtcagtcttctggctgaatattaaaaatattccgccatcagcgagcaacaaagcgacgaactcgctggaaatagcagtaaaaacgcgtatcaagctgttctggcgaccagcaaatatccgccttattcccgaagatgctgcgccgaaagtgaaatggcgccgggaagggcgaaatctgatagcagagaatcccaacccaattcatatcagtgtgatggatgtcatcgttgatggccatgatgtgcccctcaatatgatccgtccttttgaaacgctcacgttacctttacctgctaattctgcgggaggccaaatgacctggcgatttattaatgattacggcgcagtcagtgacccgataaaaatgacgctgtaa

SEQ ID NO: 486822 - DNA, 189 bp, Shigella sonnei; identical to SEQ ID NO: 463227

SEQ ID NO: 486823 - DNA, 441 bp, Shigella sonnei
gtgataagcccactgccagtttatgcctcaacctttgaaggctgggactcccctgaacgtagtaccttcccactgcaactgtttggtttccattacaaatcccgtactcactcgacctacggcaacattgatgtcctgaaggcagcctgccgtcaggaagtgtggatcaaccctatagatgcacagaaacgtgggattgccaccggcgatatggtgcgggtgtttaaccatcgtggcgaagttcggctaccagccaaagtaacaccacgcattctccctggggttagcgctatgggccagggagcctggcacgaggccaatatgtctggcgataaaatcgaccatggcggctgtgtgaatacgctaaccactctgcgcccttcaccactggcgaagggaaacccgcagcacactaatctggtcgagatcgaaaaaatataa

SEQ ID NO: 486824 - DNA, 462 bp, Shigella sonnei
gtgtccgttaaactcaggctacctcaatatgccgacattctgctgccagacctgatgaccgttgagcaggaagatattattcctaacgactacgccggtaacatgggatatctcattttcctccagcctgtcaccagcgaaaaattcgaacgcaaaccgatttactggatcctgagtgaagtcgcgaaacgtcttggacctgacgtctatcaaaagttcactgaaggtcgcacgcaggaacaatggttacaacatctgtacgccaaaatgcttgccaaagatccggcgttaccgtcttacgacgaactgaaaaaaatgggtatctataagcgtaaagatcccaatggtcattttgtcgcctacaaagcatttcgtgacgaccccgaggcaaatccacttaaaacgccttccggtaagattgaaatttattccagcaagctggcggaaattgcccgtacctag

SEQ ID NO: 486825 - DNA, 189 bp, Shigella sonnei; identical to SEQ ID NO: 463227

SEQ ID NO: 486826 - DNA, 249 bp, Shigella sonnei
atgaaaaaataccagcagcttgcagaacaattacgcgagcagattgcgtcgggtatctggcaacccggcgatcgtttgccttcgttgcgtgaccaggtggcgctttcaggcatgagctttatgactgtcagccatgcctatcagttgctcgaaagtcagggatatattatcgcacgaccgcagtcgggttattacgttgcgccacaggcaataaaaatgccgaaagcgccagtcattccagtcacttga

SEQ ID NO: 486827 - DNA, 348 bp, Shigella sonnei; identical to SEQ ID NO: 485665

SEQ ID NO: 486828 - DNA, 645 bp, Shigella sonnei; identical to SEQ ID NO: 482559

SEQ ID NO: 486829 - DNA, 579 bp, Shigella sonnei; identical to SEQ ID NO: 483580
